United States Patent Application Publication US 2007/0224201 A1 - sequence listing, part 2

SEQ ID NO: 1427 - DNA, 5185 bp, Homo sapiens
gtccttgcttcttttttcattgatgtaaatttttttaacttaatatgaaaactctccaagtcttgatcatcagccaggattttgccacagcaatttcattctcttatcggagcttgtatgtgtcaaagtatacttcagagtgcaaacattaagcaagtaatatattttacctacagatacttatgaagacattctttcgctatcgtgagtaaaagtatataaagctgtttctaactgaaaatgcttgaaataagcctgtaatagaaatattttttcattttttaaaaaagggcggaattcccagactgtcttcgccttcttgcacttcgcgggagaagttgttggcgcgaatggatcctgagcctcgataacagattcctcaaccggcccacccgccagccagccagcgccttcatcctggggctgcgatggacattcggaaattctttggagtaataccaagtggaaagaaacttgtaagtgaaacagtaaagaagaatgagaaaacaaagtctgatgaagaaactttaaaagcaaagaaaggaataaaggaaatcaaggtaaatagctcccgtaaagaggatgacttcaaacaaaagcaaccaagcaagaaaaagaggatcatctatgattcagattcagagtcagaggagacgttgcaggtaaaaaatgccaaaaagccaccagaaaaactgccagtatcttctaaacctggtaaaatttcacggcaggatcctgttacatacatttcagaaacagatgaagaagatgactttatgtgtaagaaggcggcctctaaatcaaaagagaatggaagatctacaaatagtcatcttggaacatcaaacatgaaaaagaatgaagaaaacactaagaccaagaataagcctttatcaccaataaaacttacacccacatcagtacttgattattttggaactggaagtgtccaaagatctaataagaagatggtggcaagcaaaagaaaagagctttcacaaaatacagatgagtctggattaaatgatgaagccatcgccaagcaattacagcttgatgaagatgcggagctggagaggcagttgcatgaagatgaagagtttgccagaacattagccatgttggatgaagaacccaagaccaaaaaggctcgaaaggacacagaagcgggagaaacgttttcatctgtccaagccaatttaagtaaagcagaaaaacataaatatcctcataaagtaaaaacagcacaagtttcagatgaaagaaagagctacagtcctaggaagcaaagtaaatatgaaagttcaaaagaatctcagcaacattccaagtcatcagctgacaaaataggagaagtctcttctcccaaggccagttctaagctggcaattatgaaaagaaaagaagagagctcttataaagaaatagagcctgtggcctcaaaaagaaaagaaaatgccattaaattgaaaggagagacaaaaactcctaagaaaaccaaaagttctccagctaaaaaagagtctgtaagtcctgaagattctgaaaagaaacgcactaattatcaagcttatcgaagctacttaaatcgagaaggtcccaaggctctgggctccaaagaaataccaaagggagctgaaaattgcttggaaggccttatatttgtaatcacaggcgtgctggagtctattgaacgagatgaggccaagtctctaattgaacgttatgggggaaaagtaacaggaaatgtcagcaagaaaacaaattatcttgtcatgggtcgtgatagtggacagtccaagagtgataaggccgcagccttggggacaaaaattattgatgaagatggcctgttgaatctgattcggactatgccaggcaagaaatccaagtatgaaatagcagttgaaactgagatgaagaaagagtccaaactggagagaacaccccaaaaaaatgtccaaggaaaaagaaaaattagtccatctaaaaaggaatcagaatctaaaaagagcaggccgacttccaaaagggacagtttggcaaagacaataaaaaaggaaacagatgtgttttggaaaagcctggatttcaaggagcaggtggctgaggagacaagtggtgacagcaaggctaggaatttggctgatgacagcagtgaaaacaaagtggaaaatttgctctgggtggataaatataagccaacctcgctcaagaccataattggacagcaaggtgaccagagctgtgccaacaaactcctacgctggctccgaaactggcaaaagagttcttccgaagataaaaaacacgcagcaaagtttggtaaattttccggcaaagatgatggctctagttttaaagcagcgttgctgtcaggccctcctggtgttggcaaaaccaccacagcttccctggtgtgtcaggagttgggatacagctacgtggaactgaatgcaagtgacacccggagtaagagcagtttgaaggcgattgttgctgagtcactgaacaataccagcatcaaaggcttttattcaaatggagcagcctcttcagtaagcacgaaacatgctctcatcatggatgaagtagatggcatggcaggcaatgaggataggggaggaattcaggaattaattggcctgataaaacatactaaaattcccattatttgtatgtgcaatgatagaaatcatcccaagattcgctctctggttcattattgttttgatcttcgttttcaaagacctcgggttgaacagattaagggtgctatgatgtctattgcatttaaagaaggtttaaagattccccctccagctatgaatgaaataattttgggagccaatcaagatatcagacaggttttacataatctgagtatgtggtgtgcacgaagtaaagcattaacctatgaccaggccaaagctgattctcacagagccaaaaaggatatcaaaatgggcccatttgatgttgcccggaaagtgtttgcagctggagaggagactgctcacatgtcacttgtggacaagtcagatctcttttttcatgattattcaatagcacccctcttcgtccaggaaaattacatacacgtgaagcctgtagcagcagggggtgacatgaaaaagcacctgatgcttttaagcagagcagcagacagcatatgcgatggtgacctagtggacagccagatccggagtaagcaaaactggagtcttctgcctgcgcaggccatttatgccagtgttcttcctggagagttgatgagggggtacatgacccagtttcccaccttcccaagctggctggggaagcactcgtctacaggcaaacatgatcgtattgttcaggacctggccttgcatatgagtctcagaacttactccagcaaaaggactgtaaacatggattatctgtcgcttctaagggatgcacttgtacagcccttgacctcacaaggagtagacggagtacaggatgttgttgcacttatggacacatattatttgatgaaagaagactttgagaatatcatggaaatcagcagctggggtggcaaacctagtcccttttcaaagctggatcccaaggtgaaagcagccttcacaagagcttacaataaggaagcccaccttactccatactcacttcaagctataaaggcatctagacacagcacaagcccatccctggattcggaatacaatgaagaattaaatgaagatgactctcaatctgatgagaaagaccaagatgctatagaaactgatgccatgatcaagaaaaagacaaaatcttcaaagccttcaaaaccagaaaaagataaggagcccagaaaaggaaaaggaaaaagttcgaagaaatgaaaccatttttcactagcgacagccactttttactctccctcctgaccagtccagctggtctagagaaagccttgttttttcccagagcaaccatgttttagcataatgggatgacctggtgtcccattataaataaagggtggtatggctagaagggtatgagcagtaggcttatgtacacctcttatagaggttgataggactgcttgggtcctccactgtcctctgtcaatctagttagacgtgcttctgaatgactgtagaattggaactagaaactacacctgggctttggagtcagattttagttaacaataatgagcctggagcagtagtactaaggcgtcttttgtaggcttaagaatttatcctaatggcctttataggaccaatgctgattttttttaaaggcagttcctattatgtggtgaaattttgtaaataaatgattatacaaaacagtcaccacctagaactgggtattctttgtacattgtcagatatctttcaaagtataaattaggaataaaaatgttccacatgatatgtgtacaaattctttttaagattgtcatcttgtacagcaaaatattatgttggtatattacttccttattaatttgcaaatgattggattaaaaaagctcactgtattccttactaacctgttgtgtgaaacataacattggcagtcgaggagtcagaactcggattcccagcctcactccctctgtgtgtgttgaccacgtctctgctgtgaataggatttcatgcagtggtctgttatggggctttgcagcgtggggggctgcagaagattctcagacattcttatccttctggagtctcaacccatcaggttcagaccagtaggaaccaggctgggtcaggctcttaatttcactacggtgggggacaaaatgaacactggcttttgttcactttgcccctgagagatctagtcctgtcctgtgatggcttccacaaaccctgttggaagtttgggttattcctataactgtatgtgttgagtggccgtgacgtatggacctagcctggaatttagatgtctagctattttttaatcttgttggtaaatgctcagaggtctgtgctacctctgtgaggtatatactaaaatgaatgtaaaataaggatcgtattccctgctttaaggaactggtagtcttgtttgggtgatgagacaaagttcttgagacatttaaactgtatttaccagtgtgaaaaatgtcatttatggagattaattcattatggaaataaaacattgcctaagcccttgcctgctg

SEQ ID NO: 1428 - protein, 1148 aa, Homo sapiens
MDIRKFFGVIPSGKKLVSETVKKNEKTKSDEETLKAKKGIKEIKVNSSRKEDDFKQKQPSKKKRIIYDSDSESEETLQVKNAKKPPEKLPVSSKPGKISRQDPVTYISETDEEDDFMCKKAASKSKENGRSTNSHLGTSNMKKNEENTKTKNKPLSPIKLTPTSVLDYFGTGSVQRSNKKMVASKRKELSQNTDESGLNDEAIAKQLQLDEDAELERQLHEDEEFARTLAMLDEEPKTKKARKDTEAGETFSSVQANLSKAEKHKYPHKVKTAQVSDERKSYSPRKQSKYESSKESQQHSKSSADKIGEVSSPKASSKLAIMKRKEESSYKEIEPVASKRKENAIKLKGETKTPKKTKSSPAKKESVSPEDSEKKRTNYQAYRSYLNREGPKALGSKEIPKGAENCLEGLIFVITGVLESIERDEAKSLIERYGGKVTGNVSKKTNYLVMGRDSGQSKSDKAAALGTKIIDEDGLLNLIRTMPGKKSKYEIAVETEMKKESKLERTPQKNVQGKRKISPSKKESESKKSRPTSKRDSLAKTIKKETDVFWKSLDFKEQVAEETSGDSKARNLADDSSENKVENLLWVDKYKPTSLKTIIGQQGDQSCANKLLRWLRNWQKSSSEDKKHAAKFGKFSGKDDGSSFKAALLSGPPGVGKTTTASLVCQELGYSYVELNASDTRSKSSLKAIVAESLNNTSIKGFYSNGAASSVSTKHALIMDEVDGMAGNEDRGGIQELIGLIKHTKIPIICMCNDRNHPKIRSLVHYCFDLRFQRPRVEQIKGAMMSIAFKEGLKIPPPAMNEIILGANQDIRQVLHNLSMWCARSKALTYDQAKADSHRAKKDIKMGPFDVARKVFAAGEETAHMSLVDKSDLFFHDYSIAPLFVQENYIHVKPVAAGGDMKKHLMLLSRAADSICDGDLVDSQIRSKQNWSLLPAQAIYASVLPGELMRGYMTQFPTFPSWLGKHSSTGKHDRIVQDLALHMSLRTYSSKRTVNMDYLSLLRDALVQPLTSQGVDGVQDVVALMDTYYLMKEDFENIMEISSWGGKPSPFSKLDPKVKAAFTRAYNKEAHLTPYSLQAIKASRHSTSPSLDSEYNEELNEDDSQSDEKDQDAIETDAMIKKKTKSSKPSKPEKDKEPRKGKGKSSKK

SEQ ID NO: 1429 - DNA, 4394 bp, Homo sapiens
atagttcgcgtagcggctcgagcgtggagatgaagcgtattttctcactgctagaaaagacttggcttggcgcaccaatacagtttgcctggcaaaaaacatcaggaaactaccttgcagtaacaggagctgattatattgtgaaaatctttgatcgccatggtcaaaaaagaagtgaaattaacttacctggtaactgtgttgccatggattgggataaagatggagatgtcctagcagtgattgctgagaaatctagctgcatttatctttgggatgccaacacaaataagaccagccagttagacaatggcatgagggatcaaatgtctttccttctttggtcaaaagttggaagtttcctggctgttggaactgttaaaggaaatttgcttatttataatcatcagacatctcgaaagattcctgtccttggaaaacatactaagagaatcacttgtggatgttggaatgcagaaaatctgcttgctttaggtggtgaagataaaatgattacagttagtaatcaggaaggtgacacgataagacagacacaagtgagatcagagcctagcaacatgcagtttttcttgatgaagatggatgaccgaacctctgctgctgaaagcatgataagtgtggtgcttggcaagaaaactttgttttttttaaatctgaatgaaccagataacccagctgatcttgaatttcagcaggactttggcaacattgtctgctataattggtatggtgatggccgcatcatgattggtttttcatgtggacattttgtggtcatttctactcatactggagagcttggtcaagagatatttcaggctcgtaaccataaagataatctaaccagcattgcagtatcacagactcttaacaaagttgctacatgtggagataactgcattaaaatccaagacttggttgacttaaaagacatgtatgttatactcaacctggatgaggaaaataaaggattgggtaccttgtcctggactgatgatggccagttgctagcactctctacccaaaggggctcacttcatgttttcctgaccaagcttcccatacttggggatgcctgcagcacaaggattgcctatctcacctccctccttgaagtcaccgtagccaaccctgttgaaggagagctaccaatcacagtttctgttgatgtggaacccaactttgtggcagtaggtctttatcatctggctgtaggaatgaataatcgagcttggttttatgtccttggagaaaatgctgtgaaaaaattgaaagatatggagtatctgggaacagtagccagtatttgccttcattctgactatgctgctgcactttttgaaggcaaagtccagttacatttgatagaaagcgaaatcttggatgctcaagaagaacgtgagactcggcttttcccagcagtggatgataagtgccgtatcttatgccatgccttaactagtgatttcctcatctatggtacagatactggtgtcgttcagtatttctacattgaagactggcaattcgttaatgattatcgacatcctgtcagtgtgaaaaagatttttcccgacccaaatgggaccagattagttttcattgatgaaaaaagtgatggatttgtttactgtccagtcaatgacgctacctatgagattccagatttttcaccaaccattaaaggtgttctttgggaaaactggccaatggataaaggtgtatttattgcttatgatgatgataaggtgtacacttatgtctttcacaaggacactatacaaggagccaaggttattttggctggtagcaccaaagttccttttgctcataaacctttgctgctatataatggagagctgacctgccaaacacagagtggaaaagtaaacaacatctaccttagcacccatggctttctcagcaacttaaaagatacggggcctgacgaactgagaccaatgctggcacagaatttaatgctaaagaggttttctgatgcttgggaaatgtgcaggattctgaatgatgaggctgcctggaatgagttggccagagcttgtctacatcacatggaagtggagtttgcaatccgtgtttatcggagaattggaaatgttggcatagtgatgtccttggaacaaataaagggaatagaggactacaatcttttggcaggacaccttgccatgtttaccaacgattataacctggctcaggacttgtaccttgcatccagctgtcctattgctgccctggagatgagaagggatttacagcattgggacagtgctctacaactggcaaagcatttggccccagaccagataccttttatatcaaaagaatatgctattcagcttgaattcgcgggtgattatgtaaatgctttggctcattatgagaaaggaataacaggtgataataaggaacatgatgaagcttgtctggctggagtggcccagatgtccataagaatgggagacatacgtcgaggggttaaccaagccctcaagcatcccagcagggtccttaaaagagactgtggagccatattggagaatatgaagcaattttcagaagcggcccaactgtatgaaaaaggtctctactacgataaagcagcatctgtttacatccgctctaagaattgggcaaaagttggtgatcttctgccccacgtttcttctcctaagatccatttgcagtatgccaaagccaaggaagcagatggaagatacaaagaagctgttgtagcttatgaaaatgcaaaacagtggcaaagtgtaatccgcatctatctggatcacctcaataatcctgaaaaagctgtcaatattgttagagagacccagtctctggatggagccaaaatggtagccaggttttttctacagcttggtgactatgggtctgccatccagtttcttgtcatgtccaaatgcaacaatgaagctttcacactggctcagcaacacaacaaaatggaaatctatgcagatattattggttctgaagacactactaatgaagactatcaaagcattgccttatactttgaaggagaaaagagatatcttcaggctggaaaattcttcttgctgtgtggccaatattcacgagcacttaaacacttcctgaaatgcccaagctcggaagataatgtggcaatagaaatggcaattgaaactgttggtcaggccaaagatgaactgctgaccaatcagctgatagaccatctcctgggggagaacgatggcatgcctaaggatgccaagtacctgttccgcttgtacatggctctgaagcaataccgagaagctgcccagactgccatcatcattgccagagaagagcagtctgcaggcaactaccggaatgcacacgatgttctcttcagtatgtatgcagaactgaaatcccagaagatcaaaattccctccgagatggccaccaacctcatgattctgcacagctatatactagtaaagattcatgttaaaaatggagatcacatgaaaggggctcgcatgctcattcgggtggccaacaacatcagcaaatttccatcacacattgtacccatcctgacgtcaactgtgattgagtgtcacagggcaggcctgaagaactctgctttcagcttcgcagctatgttgatgaggcctgaataccgcagcaaaatagatgccaaatacaaaaagaagatcgagggaatggtcaggagacccgatatatctgagatagaagaggccacgactccatgtccattctgcaaatttcttctcccagagtgtgaactcctctgtcctggatgtaaaaacagtatcccatattgcattgcaacaggtcgacacatgttgaaagatgactggacggtgtgtccacattgtgacttccctgctctatactcagaattgaagatcatgctaaacactgaaagcacatgtcctatgtgttcagaaagattaaacgctgctcagctgaaaaagatttcagactgtacccagtacctgcgaacggaggaggaactgtgattggcacgtgcagatacaatgctcctgagaagacagcattttccacaggaggctgtttcctcccctggtggatttaagagacggtcctttctggatacagagaaatgaaacaacggtgacctctccaggtcggcactttccacttctgtacggtggcaaaacgatgacatgtaaccttgctgtttattgtactttgtatattatttcctcttcaaagtctttcttacacactctatcctctgcactgttaatagtaacctatgacataattgtaaatattcagctttttgctaacttttgtattttgaaaaactttaaaataaaattgttgactag

SEQ ID NO: 1430 - DNA, 1119 bp, Homo sapiens
ggcacgaggcctgggcggctccgctagctgtttttcgtcttccctaggctatttctgccgggcgctccgcgaagatgcagctcaagccgatggagatcaaccccgagatgctgaacaaagtgctgtcccggctgggggtcgccggccagtggcgcttcgtggacgtgctggggctggaagaggagtctctgggctcggtgccagcgcctgcctgcgcgctgctgctgctgtttcccctcacggcccagcatgagaacttcaggaaaaagcagattgaagagctgaagggacaagaagttagtcctaaagtgtacttcatgaagcagaccattgggaattcctgtggcacaatcggacttattcacgcagtggccaataatcaagacaaactgggatttgaggatggatcagttctgaaacagtttctttctgaaacagagaaaatgtcccctgaagacagagcaaaatgctttgaaaagaatgaggccatacaggcagcccatgatgccgtggcacaggaaggccaatgtcgggtagatgacaaggtgaatttccattttattctgtttaacaacgtggatggccacctctatgaacttgatggacgaatgccttttccggtgaaccatggcgccagttcagaggacaccctgctgaaggacgctgccaaggtctgcagagaattcaccgagcgtgagcaaggagaagtccgcttctctgccgtggctctctgcaaggcagcctaatgctctgtgggagggactttgctgatttcccctcttcccttcaacatgaaaatatatacccccccatgcagtctaaaatgcttcagtacttgtgaaacacagctgttcttctgttctgcagacacgccttcccctcagccacacccaggcacttaagcacaagcagagtgcacagctgtccactgggccattgtggtgtgagcttcagatggtgaagcattctccccagtgtatgtcttgtatccgatatctaacgctttaaatggctactttggtttctgtctgtaagttaagaccttggatgtggtttaattgtttgtcctcaaaaggaataaaacttttctgctgataagataaaaaaaaaaaaaaaaaa

SEQ ID NO: 1431 - protein, 223 aa, Homo sapiens [sequence omitted]

SEQ ID NO: 1432 - DNA, 1303 bp, Homo sapiens
gccaaacaccagagcaccctagaaggtttaactaaaagaatgctcatgtttgacccagttcctgtcaagcaagaggccatggaccctgtctcagtgtcatacccatctaattacatggaatccatgaagcctaacaagtatggggtcatctactccacaccattgcctgagaagttctttcagaccccagaaggtctgtcgcacggaatacagatggagccagtggacctcacggtgaacaagcggagttcacccccttcggctgggaattcgccctcctctctgaagttcccgtcctcacaccggagagcctcgcctgggttgagcatgccttcttccagcccaccgataaaaaaatactcacccccttctccaggcgtgcagcccttcggcgtgccgctgtccatgccaccagtgatggcagctgccctctcgcggcatggaatacggagcccggggatcctgcccgtcatccagccggtggtggtgcagcccgtcccctttatgtacacaagtcacctccagcagcctctcatggtctccttatcggaggagatggaaaattccagtagtagcatgcaagtacctgtaattgaatcatatgagaagcctatatcacagaaaaaaattaaaatagaacctgggatcgaaccacagaggacagattattatcctgaagaaatgtcaccccccttaatgaactcagtgtcccccccgcaagcattgttgcaagagaatcacccttcggtcatcgtgcagcctgggaagagacctttacctgtggaatccccggatactcaaaggaagcggaggatacacagatgtgattatgatggatgcaacaaagtgtacactaaaagctcccacttgaaagcacacagaagaacacacacaggagaaaaaccctacaaatgtacatgggaagggtgcacatggaagtttgctcggtctgatgaactaacaagacatttccgaaaacatactggaatcaaacctttccagtgcccggactgtgaccgcagcttctcccgttctgaccatcttgccctccataggaaacgccacatgctagtctgattgcctctgtgtcctgcctcagcgtgactccccactcacctggctctctctctgtcctgcctcccattatctaacacattttttacatgtacattttaatttgattcagctggtctgaatctctgaatttatatcatccaaaacttccatatggtcagtagtagatgttctctaatcctccctctccttaccacgggtcagacctaaagaatgtgaacactttttt

SEQ ID NO: 1433 - DNA, 709 bp, Homo sapiens
cctttccgtctggcggcagccatcaggtaagccaagatgggtgcatacaagtatatccaggagctatggagaaagaagcagtctgatgtcacgcgctttcttctgagggtccgctgctggcagtaccgccagctctctgctcttcacagggctccccgccccacccggcctgataaagcgcgccaactgggctacaaggccaagcaaggttacgttatacataggatttgtgttagccgtggtggccgaaaacgcccagttcctaagggtgcaacttacggcaagcctgtccatcatggtgttaaccagctaaaattttgctcgaagccttcagtccgttgcggaggagcgagctggacgccactgtggggctctgggagtcctgaattcttactgggttggtgaagattccacatacaaattttttgaggttatcctcattgatccattccataaagctatcagaagaaatcctgacaccccatggatcaccaaaccagtccacaagcacagggagatgcgtgggctgacatctgcaggccgaaagagccgtggccttggaaagggccataagttccaccacactatttgtggttctcgccgggcagcttggagaaggcgcaatactctccagctccaccgttaccgctaatacaagtaaagtttgtaaaattcatacctaataagtctgcagatgtttcttgaatgc

SEQ ID NO: 1434 - DNA, 445 bp, Homo sapiens
cagccatcaggtaagccaagatgggtgcatacaagtatatccaggagctatggagaaagaagcagtctgatgtcacgcgctttcttctgagggtccgctgctggcagtaccgccagctctctgctcttcacagggctccccgccccacccggcctgataaagcgcgccaactgggctacaaggccaagcaaggttacgttatacataggatttgtgttagccgtggtggccgtaaccagctaaaattttgctcgaagccttcagtccgttgcggaggagcgagctggacgccactgtggggctctgggagtcctgaattcttactgggttggtgaagattccacatacaaattttttgaggttatcctcattgatccattccataaagctatcagaagaaatcctgacaccccatggatcaccaaaccagtccacaagcacaggg

SEQ ID NO: 1435 - DNA, 1124 bp, Homo sapiens
gccgctgccaccgcaccccgccatggagcggccgtcgctgcgcgccctgctcctcggcgccgctgggctgctgctcctgctcctgcccctctcctcttcctcctcttcggacacctgcggcccctgcgagccggcctcctgcccgcccctgcccccgctgggctgcctgctgggcgagacccgcgacgcgtgcggctgctgccctatgtgcgcccgcggcgagggcgagccgtgcgggggtggcggcgccggcagggggtactgcgcgccgggcatggagtgcgtgaagagccgcaagaggcggaagggtaaagccggggcagcagccggcggtccgggtgtaagcggcgtgtgcgtgtgcaagagccgctacccggtgtgcggcagcgacggcaccacctacccgagcggctgccagctgcgcgccgccagccagagggccgagagccgcggggagaaggccatcacccaggtcagcaagggcacctgcgagcaaggtccttccatagtgacgccccccaaggacatctggaatgtcactggtgcccaggtgtacttgagctgtgaggtcatcggaatcccgacacctgtcctcatctggaacaaggtaaaaaggggtcactatggagttcaaaggacagaactcctgcctggtgaccgggacaacctggccattcagacccggggtggcccagaaaagcatgaagtaactggctgggtgctggtatctcctctaagtaaggaagatgctggagaatatgagtgccatgcatccaattcccaaggacaggcttcagcatcagcaaaaattacagtggttgatgccttacatgaaataccagtgaaaaaaggtgaaggtgccgagctataaacctccagaatattattagtctgcatggttaaaagtagtcatggataactacattacctgttcttgcctaataagtttcttttaatccaatccactaacactttagttatattcactggttttacacagagaaatacaaaataaagatcacacatcaagactatctacaaaaatttattatatatttacagaagaaaagcatgcatatcattaaacaaataaaatactttttatcacaaaaaaaaaaaaaaaa

SEQ ID NO: 1436 - protein, 282 aa, Homo sapiens
MERPSLRALLLGAAGLLLLLLPLSSSSSSDTCGPCEPASCPPLPPLGCLLGETRDACGCCPMCARGEGEPCGGGGAGRGYCAPGMECVKSRKRRKGKAGAAAGGPGVSGVCVCKSRYPVCGSDGTTYPSGCQLRAASQRAESRGEKAITQVSKGTCEQGPSIVTPPKDIWNVTGAQVYLSCEVIGIPTPVLIWNKVKRGHYGVQRTELLPGDRDNLAIQTRGGPEKHEVTGWVLVSPLSKEDAGEYECHASNSQGQASASAKITVVDALHEIPVKKGEGAEL

SEQ ID NO: 1437 - DNA, 2316 bp, Homo sapiens
ggcacgaggctcgggtcaaatgcgcgcctcggaccctagtgcgcgtgcgcgctggtggctccgcccctttggagctacttcctcatgctgcccgctcgcctaccgttcaggctgctgagccttttccttcgtggatccgctcccacggcagcgcgccatggcctccgggagccgctcctggagaggaggtgcgctgccgcctcctccttccagcactcatcgagtctgggacgcgagcttccttatgaccccgtggacacggagggctttggagaaggtggtgacatgcaggagcgttttctgttcccggagtacatcctggatccggagccgcaacccacccgcgaaaagcagctgcaggagctccagcaacagcaggaggaggaggagcgacagaggcagcagcggcgggaggagcggcgacagcaaaacctacgggccaggtcccgggagcacccggtcgtggggcacccggacccggcattgccgcccagcggcgtgaactgctcgggctgcggggcagagctgcactgccaggacgccggagtgcccggctacctgccccgagagaagttcctccgcacggcggaggcagacggcgggctggcacggaccgtgtgccagcgctgctggctgctgtcgcaccaccggcgcgctctacgcctgcaggtgagccgcgagcagtacctggagctggtgagcgccgcgttgcggcggcccggcccctccctggtgctctacatggtggacctgctggacctgcccgacgccctgctgcccgacttgcccgcgctggtgggccccaagcagctgatcgtgctgggaaacaaagtggacctcctgccccaggatgctcctggctaccggcagaggctgcgggagcgactgtgggaggactgtgcccgcgccgggctcctgctggcccctggccaccaagggccacagcgccccgtcaaggacgagccacaggacggggagaatccgaatccgccgaactggtcccgcacagtggtcagggacgtgcggctgatcagcgccaagaccggctatggagtggaagagttgatctctgcccttcagcgctcctggcgctaccgtggggacgtctacttagtgggcgccaccaacgccggcaaatccactctctttaacacgctcctggagtccgattactgcactgccaagggctccgaggccatcgacagagccaccatctccccttggccaggtactacattaaaccttctgaagtttcctatttgcaacccaactccttacagaatgtttaaaaggcatcaaagacttaaaaaagattcaactcaagctgaagaagatcttagtgagcaagaacaaaatcagcttaatgtcctcaaaaagcatggttatgtcgtaggaagagttggaaggacattcttgtattcagaagaacagaaggataacattccctttgagtttgatgctgattcacttgcctttgacatggaaaatgaccctgttatgggtacacacaaatccaccaaacaagtagaattgactgcacaagatgtgaaagatgcccactggttttatgacacccctggaattacaaaagaaaattgtattttaaatcttctaacagaaaaagaagtaaatattgttttgccaacacagtccattgttccaagaacttttgtgcttaaaccaggaatggttctgtttttgggtgctataggccgcatagatttcctgcagggaaatcagtcagcttggtttacagtcgtggcttccaacatcctccctgtgcatatcacctccttggacagggcagacgctctgtatcagaagcatgcaggtcatacgttactccagattccaatgggtggaaaagaacgaatggcaggatttcctcctcttgttgctgaagacattatgttaaaagaaggactgggggcatctgaagcagtggccgacatcaagttttcctctgcaggttgggtttcagtaacacctaattttaaggacagactgcatctccgaggctatacacctgaaggaacagttttgaccgtccggccccctctcttgccatatattgttaacatcaaaggacagcgcatcaagaaaagtgtggcctataaaaccaagaagcctccttcccttatgtacaacgtgaggaagaagaaaggaaagataaatgtatgagaccgaccttgttcactccagatattaactgtattgaacacaacaaaatacattgaatttgtattaaacatataacgcataaataaagctcccattcttaaaaaaaaaaaaaaaaaaaaaaaaaaaaaaaaaaaa

SEQ ID NO: 1438 - protein, 698 aa, Homo sapiens
MLPARLPFRLLSLFLRGSAPTAARHGLREPLLERRCAAASSFQHSSSLGRELPYDPVDTEGFGEGGDMQERFLFPEYILDPEPQPTREKQLQELQQQQEEEERQRQQRREERRQQNLRARSREHPVVGHPDPALPPSGVNCSGCGAELHCQDAGVPGYLPREKFLRTAEADGGLARTVCQRCWLLSHHRRALRLQVSREQYLELVSAALRRPGPSLVLYMVDLLDLPDALLPDLPALVGPKQLIVLGNKVDLLPQDAPGYRQRLRERLWEDCARAGLLLAPGHQGPQRPVKDEPQDGENPNPPNWSRTVVRDVRLISAKTGYGVEELISALQRSWRYRGDVYLVGATNAGKSTLFNTLLESDYCTAKGSEAIDRATISPWPGTTLNLLKFPICNPTPYRMFKRHQRLKKDSTQAEEDLSEQEQNQLNVLKKHGYVVGRVGRTFLYSEEQKDNIPFEFDADSLAFDMENDPVMGTHKSTKQVELTAQDVKDAHWFYDTPGITKENCILNLLTEKEVNIVLPTQSIVPRTFVLKPGMVLFLGAIGRIDFLQGNQSAWFTVVASNILPVHITSLDRADALYQKHAGHTLLQIPMGGKERMAGFPPLVAEDIMLKEGLGASEAVADIKFSSAGWVSVTPNFKDRLHLRGYTPEGTVLTVRPPLLPYIVNIKGQRIKKSVAYKTKKPPSLMYNVRKKKGKINV

SEQ ID NO: 1439 - DNA, 3306 bp, Homo sapiens
gaaagctgtatttgctgcacgtggaaatctccgttattttccagcacccaacagtagcgtaatgggagtaacggacttaacctcatttctctttcagagcatttagccttcatatgcccttccctgcatgcttcccccaggccgtcaagacttgagttctgcctcgcttcccggcgcggtcgcagccctcagcccacttaggataatggcgacagctgaggtactgaacattggtaaaaaattatatgagggtaaaacaaaagaagtctacgaattgttagacagtccaggaaaagtcctcctgcagtccaaggaccagattacagcaggaaatgcagctagaaaaaaccacctggaaggaaaagctgcaatctcaaataaaatcaccagttgtatttttcagttattacaggaagcaggtattaaaactgccttcaccagaaaatgtggggagacagctttcattgcaccgcagtgtgaaatgattccaattgaatgggtttgcagaagaatagcaactggttcttttctcaaaagaaatcctggtgtcaaggaaggatataagttttacccacctaaagtggagttgtttttcaaggatgatgccaataatgacccacagtggtctgaggaacagctgattgctgcaaaattttgctttgctggacttcttataggccagactgaagtggatatcatgagtcatgctacacaggctatatttgaaatactggagaaatcctggttgccccagaattgtacactggttgatatgaagattgaatttggtgttgatgtaaccaccaaagaaattgttcttgctgatgttattgacaatgattcctggagactctggccatcaggagatcgaagccaacagaaagacaaacagtcttatcgggacctcaaagaagtaactcctgaagggctccaaatggtaaagaaaaactttgagtgggttgcagagagagtagagttgcttttgaaatcagaaagtcagtgcagggttgtagtgttgatgggctctacttctgatcttggtcactgtgaaaaaatcaagaaggcctgtggaaattttggcattccatgtgaacttcgagtaacatctgcgcataaaggaccagatgaaactctgaggattaaagctgagtatgaaggggatggcattcctactgtatttgtggcagtggcaggcagaagtaatggtttgggaccagtgatgtctgggaacactgcatatccagttatcagctgtcctcccctcacaccagactggggagttcaggatgtgtggtcttctcttcgactacccagtggtcttggctgttcaaccgtactttctccagaaggatcagctcaatttgctgctcagatatttgggttaagcaaccatttggtatggagcaaactgcgagcaagcattttgaacacatggatttccttgaagcaggctgacaagaaaatcagagaatgtaatttataagaaagaatgccattgaattttttaggggaaaaactacaaatttctaatttagctgaaggaaaatcaagcaagatgaaaaggtaattttaaattagagaacacaaataaaatgtattagtgaataaatgcttctctagatccatattaataaacatgagcatctaacccctcctttcttaggctagacaccaagatatttcagccagcctttatcattcctcttactttatcctttttccttaagtattggtggtcactactattgagtttcttccttaacactgattaaatgatcttaactccctcagctaaaactggcattactgactcccagctatatttctccagacttgcatttttttttttttttttgagacagggtctcactgtcgcccaggctggagtgcagtggcgtgatctcagttcactgctgctttccctcctgggctcaagcagttctcccacctcagcctctcgactaacagggactataatcttgcagcaccatgccgagctaattttattttttgtagagatgagctctcactatgtcacccaggttcgtctcaaactcctgaaccctagtaattctcctatctcagcctcccaaagtgctagggttacagacatgagccactgtgcctgtctagacttgtactttcaactgtccatttctccctgtctgtcccatgggcactcatgaaaaaacagaatgctcccaactttattcatcttccaagcctgtagctcttggtatactcactgttgcaagtcagaagcttgatttcatcattgatgtttttctcacgtttcacatctcactcatcaccaagtcatgttggtgttaatttctgattaacccttgaatttaccgtcttctcatcctctgtacaaaagcctcaagtgagggtcaaattcaacattatcctgatctagacagcccccattctcaatccacccttttccaagttgattgcccaaggacttctaacaataaactctcttttgcaccacagacttctttgaaaatatacatgctgttgaccctctctgtagaaaaccgcacacataaaacttaccaacagatttcattggttcttgggttctcccgaagcctatccatggtttatagattaagaattgatgaggtagctgggcacagtggctcacacctacgatcacagcacttcgggaggctgaagcaagcagatcacttgaggtcaggagtttgagaccagcctggccaacatggtgaaaccctgtctctactaaaaatacaaaaagtagccagccgtgatgacaggcacctgtaatcccagctactcgggaggctgaggcatgagaattgcttgaacccgggaggcggaggttgcagtgagcctagatcatgccactgcactccaacctgggcagcagagcaagactctgtctcaaaaggggaaaaaaaaaattgctgatgtgacccatgaagggaactcattttcctcgtaattttggactgccacacattggtacctttagttctctgaaggcccacgtttttatcattaagacctatttgttagctagtagagctttatgttcgctgtccatgaaaccttctgtaaccacagtgactacaagtagttctttctctattgaattattaggtccagaatagaagatgtcattgtacactttatttccctcacactgtgttatgctctgatgtgctatgcttagctatctgtcagagattagtaaattataaaactcatgtgtactacttaagtttatatcttatgctagtttataagaacaattaaaaggacttagaagattaa

SEQ ID NO: 1440 - DNA, 3662 bp, Homo sapiens
tcgggaaggaagagcctgtcgcgagcgcgagcttctgagctcgacgggccgagctggcagctggttggtgcttacaccttggccgcagcggcaggtccttccacgtgctttcggcggcgacatggagctggaggagttggggatccgagaggaatgtggcgtgttcgggtgcatcgcctcaggagagtggcccacgcagctggatgtaccgcatgtgatcactctgggactcgtggggctgcagcaccggggtcaggagagtgctggtattgtgactagtgatgggagttcggtgccaacattcaaatcacacaagggaatgggtcttgtaaatcacgtctttactgaagacaatttgaaaaaattatatgtttcaaatcttggaattggacacaccaggtatgccaccacaggaaaatgtgaactagaaaattgtcagcccttcgttgttgaaacacttcatgggaagatagctgtggcacataatggcgaattggtaaatgctgctcgattaaggaaaaagcttctgcgtcatggtattggtctgtctacaagttctgatagtgaaatgattacccagttactggcgtatacccctcctcaggaacaagatgacaccccagactgggtagccaggattaaaaacttgatgaaggaagcacccacagcatactccctgcttataatgcacagagatgttatttatgcagtacgagatccttatggaaatcgtcccttatgcattggtcgtcttattccagtgtctgatataaatgacaaagagaaaaaaacatcagaaacagaaggatgggtggtgtcttcagaatcttgtagcttcttatctattggtgcaagatattaccgtgaagtcttgcctggagaaattgtggaaatatccagacacaatgtccaaactcttgatattatatcaaggtctgaaggaaacccagtggctttttgtatctttgaatatgtttattttgcaagaccagacagtatgttcgaagaccaaatggtttatacagtaagataccgttgtggccagcagctagcgattgaagcacctgtggatgcagatttggttagcactgttccagaatctgctacgcctgctgctcttgcttacgcaggaaagtgtggacttccatatgtggaggtgctgtgtaaaaaccggtatgtagggagaaccttcattcagccaaacatgaggttaagacaacttggtgttgcaaaaaaatttggagtattgtcagacaactttaaaggcaaaagaattgttcttgtagatgattcaattgtcagaggcaataccatctcacctataataaaactgctcaaagaatctggtgcaaaagaggtacacattcgagtagcttcaccaccaattaaatatccatgcttcatgggaataaacattcctacaaaagaagagctcattgccaataaaccagaatttgatcaccttgcagaatatctaggagcaaacagtgttgtgtatctgtcagtagaaggactggtttcatctgtacaagaagggataaagtttaaaaaacagaaagagaaaaagcacgatattatgatccaagaaaatggaaatggtctggaatgttttgaaaagagtggtcattgtacagcttgtctcactggaaaatatcctgtagaattagaatggtagctggtagggttggatgtgtgtagtttcaagatagaaagttggtcaagaagttatagtggtcacacctcatctatttactgttactcagttggtacaatgtaaaatgccatgcttatgtttataagttttgagattttttttttttctgaaaaggataccaaagtgcgataactgaacatttccaattgcatataatacaacaatatgtggtgttcttttttttacacaagcattggctagcctttttaacctggtcagagaaggcaggtggtcactgacatttcccaagtccatgctttaaagggtttgcaagaagttagggttaaggagaggtgatgccaacaagacaggtgagttaaatataccatttcacacaaagtttgaatagaatacattatacctcataggtgtctagcctctacagttctggctgtagttatgaccttggcttccctgtctaactgtagacaaatctttaaaaaaaaataataataatctggtgcctcagtttccccacatgtgcaatgggatacttattaaataattaataagaatgtgaataagtgtcatacttttgtgatttgagccatcatttcacttctgattttaagacaactcatgattgttagctttcagaaagctaatgattgttaactttttgaaattagtttacaattaattaagatttcattatgatggaaggagacataattggcagatctttgccatctctctttgagatgtcctaaaaagggttgtaaaaatctgtgaaaaagtttttcctacatttgactagaaaatgtgatccatagtatttagtgccctgatactataagctcagcaagtaacctggtacatttgaaataaaaaccaaatttttagattcaaacaatccctttatccttaatttaattaattatcatatgctttttttaatgaagtgcttgatcacttgcaaacatatatacatgtagatgtacatatacatgtacacatacacataaatattattgcaattaagtgatcaagtacagacacaataggggccagttttgtttaaggatcaaagagacaaccactttggggaattagtatcaacttacaatccaagtccaagtatcatcttataatcacttttttctactatattaagatctaatgaatttgatttcttttttgaagttttttcttgtaacatctgagattagaagtttaagatgacttgaccccaaacctttgtttatgtaagaatttttaaacataaaagtgtttgtttctgttatgttaccataatttgatgtatatagtgtccagatccatttagaaatttaatatttattaataactgaaactgtttgtcttcctttggtatatagtctcgcatattatattatagcaggccaagataaaattttgacagctctttaagcccacatgcagcagtgggtcagataaccctgtggcagtgacacgggcaaattggcatttgaataaagccctgggaccacctcaacatgcgtagcctcttgtcttaaatgtactccccatggcagcatggaggaggcaagacctgtgggtcaattttgaactggccttactttgatttttaaaacaagagactcagggaaagtactaaaccaaaatctctgattttactttgcgttttctgtagtttttgttttactgagatgcttttgtaaaggaaaataatactgtgacagtttagtaattctacagattcttaatatttctccatcatggccttttacttcacaattttctgaagtctgaattcaattacaatttttttttaccaatttaatctcaaatgttgtttaactgctttaaattcatatacgtagagtattataaactgcagagatgaaaaatgtgttttcacgggatttatattgtgaactaaactaagcctactttttgtgacttatttgtgatgccttgttgataaatatgtgtaataagtatgttt

SEQ ID NO: 1441 - DNA, 922 bp, Homo sapiens
ctctttcccatcttgcaagatggcgggtgaaaaagtttagaagccagatactaaagagaagaaacccgaagccaagaagactgatgctggtggcaaggtgaaaaagggtaacctcaaagctaaaaagcccaagaaggggaagccccgttgcagccgcaaccctgtccttgtcagaggaattggcaggtattcccgatctgccatgtattccagaaaggccatgtacaagaggaagtactcagccgctaaatccaaggttgaaaagaaaaagaaggagaaggttcttgcaactgttacaaaaccagttggtggtgacaagaacggcggtacccgggtggttaaacttcgcaaaatgcctagatattatcctactgaagatgtgcctcgaaagctgttgagccacggcaaaaaaaaacccttcagtcagcacgtgagaaaactgcgagccagcattacccccgggaccattctgatcatcctcactggacgccacaggggcaagagggtggttttcctgaagcagctggctagtggcttattacttgtgactggacctctggtcctcaatcgagttcctctatgaagaacacaccagaaatttgtcattgccacctcaaccaaaatcgatatcagcaatgtaaaaatcccaaaacatcttactgatgcttacttcaagaagaagcagctgcggaagcccagacaccaggaaggtgagatcttcgacacagaaaaagggaaatatgagattacggagcagcgcaagattgatcagaaagctgtggactcacaaattttatcaaaaatcaaagctattcctcagctccagggctagttgcgatctgtgtttgccctgacgaatggaatttatcctcacaaattggtgttctaaatgtcttaagaacctaattaaatagctgactac

SEQ ID NO: 1442 - DNA, 1401 bp, Homo sapiens
gtttttagtttgttagctgcctggagtgttattttaagaaagcagaagcaccatcatttgcacactccttatagatcacacaccttaaccctgactttttttgctccagtttttcagaagaagtgaagtcaagatgaagaaccatttgcttttctggggagtcctggcggtttttattaaggctgttcatgtgaaagcccaagaagatgaaaggattgttcttgttgacaacaaatgtaagtgtgcccggattacttccaggatcatccgttcttccgaagatcctaatgaggacattgtggagagaaacatccgaattattgttcctctgaacaacagggagaatatctctgatcccacctcaccattgagaaccagatttgtgtaccatttgtctgacctctgtaaaaaatgtgatcctacagaagtggagctggataatcagatagttactgctacccagagcaatatctgtgatgaagacagtgctacagagacctgctacacttatgacagaaacaagtgctacacagctgtggtcccactcgtatatggtggtgagaccaaaatggtggaaacagccttaaccccagatgcctgctatcctgactaatttaagtcattgctgactgcatagctctttttcttgagaggctctccattttgattcagaaagttagcatatttattaccaatgaatttgaaaccagggcttttttttttttttgggtgatgtaaaaccaactccctgccaccaaaataattaaaatagtcacattgttatctttattaggtaatcacttcttaattatatgttcatactctaagtatcaaaatcttccaattatcatgctcacctgaaagaggtatgctctcttaggaatacagtttctagcattaaacaaataaacaaggggagaaaataaaactcaaggactgaaaatcaggaggtgtaataaaatgttcctcgcattcccccccgcttttttttttttttttgactttgccttggagagccagagcttccgcattttctttactattctttttaaaaaaagtttcactgtgtagagaacatatatgcataaacataggtcaattatatgtctccattagaaaaataataattggaaaacatgttctagaactagttacaaaaataatttaaggtgaaatctctaatatttataaaagtagcaaaataaatgcataattaaaatatatttggacataacagacttggaagcagatgatacagacttctttttttcataatcaggttagtgtaagaaattgccatttgaaacaatccattttgtaactgaaccttatgaaatatatgtatttcatggtacgtattctctagcacagtctgagcaattaaatagattcataagcata

SEQ ID NO: 1443 - DNA, 1652 bp, Homo sapiens
ggtgctgcaagactctctggtagaaaaatgaagagggtcctggtactactgcttgctgtggcatttggacatgctttagagagaggccgggattatgaaaagaataaagtctgcaaggaattctcccatctgggaaaggaggacttcacatctctgtcactagtcctgtacagtagaaaatttcccagtggcacgtttgaacaggtcagccaacttgtgaaggaagttgtctccttgaccgaagcctgctgtgcggaaggggctgaccctgactgctatgacaccaggacctcagcactgtctgccaagtcctgtgaaagtaattctccattccccgttcacccaggcactgctgagtgctgcaccaaagagggcctggaacgaaagctctgcatggctgctctgaaacaccagccacaggaattccctacctacgtggaacccacaaatgatgaaatctgtgaggcgttcaggaaagatccaaaggaatatgctaatcaatttatgtgggaatattccactaattacggacaagctcctctgtcacttttagtcagttacaccaagagttatctttctatggtagggtcctgctgtacctctgcaagcccaactgtatgctttttgaaagagagactccagcttaaacatttatcacttctcaccactctgtcaaatagagtctgctcacaatatgctgcttatggggagaagaaatcaaggctcagcaatctcataaagttagcccaaaaagtgcctactgctgatctggaggatgttttgccactagctgaagatattactaacatcctctccaaatgctgtgagtctgcctctgaagattgcatggccaaagagctgcctgaacacacagtaaaactctgtgacaatttatccacaaagaattctaagtttgaagactgttgtcaagaaaaaacagccatggacgtttttgtgtgcacttacttcatgccagctgcccaactccccgagcttccagatgtagagttgcccacaaacaaagatgtgtgtgatccaggaaacaccaaagtcatggataagtatacatttgaactaagcagaaggactcatcttccggaagtattcctcagtaaggtacttgagccaaccctaaaaagccttggtgaatgctgtgatgttgaagactcaactacctgttttaatgctaagggccctctactaaagaaggaactatcttctttcattgacaagggacaagaactatgtgcagattattcagaaaatacatttactgagtacaagaaaaaactggcagagcgactaaaagcaaaattgcctgatgccacacccacggaactggcaaagctggttaacaagcactcagactttgcctccaactgctgttccataaactcacctcctctttactgtgattcagagattgatgctgaattgaagaatatcctgtagtcctgaagcatgtttattaactttgaccagagttggagccacccaggggaatgatctctgatgacctaacctaagcaaaaccactgagcttctgggaagacaactaggatactttctactttttctagctacaatatcttcatacaatgacaagtatgatgatttgctatcaaaataaattgaaatataatgcaaaccat

SEQ ID NO: 1444 - protein, 474 aa, Homo sapiens
MKRVLVLLLAVAFGHALERGRDYEKNKVCKEFSHLGKEDFTSLSLVLYSRKFPSGTFEQVSQLVKEVVSLTEACCAEGADPDCYDTRTSALSAKSCESNSPFPVHPGTAECCTKEGLERKLCMAALKHQPQEFPTYVEPTNDEICEAFRKDPKEYANQFMWEYSTNYGQAPLSLLVSYTKSYLSMVGSCCTSASPTVCFLKERLQLKHLSLLTTLSNRVCSQYAAYGEKKSRLSNLIKLAQKVPTADLEDVLPLAEDITNILSKCCESASEDCMAKELPEHTVKLCDNLSTKNSKFEDCCQEKTAMDVFVCTYFMPAAQLPELPDVELPTNKDVCDPGNTKVMDKYTFELSRRTHLPEVFLSKVLEPTLKSLGECCDVEDSTTCFNAKGPLLKKELSSFIDKGQELCADYSENTFTEYKKKLAERLKAKLPDATPTELAKLVNKHSDFASNCCSINSPPLYCDSEIDAELKNIL

SEQ ID NO: 1445 - DNA, 2216 bp, Homo sapiens
agcttttctcttctgtcaaccccacacgcctttggcacaatgaagtgggtaacctttatttcccttctttttctctttagctcggcttattccaggggtgtgtttcgtcgagatgcacacaagagtgaggttgctcatcggtttaaagatttgggagaagaaaatttcaaagccttggtgttgattgcctttgctcagtatcttcagcagtgtccatttgaagatcatgtaaaattagtgaatgaagtaactgaatttgcaaaaacatgtgttgctgatgagtcagctgaaaattgtgacaaatcacttcataccctttttggagacaaattatgcacagttgcaactcttcgtgaaacctatggtgaaatggctgactgctgtgcaaaacaagaacctgagagaaatgaatgcttcttgcaacacaaagatgacaacccaaacctcccccgattggtgagaccagaggttgatgtgatgtgcactgcttttcatgacaatgaagagacatttttgaaaaaatacttatatgaaattgccagaagacatccttacttttatgccccggaactccttttctttgctaaaaggtataaagctgcttttacagaatgttgccaagctgctgataaagctgcctgcctgttgccaaagctcgatgaacttcgggatgaagggaaggcttcgtctgccaaacagagactcaagtgtgccagtctccaaaaatttggagaaagagctttcaaagcatgggcagtagctcgcctgagccagagatttcccaaagctgagtttgcagaagtttccaagttagtgacagatcttaccaaagtccacacggaatgctgccatggagatctgcttgaatgtgctgatgacagggcggaccttgccaagtatatctgtgaaaatcaagattcgatctccagtaaactgaaggaatgctgtgaaaaacctctgttggaaaaatcccactgcattgccgaagtggaaaatgatgagatgcctgctgacttgccttcattagctgctgattttgttgaaagtaaggatgtttgcaaaaactatgctgaggcaaaggatgtcttcctgggcatgtttttgtatgaatatgcaagaaggcatcctgattactctgtcgtgctgctgctgagacttgccaagacatatgaaaccactctagagaagtgctgtgccgctgcagatcctcatgaatgctatgccaaagtgttcgatgaatttaaacctcttgtggaagagcctcagaatttaatcaaacaaaattgtgagctttttgagcagcttggagagtacaaattccagaatgcgctattagttcgttacaccaagaaagtaccccaagtgtcaactccaactcttgtagaggtctcaagaaacctaggaaaagtgggcagcaaatgttgtaaacatcctgaagcaaaaagaatgccctgtgcagaagactatctatccgtggtcctgaaccagttatgtgtgttgcatgagaaaacgccagtaagtgacagagtcaccaaatgctgcacagaatccttggtgaacaggcgaccatgcttttcagctctggaagtcgatgaaacatacgttcccaaagagtttaatgctgaaacattcaccttccatgcagatatatgcacactttctgagaaggagagacaaatcaagaaacaaactgcacttgttgagctcgtgaaacacaagcccaaggcaacaaaagagcaactgaaagctgttatggatgatttcgcagcttttgtagagaagtgctgcaaggctgacgataaggagacctgctttgccgaggagggtaaaaaacttgttgctgcaagtcaagctgccttaggcttataacatcacatttaaaagcatctcagcctaccatgagaataagagaaagaaaatgaagatcaaaagcttattcatctgtttttctttttcgttggtgtaaagccaacaccctgtctaaaaaacataaatttctttaatcattttgcctcttttctctgtgcttcaattaataaaaaatggaaagaatctaatagagtggtacagcactgttatttttcaaagatgtgttgctatcctgaaaattctgtaggttctgtggaagttccagtgttctctcttattccacttcggtagaggatttctagtttcttgtgggctaattaaataaatcattaatactcttctaagtt

SEQ ID NO: 1446 - DNA, 2032 bp, Homo sapiens
tccatattgtgcttccaccactgccaataacaaaataactagcaaccatgaagtgggtggaatcaatttttttaattttcctactaaattttactgaatccagaacactgcatagaaatgaatatggaatagcttccatattggattcttaccaatgtactgcagagataagtttagctgacctggctaccatattttttgcccagtttgttcaagaagccacttacaaggaagtaagcaaaatggtgaaagatgcattgactgcaattgagaaacccactggagatgaacagtcttcagggtgtttagaaaaccagctacctgcctttctggaagaactttgccatgagaaagaaattttggagaagtacggacattcagactgctgcagccaaagtgaagagggaagacataactgttttcttgcacacaaaaagcccactccagcatcgatcccacttttccaagttccagaacctgtcacaagctgtgaagcatatgaagaagacagggagacattcatgaacaaattcatttatgagatagcaagaaggcatcccttcctgtatgcacctacaattcttctttgggctgctcgctatgacaaaataattccatcttgctgcaaagctgaaaatgcagttgaatgcttccaaacaaaggcagcaacagttacaaaagaattaagagaaagcagcttgttaaatcaacatgcatgtgcagtaatgaaaaattttgggacccgaactttccaagccataactgttactaaactgagtcagaagtttaccaaagttaattttactgaaatccagaaactagtcctggatgtggcccatgtacatgagcactgttgcagaggagatgtgctggattgtctgcaggatggggaaaaaatcatgtcctacatatgttctcaacaagacactctgtcaaacaaaataacagaatgctgcaaactgaccacgctggaacgtggtcaatgtataattcatgcagaaaatgatgaaaaacctgaaggtctatctccaaatctaaacaggtttttaggagatagagattttaaccaattttcttcaggggaaaaaaatatcttcttggcaagttttgttcatgaatattcaagaagacatcctcagcttgctgtctcagtaattctaagagttgctaaaggataccaggagttattggagaagtgtttccagactgaaaaccctcttgaatgccaagataaaggagaagaagaattacagaaatacatccaggagagccaagcattggcaaagcgaagctgcggcctcttccagaaactaggagaatattacttacaaaatgcgtttctcgttgcttacacaaagaaagccccccagctgacctcgtcggagctgatggccatcaccagaaaaatggcagccacagcagccacttgttgccaactcagtgaggacaaactattggcctgtggcgagggagcggctgacattattatcggacacttatgtatcagacatgaaatgactccagtaaaccctggtgttggccagtgctgcacttcttcatatgccaacaggaggccatgcttcagcagcttggtggtggatgaaacatatgtccctcctgcattctctgatgacaagttcattttccataaggatctgtgccaagctcagggtgtagcgctgcaaacgatgaagcaagagtttctcattaaccttgtgaagcaaaagccacaaataacagaggaacaacttgaggctgtcattgcagatttctcaggcctgttggagaaatgctgccaaggccaggaacaggaagtctgctttgctgaagagggacaaaaactgatttcaaaaactcgtgctgctttgggagtttaaattacttcaggggaagagaagacaaaacgagtctttcattcggtgtgaacttttctctttaattttaactgatttaacactttttgtgaattaatgaaatgataaagacttttatgtgagatttccttatcacagaaataaaatatctccaaatg

SEQ ID NO: 1447 - protein, 609 aa, Homo sapiens
MKWVESIFLIFLLNFTESRTLHRNEYGIASILDSYQCTAEISLADLATIFFAQFVQEATYKEVSKMVKDALTAIEKPTGDEQSSGCLENQLPAFLEELCHEKEILEKYGHSDCCSQSEEGRHNCFLAHKKPTPASIPLFQVPEPVTSCEAYEEDRETFMNKFIYEIARRHPFLYAPTILLWAARYDKIIPSCCKAENAVECFQTKAATVTKELRESSLLNQHACAVMKNFGTRTFQAITVTKLSQKFTKVNFTEIQKLVLDVAHVHEHCCRGDVLDCLQDGEKIMSYICSQQDTLSNKITECCKLTTLERGQCIIHAENDEKPEGLSPNLNRFLGDRDFNQFSSGEKNIFLASFVHEYSRRHPQLAVSVILRVAKGYQELLEKCFQTENPLECQDKGEEELQKYIQESQALAKRSCGLFQKLGEYYLQNAFLVAYTKKAPQLTSSELMAITRKMAATAATCCQLSEDKLLACGEGAADIIIGHLCIRHEMTPVNPGVGQCCTSSYANRRPCFSSLVVDETYVPPAFSDDKFIFHKDLCQAQGVALQTMKQEFLINLVKQKPQITEEQLEAVIADFSGLLEKCCQGQEQEVCFAEEGQKLISKTRAALGV

SEQ ID NO: 1448 - DNA, 4628 bp, Homo sapiens
tcacttgcctgatatttccagtgtcagagggacacagccaacgtggggtcccttctaggctgacagccgctctccagccactgccgcgagcccgtctgctcccgccctgcccgtgcactctccgcagccgccctccgccaagccccagcgcccgctcccatcgccgatgaccgcggggaggaggatggagatgctctgtgccggcagggtccctgcgctgctgctctgcctgggtttccatcttctacaggcagtcctcagtacaactgtgattccatcatgtatcccaggagagtccagtgataactgcacagctttagttcagacagaagacaatccacgtgtggctcaagtgtcaataacaaagtgtagctctgacatgaatggctattgtttgcatggacagtgcatctatctggtggacatgagtcaaaactactgcaggtgtgaagtgggttatactggtgtccgatgtgaacacttctttttaaccgtccaccaacctttaagcaaagaatatgtggctttgaccgtgattcttattattttgtttcttatcacagtcgtcggttccacatattatttctgcagatggtacagaaatcgaaaaagtaaagaaccaaagaaggaatatgagagagttacctcaggggatccagagttgccgcaagtctgaatggcgccatcaaacttatgggcagggataacagtgtgcctggttaatattaatattcccattttattaataatatttatgttgggtcaagtgttaggtcaataacactgtattttaatgtacttgaaaaatgtttttatttttgttttatttttgacagactatttgctaatgtataatgtgcagaaaatatttaatatcaaaagaaaattgatatttttatacaagtaatttcctgagctaaatgcttcattgaaagcttcaaagtttatatgcctggtgcacagtgcttagaagtaagcaattcccaggtcatagctcaagaattgttagcaaatgacagatttctgtaagcctatatatatagtcaaatcgatttagtaagtatgttttttatgttcctcaaatcagtgataattggtttgactgtaccatggtttgatatgtagttggcaccatggtatcatatattaaaacaataatgcaattagaatttgggagaagcaaatataggtcctgtgttaaacactacacatttgaaacaagctaaccctggggagtctatggtctcttcactcaggtctcagctataattctgttatatgaggggcagtggacagttccctatgccaactcacgactcctacaggtactagtcactcatctaccagattctgcctatgtaaaatgaattgaaaaacaattttctgtaatcttttatttaagtagtgggcatttcatagcttcacaatgttccttttttgtatattacaacatttatgtgaggtaattattgctcaacagacaattagaaaaaagtccacacttgaagcctaaatttgtgctttttaagaatatttttagactatttctttttataggggctttgctgaattctaacattaaatcacagcccaaaatttgatggactaattattattttaaaatatatgaagacaataattctacatgttgtcttaagatggaaatacagttatttcatcttttattcaaggaagttttaactttaatacagctcagtaaatggcttcttctagaatgtaaagttatgtatttaaagttgtatcttgacacaggaaatgggaaaaaacttaaaaattaatatggtgtatttttccaaatgaaaaatctcaattgaaagcttttaaaatgtagaaacttaaacacaccttcctgtggaggctgagatgaaaactagggctcattttcctgacatttgtttattttttggaagagacaaagatttcttctgcactctgagcccataggtctcagagagttaataggagtatttttgggctattgcataaggagccactgctgccaccacttttggattttatgggaggctccttcatcgaatgctaaacctttgagtagagtctccctggatcacataccaggtcagggaggatctgttcttcctctacgtttatcctggcatgtgctagggtaaacgaaggcataataagccatggctgacctctggagcaccaggtgccaggacttgtctccatgtgtatccatgcattatataccctggtgcaatcacacgactgtcatctaaagtcctggccctggcccttactattaggaaaataaacagacaaaaacaagtaaatatatatggtcatatacatattgtatatatattcatatacaaacatgtatgtatacatgaccttaatggatcatagaattgcagtcatttggtgctctgctaaccatttatataaaacttaaaaacaagagaaaagaaaaatcaattagatctaaacagttatttctgtttcctatttaatacagctgaagtcaaaatatgtaagaacacattttaaatactctacttacagttggccctctgtggttagttccacatctgtggattcaaccaaccaaggacggaaaatgcttaaaaaataatacaacaacaacaaaaaatacattataacaactatttacttttttttttttctttttgagatggagtctcgctctgttgcccaggttggagtgcagtggcacgatctcggctcactgcaacctcacctcccgggttcaagagatcctcctgcctcagcctcctgagcagctgggactacaggcgcatgccaccatgcccagctaatttttgtatttttagtagaggcggggtttcaccatgttggccaggatggtctcaatctcctaaccttgagatccaccctccacagcctcccaaactgctgggattacaggtgtgagccaccgcacgtagcatttacattaggtattacaagtaatgtaaagatgatttaagtatacaggaggatgtgaataggttatatgcaagcactatgcccttttatataagtgacttgaacatctgtgcccgattttagtatgtgcaggggggcgatctgggaatcagtcccctgtggataccaaggtacaactgtatttattaacgcttactagatgtgaggagagtctgaatattttcagtgatcttggctgtttcaaaaaaatctattgacttttcaataaatcagctgcaatccatttatttcatttacaaaagatttattgtaagcatctcaatcttggtttgtcagtttatcttaagcatgtcaattcataaaaacaagtcatttttgtatttttcatctttaagaatgcttaaaaaagctaatccctaaaatagttagatctttgtaaatgcatattaaataataaagtatgacccacattactttttatgggtgaaaataagacaaaaataatagttttagtgaggatggtgctgagtaaacataaaaactgatttgctctcagctgatgtgtcctgtacacagtgggaagattttagttcacacttagtctaactcccccattttacagatttctcactatatatatttctagaaggggctatgcatattcaatgtattgagaaccaaagcaaccacaaatgcataaatgcataatttatggtcttcaaccaaggccacataataacccagttaacttactctttaaccaggaatattaagttctataactagtactcaaggtttaaccttaaaattaagatttccttaaccttaaccttaaaattgatattatattaaacatacataatacaatgtaactccactgttctcctgaatattttttgctctaatctctctgccgaaagtcaaagtgatgggagaattggtatactggtatgactacgtcttaagtcagatttttatttatgagtctttgagactaaattcaatcaccaccaggtatcaaatcaacttttatgcagcaaatatatgattctagtgtctgacttttgttaaattcagtaatgcagtttttaaaaacctgtatctgacccactttgtaatttttgctccaatatccattctgtagacttttgaaaaaaaagtttttaatttgatgcccaatatattctgaccgttaaaaaattcttgttcatatgggagaagggggagtaatgacttgtacaaacagtatttctggtgtatattttaatgtttttaaaaagagtaatttcatttaaatatctgttattcaaatttgatgatgttaaatgtaatataatgtattttctttttattttgcactctgtaattgcactttttaagtttgaagagccattttggtaaacggtttttattaaagatgctatggaacataaagttgtattgcatgcaatttgaagtaacttatttgactatgaatgttatcggattactgaattgtatcaatttgtttgtgttcaatatcagctttgataattgtgtaccttaagatattgaaggagaaaatagataatttacaagatattattaatttttatttatttttcttgggaattgaaaaaaattgaaataaataaaaatgcattgaacatcttgcattcaaaatcttcactgac

SEQ ID NO: 1449 - DNA, 1890 bp, Homo sapiens
cccgcgagcggacgcggcagcgcctctgtctcgctttttcttatttttcccccctttcccctttctttttttttttttcttttcttttctcccctccccccctttcaccatttcccctcggaggcgctttccccgggcaggggcagagccggtctcaccccccgcctctccccggcccccgccgccctatggcgagagggagccccctcccaacccgggctcgagcggcggcggcctcaggccgggggtcatcatggaactaattcgctgaccgacccagcggccgcagccgtgcgtcccgctcgagcgccagcgcccgcgcccgcgccccccgatccgcttcccctttctccctcctcagttggccgagtcgtcccgcgcgcaccgcctccgcgcgcctatgagaatgaggtggtaacgggcccccggatgaccccgcgtcaccactgtgaggcctacagctctgccggggaggaggaggaggaggaagaggaggagaaggtagctacagcaagctgggtagcaggcagatccaaaggatatcatgaagtttccagggcctttggaaaaccagagattgtctttcctgttggaaaaggcaatcactagggaagcacagatgtggaaagtgaatgtgcggaaaatgccttcaaatcagaatgtttctccatcccagagagatgaagtaattcaatggctggccaaactcaagtaccaattcaacctttacccagaaacatttgctctggctagcagtcttttggataggtttttagctaccgtaaaggctcatccaaaatacttgagttgtattgcaatcagctgttttttcctagctgccaagactgttgaggaagatgagagaattccagtactaaaggtattggcaagagacagtttctgtggatgttcctcatctgaaattttgagaatggagagaattattctggataagttgaattgggatcttcacacagccacaccattggattttcttcatattttccatgccattgcagtgtcaactaggcctcagttacttttcagtttgcccaaattgagcccatctcaacatttggcagtccttaccaagcaactacttcactgtatggcctgcaaccaacttctgcaattcagaggatccatgcttgctctggccatggttagtctggaaatggagaaactcattcctgattggctttctcttacaattgaactgcttcagaaagcacagatggatagctcccagttgatccattgtcgggagcttgtggcacatcacctttctactctgcagtcttccctgcctctgaattccgtttatgtctaccgtcccctcaagcacaccctggtgacctgtgacaaaggagtgttcagattacatccctcctctgtcccaggcccagacttctccaaggacaacagcaagccagaagtgccagtcagaggtacagcagccttttaccatcatctcccagctgccagtgggtgcaagcagacctctactaaacgcaaagtagaggaaatggaagtggatgacttctatgatggaatcaaacggctctataatgaagataatgtctcagaaaatgtgggttctgtgtgtggcactgatttatcaagacaagagggacatgcttccccttgtccacctttgcagcctgtttctgtcatgtagtttcaacaagtgctacctttgagtgtaaactaaggtagactactttgggaatgagaacatgcaaaatcaggaaaggctgtagaaggaaatataccttaacaggctgatttggagtgagccagaaaaaaaaaataaaactctcattatttgtgtggctaattataattcagcgttatttaagcacataaagaccaaaaaaaaaaaaaaaaaaa

SEQ ID NO: 1450 - protein, 377 aa, Homo sapiens
MKFPGPLENQRLSFLLEKAITREAQMWKVNVRKMPSNQNVSPSQRDEVIQWLAKLKYQFNLYPETFALASSLLDRFLATVKAHPKYLSCIAISCFFLAAKTVEEDERIPVLKVLARDSFCGCSSSEILRMERIILDKLNWDLHTATPLDFLHIFHAIAVSTRPQLLFSLPKLSPSQHLAVLTKQLLHCMACNQLLQFRGSMLALAMVSLEMEKLIPDWLSLTIELLQKAQMDSSQLIHCRELVAHHLSTLQSSLPLNSVYVYRPLKHTLVTCDKGVFRLHPSSVPGPDFSKDNSKPEVPVRGTAAFYHHLPAASGCKQTSTKRKVEEMEVDDFYDGIKRLYNEDNVSENVGSVCGTDLSRQEGHASPCPPLQPVSVM

SEQ ID NO: 1451 - DNA, 1165 bp, Homo sapiens
cctggactcagagctcaagtctgaactctacctccagacagaatgaagttcatctcgacatctctgcttctcatgctgctggtcagcagcctctctccagtccaaggtgttctggaggtctattacacaagcttgaggtgtagatgtgtccaagagagctcagtctttatccctagacgcttcattgatcgaattcaaatcttgccccgtgggaatggttgtccaagaaaagaaatcatagtctggaagaagaacaagtcaattgtgtgtgtggaccctcaagctgaatggatacaaagaatgatggaagtattgagaaaaagaagttcttcaactctaccagttccagtgtttaagagaaagattccctgatgctgatatttccactaagaacacctgcattcttcccttatccctgctctggattttagttttgtgcttagttaaatcttttccaggaaaaagaacttccccatacaaataagcatgagactatgtaaaaataaccttgcagaagctgatggggcaaactcaagcttcttcactcacagcaccctatatacacttggagtttgcattcttattcatcagggaggaaagtttctttgaaaatagttattcagttataagtaatacaggattattttgattatatacttgttgtttaatgtttaaaatttcttagaaaacaatggaatgagaatttaagcctcaaatttgaacatgtggcttgaattaagaagaaaattatggcatatattaaaagcaggcttctatgaaagactcaaaaagctgcctgggaggcagatggaacttgagcctgtcaagaggcaaaggaatccatgtagtagatatcctctgcttaaaaactcactacggaggagaattaagtcctacttttaaagaatttctttataaaatttactgtctaagattaatagcattcgaagatccccagacttcatagaatactcagggaaagcatttaaagggtgatgtacacatgtatcctttcacacatttgccttgacaaacttctttcactcacatctttttcactgactttttttgtggggggcggggccggggggactctggtatctaattctttaatgattcctataaatctaatgacattcaataaagttgagcaaacattttactt

SEQ ID NO: 1452 - DNA, 912 bp, Homo sapiens
atggtttatcagacatcactttgttcttgttctgtaaacatccgagtgcccaacagacattttgctgctgctacaaagtctgcaaagaaaacaaaaaaaggtgctaaagaaaaaacaccagatgagaaaaaagatgaaatagaaaaaataaaagcatatccctatatggaaggcgaacctgaggatgatgtctatttaaaacgcttatacccgagacagatatatgaggtggagaaagctgttcacttacttaagaaatttcaaattcttgactttactagtccaaagcaaagtgtttatcttgatttgacactggatatggcactgggaaagaagaaaaacgtggagccatttaccagtgttcttagtttgccatacccatttgcttccgaaatcaataaagttgctgtatttacagagaatgcatcagaggtcaaaatagcggaagaaaatggagctgcatttgcaggaggcactagtctgatacagaagatttgggatgatgaaattgttgcagacttttacgtagctgttccagaaataatgcctgaacttaatcgattaaggaagaaactgaataaaaaatatccaaagctttctcgaaattccattggccgtgacatccccaaaatgcttgaattatttaaaaatggacatgaaattaaggtagatgaagaaagggagaactttctccagaccaaaatagcaacattggatatgtcaagtgaccagatagctgccaatctgcaagcagttattaatgaagtttgtaggcacagaccgctgaatttgggtccctttgtggtacgtgctttccttcgtagttcaacaagtgaaggtttattactgaagattgatccattgttgcctaaagaagtaaaaaatgaagaaagtgaaaaagaagatgcctaa

SEQ ID NO: 1453 - DNA, 1902 bp, Homo sapiens
gtgggaagagctgaagcaggcgctcttggctcggcgcggcccgctgcaatccgtagaggaacccgccgccgagccaccatcatgcctgggcacttacaggaaggcttcggctgtgtggtcaccaaccgattcgaccagttatttgacgacgaatcggaccccttcgaggtgctgaaggcagcggagaacaagaaaaaagaagccggcaggggtggcgttgggggccctggggccaagagcgcagctcaggcggcggcccagaccaactccaacgcggcaggcaaacagctgcgcaaggagtcccagaaagaccgcaagaacccgctgccccgcagcgttggcgtggttgacaagaaagaggagacgcagccgcccgtggcgcttaagaaagaaggaataagacgagttggaagaagacctgatcaacaacttcagggtgaggggaaaataattgatagaagaccagaaaggcaaccaccttgtgaacgaagattcgaaaagccacttgaagaaaagggtgaaggaggctaattttcagttgatagaccgattattgaccgacctattcgaggtcgtggtggtcttggaagaggtcgagggggccgtggacgtggaatgggccgaggagatggatttgattctcgtggcaaacgtgaatttgataggcatagtggaagtgatagatcttctttttcacattacagtggcctgaagcacgaggacaaacgtggaggtagcggatctcacaactggggaactgtcaaagacgaattaactgacttggatcaatcaaatgtgactgacgaaacacctgaaggtgaagaacatcatccagtggcagacactgaaaataaggagaatgatgttgaagaggtaaaagaggagggtccaaaagagatgactttggatgagtggaaggctattcaaaataaggaccgggcaaaagtagaatttaatatctgaaaaccaaatgaaggtgctgatgggcagtggaagaagggatttgttttcataaatcaaagagtgaagaggcttatgctgaggattcagttatggaccatcatttccagaagccagcaaatgatataacgtctcagctggagatcaattttggagaccttggccgcccaggacgtggcggcaggggaggacaaggtggacatgggcgtggtgggcgcccaaaccgtggcagcaggaccgacaagtcaagtacttctgctcctgatgtggatgacccagaggcattcccagttctggcttaactggatgccataagacaaccctggttccttcgtgaacccttctgttcaaagcttttgcatgcttaaggattccaaatgacaaattaaaaaaaaaaaaagactgtcattcataccattcacacctaaagactgaattttatctgtttcaaaaatgaacttatctcgctacacagaagtaacaaatatggtagtcagttttgtatttagaaatgtattggtagcagggatgttttcataattttcagagattatgcattcttcatgaatacttttgtattgctgcttgcaaatatgcatttccaaacttgaaatataggtgtgaacagtgtgtaccagtttaaagctttcacttcatttgtgttttttaattaaggatttagaagttcccccaattacaaactggttttaaatattggacatactggctttaatacatgctttgcatattcacacatgatcaactgggacatgttaaactttgatttgtcaaattttattctgtgtggaatactaactatatgtattttaacttagttttaatattttcatttttggggaaaaatcttttttcacttctcatgatagctgttatatatatatgctaaatctttatatacagaaatatcagtacttgaagaaa

SEQ ID NO: 1454 - protein, 149 aa, Homo sapiens [sequence omitted]

SEQ ID NO: 1455 - DNA, 2291 bp, Homo sapiens
agacgcagtctccgtcgttgacgttagtcgcagtcttcgctgctaacgttttgttatgagttgctaaaatggtgaaatgctgctccgccattggatgtgcttctcgctgcttgccaaattcgaagttaaaaggactgacatttcacgtattccccacagatgaaaacatcaaaaggaaatgggtattagcaatgaaaagacttgatgtgaatgcagccggcatttgggagcctaaaaaaggagatgtgttgtgttcgaggcactttaagaagacagattttgacagaagtgctccaaatattaaactgaaacctggagtcataccttctatctttgattctccatatcacctacaggggaaaagagaaaaacttcattgtagaaaaaacttcaccctcaaaaccgttccagccactaactacaatcaccatcttgttggtgcttcctcatgtattgaagaattccaatcccagttcatttttgaacatagctacagtgtaatggacagtccaaagaaacttaagcataaattagatcatgtgatcggcgagctagaggatacaaaggaaagtctacggaatgttttagaccgagaaaaacgttttcagaaatcattgaggaagacaatcagggaattaaaggatgaatgtctgatcagccaagaaacagcaaatagactggacactttctgttgggactgttgtcaggagagcatagaacaggactatatttcatgaaataatttcatgttacgttccacctaaaattgtcattggtacaaatttttataaaatctcatttaccatcactaaataatatccatcatttaaagtgctgctttggattctctggagcattatgcattatagttgttatccaaagacttttttgaaaatatgcagaaatttgtggtaattatgtatttgtgtcttgtgacaattatgttttatagacctacactagtgccaggtcactattgtaagatgttaaaatctcaagaaaatttcacagagctaaagaaatgatgtcaaattagtcacattaagctatagtagaaggaattggacacttctccagatatttggcttcaaaggagtacctttacttacatgtgctttatggtaagtacattgaattttactttaaatgcattttactacaaagcacaattcatttgtaatgcatatccatcttggattcaatccaaggtgctttagctatcagtagtaccaaaggatctttttacaaggcttcctgtggtattgactctgagaataacacatagtgaagatctgtgggcttttaaaattgttcacagccaatttaagaagacccctcatgaagtctcagttttcagtacagtacatcattcctcctcactaggagcactttgatgtaaaccagaatagctttaaaaagacaaaaaggatcgtagatctgatttttaaatggttggttgctctgacagatctgaacactttgcttcatgactatttcgtcataaaggtatatgtttaaaatctgaatggcagtactagctctatacttttaatactgctttgtattttatatgtaaagtagtattgctgacattttaaaaaaatacaaaatacaaaagaaaccattagaaattaataactgtggctcttccagttgaaataggaattggagagaaaggattagaatattttaattaggggagtagattattgtccaaaggcttttatttagagaaacgggtaattaaaacagcagctttagaatagcttcttactgaatatgcaaaagaataattccttgttatttcctaattgatccaagtctcataaatttagcttttgtcataattccttaccgaaaacaactgaaattgagagtcataaatactgtgggttagaataaaaaccatttgccaaagcaacactctacttagaagcacatgtacatacatggacctcattcagaagtccatgttgtagcagttagaatttgagtatcagccatttcattgtagtaacaaaaattgaattgcattttgtgctcagttgtttattgtaattttatttttgttacattaatattagttaagatatggtcacttgaattttttgtatttaagaattttctgttttaatgcatgttatacttttatgtaggattccaaaccttccctctaaatgggatttaacccacatctgcgagatcagcgttatgctaagaggaaatcactgaggccatatctttttacaatctgaaaaaaaagtagtaaaaaggtagttaaaaaaaaaaaa

SEQ ID NO: 1456 - DNA, 2053 bp, Homo sapiens
cggcgccattaaagcgaggaggaggcgagagcggccgccgctggtgcttattcttttttagtgcagcgggagagagcgggagtgtgcgccgcgcgagagtgggaggcgaagggggcaggccagggagaggcgcaggagcctttgcagccacgcgcgcgccttccctgtcttgtgtgcttcgcgaggtagagcgggcgcgcggcagcggcggggattactttgctgctagtttcggttcgcggcagcggcgggtgtagtctcggcggcagcggcggagacactagcactatgtcggaggagcagttcggcggggacggggcggcggcagcggcaacggcggcggtaggcggctcggcgggcgagcaggagggagccatggtggcggcgacacagggggcagcggcggcggcgggaagcggagccgggaccgggggcggaaccgcgtctggaggcaccgaagggggcagcgccgagtcggagggggcgaagattgacgccagtaagaacgaggaggatgaaggccattcaaactcctccccacgacactctgaagcagcgacggcacagcgggaagaatggaaaatgtttataggaggccttagctgggacactacaaagaaagatctgaaggactacttttccaaatttggtgaagttgtagactgcactctgaagttagatcctatcacagggcgatcaaggggttttggctttgtgctatttaaagaatcggagagtgtagataaggtcatggatcaaaaagaacataaattgaatgggaaggtgattgatcctaaaagggccaaagccatgaaaacaaaagagccggttaaaaaaatttttgttggtggcctttctccagatacacctgaagagaaaataagggagtactttggtggttttggtgaggtggaatccatagagctccccatggacaacaagaccaataagaggcgtgggttctgctttattacctttaaggaagaagaaccagtgaagaagataatggaaaagaaataccacaatgttggtcttagtaaatgtgaaataaaagtagccatgtcgaaggaacaatatcagcaacagcaacagtggggatctagaggaggatttgcaggaagagctcgtggaagaggtggtgaccagcagagtggttatgggaaggtatccaggcgaggtggtcatcaaaatagctacaaaccatactaaattattccatttgcaacttatccccaacaggtggtgaagcagtattttccaatttgaagattcatttgaaggtggctcctgccacctgctaatagcagttcaaactaaattttttgtatcaagtccctgaatggaagtatgacgttgggtccctctgaagtttaattctgagttctcattaaaagaaatttgctttcattgttttatttcttaattgctatgcttcagaatcaatttgtgttttatgccctttcccccagtattgtagagcaagtcttgtgttaaaagcccagtgtgacagtgtcatgatgtagtagtgtcttactggttttttaataaatccttttgtataaaaatgtattggctcttttatcatcagaataggaaaaattgtcatggattcaagttattaaaagcataagtttggaagacaggcttgccgaaattgaggacatgattaaaattgcagtgaagtttgaaatgtttttagcaaaatctaatttttgccataatgtgtcctccctgtccaaattgggaatgacttaatgtcaatttgtttgttggttgttttaataatacttccttatgtagccattaagatttatatgaatattttcccaaatgcccagtttttgcttaatatgtattgtgctttttagaacaaatctggataaatgtgcaaaagtacccctttgcacagatagttaatgttttatgcttccattaaataaaaaggacttaaaatctgttaattataatagaaatgcggctagttcagagagatttttagagctgtggtggacttcatagatgaattcaagtgttgagggaggattaaagaaat

SEQ ID NO: 1457 - DNA, 4129 bp, Homo sapiens
gacgagcgctgcactaacgcaggatccggctgccgaaggtcctcgccagcaggatgaagttaaaggaagtagatcgtacagccatgcaggcatggagccctgcccagaatcaccccatttacctagcaacaggaacatctgctcagcaattggatgcaacatttagtacgaatgcttcccttgagatatttgaattagacctctctgatccatccttggatatgaaatcttgtgccacattctcctcttctcacaggtaccacaagttgatttgggggccttataaaatggattccaaaggagatgtctctggagttctgattgcaggtggtgaaaatggaaatattattctctatgatccttctaaaattatagctggagacaaggaagttgtgattgcccagaatgacaagcatactggcccagtgagagccttggatgtgaacattttccagactaatctggtagcttctggtgctaatgaatctgaaatctacatatgggatctaaataattttgcaaccccaatgacaccaggagccaaaacacagccgccagaagatatcagctgcattgcatggaacagacaagttcagcatattttagcatcagccagtcccagtggccgggccactgtatgggatcttagaaaaaatgagccaatcatcaaagtcagtgaccatagtaacagaatgcattgttctgggttggcatggcatcctgatgttgctactcagatggtccttgcctccgaggatgaccggttaccagtgatccagatgtgggatcttcgatttgcttcctctccacttcgtgtcctggaaaaccatgccagggggattttggcaattgcttggagcatggcagatcctgaattgttactgagctgtggaaaagatgctaagattctctgctccaatccaaacacaggagaggtgttatatgaacttcccaccaacacacagtggtgcttcgatattcagtggtgtccccgaaatcctgctgtcttatcagctgcttcgtttgatgggcgtatcagtgtttattctatcatgggaggaagcacagatggtttaagacagaaacaagttgacaagctttcatcatcttttgggaatcttgatccctttggcacaggacagccccttcctccgttacaaattccacagcagactgctcagcatagtatagtgctgcctctgaagaagccgcccaagtggattcgaaggcctgttggtgcttctttttcatttggaggcaaactggttacgtttgagaatgtcagaatgccttctcatcagggagctgagcagcagcagcagcagcaccatgtgttcattagtcaggttgtaacagaaaaggagttcctcagccgatcagaccaacttcagcaggctgtgcagtcacaaggatttatcaattattgccaaaaaaaaattgatgcttctcagactgaatttgagaaaaatgtgtggtcctttttgaaggtaaactttgaggatgattctcgtggaaaataccttgaacttctaggatacagaaaagaagatctaggaaagaagattgctttggccttgaacaaagtggatggagccaatgtggctcttaaagactctgaccaagtagcacagagtgatggggaggagagccctgctgctgaagagcagctcttgggagagcacattaaagaggaaaaagaagaatctgaatttctaccctcatctggaggaacatttaatatctctgtcagtggggacattgatggtttaattactcaggctttgctgacgggcaattttgagagtgctgttgacctttgtttacatgataaccgcatggccgatgccattatattggccatagcaggtggacaagaactcttggctcgaacccagaaaaaatacttcgcaaaatcccaaagcaaaattaccaggctcatcactgcagtggtgatgaagaactggaaagagattgttgagtcttgtgatcttaaaaattggagagaggctttagctgcagtattgacttatgcaaagccggatgaattttcagccctttgtgatcttttgggaaccaggcttgaaaatgaaggagatagcctcctgcagactcaagcatgtctctgctatatttgtgcagggaatgtagagaaattagttgcatgttggactaaagctcaagatggaagccaccctttgtcacttcaggatctgattgagaaagttgtcatcctgcgaaaagctgtgcaactcactcaagccatggacactagtactgtaggagttctcttggctgcgaagatgagtcagtatgccaatttgttggcagctcagggcagtattgctgcagccttggcttttcttcctgacaacaccaaccagccaaatatcatgcagcttcgtgacagactttgtagagcacaaggagagcctgtagcaggacatgaatcacctaaaattccgtacgagaaacagcagctccccaagggcaggcctggaccagttgctggccaccaccagatgccaagagttcaaactcaacaatattatccccatggagaaaatcctccacctccgggtttcataatgcatggaaatgttaatccaaatgcttctggtcagcttcccacatctccaggtcatatgcacacccaggtaccaccttatccacagccacagccttatcaaccagcccagccgtatcccttcggaacaggggggtcagcaatgtatcgacctcagcagcctgttgctcctcctacttcaaacgcttaccctaacaccccttacatatcttctgcttcttcctatactgggcagtctcagctgtacgcagcacagcaccaggcctcttcacctacctccagccctgctacttctttccctcctcccccttcctctggagcatccttccagcatggcggaccaggagctccaccatcatcttcagcttatgcactgcctcctggaacaacaggtacactgcctgctgccagtgagctgcctgcgtcccaaagaacaggtcctcagaatggttggaatgaccctccagctttgaacagagtacccaaaaagaagaagatgcctgaaaacttcatgcctcctgttcccatcacatcaccaatcatgaacccgttgggtgacccccagtcacaaatgctgcagcaacagccttcagctccagtaccactgtcaagccagtcttcattcccacagccacatcttccaggtggccagcccttccatggcgtacagcaacctcttggtcaaacaggcatgccaccatctttttcaaagcccaatattgaaggtgccccaggggctcctattggaaataccttccagcatgtgcagtctttgccaacaaaaaaaattaccaagaaacctattccagatgagcacctcattctaaagaccacatttgaggatcttattcagcgctgcctttcttcagcaacagaccctcaaaccaagaggaagctagatgatgccagcaaacgtttggagtttctgtatgataaacttagggaacagacactttcaccaacaatcaccagtggtttacacaacattgcaaggagcattgaaactcgaaactactcagaaggattgaccatgcatacccacatagttagcaccagcaacttcagtgagacctctgctttcatgccagttctcaaagttgttctcacccaggccaataagctgggtgtctaaaaggacagcttctcttccactcaatattgccatttttccaaagaaacatgttaaaaaaaaaaattataagacatggactagtcctcattagcatgtttgcatagcaaccagtcaagagcatttacactatttctgctgatatactcaccttagaactgctcagaaccctggtgctttatttttgttttaatcttttgttgccagtgatgattttcctattctgcaaatagtgtatttcctggattacacatagtatggtttcctgaagtattctgataaatgtgtttttttaaaacctcaatatactttttagaaaaggagcatctggttatgcataaagcagagctaaaactaaatttctttcatgtcctccctacttcctcagtgtcaatcagattaaagtgtgtaatcct

SEQ ID NO: 1458 - protein, 1220 aa, Homo sapiens
MKLKEVDRTAMQAWSPAQNHPIYLATGTSAQQLDATFSTNASLEIFELDLSDPSLDMKSCATFSSSHRYHKLIWGPYKMDSKGDVSGVLIAGGENGNIILYDPSKIIAGDKEVVIAQNDKHTGPVRALDVNIFQTNLVASGANESEIYIWDLNNFATPMTPGAKTQPPEDISCIAWNRQVQHILASASPSGRATVWDLRKNEPIIKVSDHSNRMHCSGLAWHPDVATQMVLASEDDRLPVIQMWDLRFASSPLRVLENHARGILAIAWSMADPELLLSCGKDAKILCSNPNTGEVLYELPTNTQWCFDIQWCPRNPAVLSAASFDGRISVYSIMGGSTDGLRQKQVDKLSSSFGNLDPFGTGQPLPPLQIPQQTAQHSIVLPLKKPPKWIRRPVGASFSFGGKLVTFENVRMPSHQGAEQQQQQHHVFISQVVTEKEFLSRSDQLQQAVQSQGFINYCQKKIDASQTEFEKNVWSFLKVNFEDDSRGKYLELLGYRKEDLGKKIALALNKVDGANVALKDSDQVAQSDGEESPAAEEQLLGEHIKEEKEESEFLPSSGGTFNISVSGDIDGLITQALLTGNFESAVDLCLHDNRMADAIILAIAGGQELLARTQKKYFAKSQSKITRLITAVVMKNWKEIVESCDLKNWREALAAVLTYAKPDEFSALCDLLGTRLENEGDSLLQTQACLCYICAGNVEKLVACWTKAQDGSHPLSLQDLIEKVVILRKAVQLTQAMDTSTVGVLLAAKMSQYANLLAAQGSIAAALAFLPDNTNQPNIMQLRDRLCRAQGEPVAGHESPKIPYEKQQLPKGRPGPVAGHHQMPRVQTQQYYPHGENPPPPGFIMHGNVNPNASGQLPTSPGHMHTQVPPYPQPQPYQPAQPYPFGTGGSAMYRPQQPVAPPTSNAYPNTPYISSASSYTGQSQLYAAQHQASSPTSSPATSFPPPPSSGASFQHGGPGAPPSSSAYALPPGTTGTLPAASELPASQRTGPQNGWNDPPALNRVPKKKKMPENFMPPVPITSPIMNPLGDPQSQMLQQQPSAPVPLSSQSSFPQPHLPGGQPFHGVQQPLGQTGMPPSFSKPNIEGAPGAPIGNTFQHVQSLPTKKITKKPIPDEHLILKTTFEDLIQRCLSSATDPQTKRKLDDASKRLEFLYDKLREQTLSPTITSGLHNIARSIETRNYSEGLTMHTHIVSTSNFSETSAFMPVLKVVLTQANKLGV

SEQ ID NO: 1459 - DNA, 1524 bp, Homo sapiens
gcagagcacagcatcgtcgggaccagactcgtctcaggccagttgcagccttctcagccaaacgccgaccaaggaaaactcactaccatgagaattgcagtgatttgcttttgcctcctaggcatcacctgtgccataccagttaaacaggctgattctggaagttctgaggaaaagcagctttacaacaaatacccagatgctgtggccacatggctaaaccctgacccatctcagaagcagaatctcctagccccacagacccttccaagtaagtccaacgaaagccatgaccacatggatgatatggatgatgaagatgatgatgaccatgtggacagccaggactccattgactcgaacgactctgatgatgtagatgacactgatgattctcaccagtctgatgagtctcaccattctgatgaatctgatgaactggtcactgattttcccacggacctgccagcaaccgaagttttcactccagttgtccccacagtagacacatatgatggccgaggtgatagtgtggtttatggactgaggtcaaaatctaagaagtttcgcagacctgacatccagtaccctgatgctacagacgaggacatcacctcacacatggaaagcgaggagttgaatggtgcatacaaggccatccccgttgcccaggacctgaacgcgccttctgattgggacagccgtgggaaggacagttatgaaacgagtcagctggatgaccagagtgctgaaacccacagccacaagcagtccagattatataagcggaaagccaatgatgagagcaatgagcattccgatgtgattgatagtcaggaactttccaaagtcagccgtgaattccacagccatgaatttcacagccatgaagatatgctggttgtagaccccaaaagtaaggaagaagataaacacctgaaatttcgtatttctcatgaattagatagtgcatcttctgaggtcaattaaaaggagaaaaaatacaatttctcactttgcatttagtcaaaagaaaaaatgctttatagcaaaatgaaagagaacatgaaatgcttctttctcagtttattggttgaatgtgtatctatttgagtctggaaataactaatgtgtttgataattagtttagtttgtggcttcatggaaactccctgtaaactaaaagcttcagggttatgtctatgttcattctatagaagaaatgcaaactatcactgtattttaatatttgttattctctcatgaatagaaatttatgtagaagcaaacaaaatacttttacccacttaaaaagagaatataacattttatgtcactataatcttttgttttttaagttagtgtatattttgttgtgattatctttttgtggtgtgaataaatcttttatcttgaatgtaataagaatttggtggtgtcaattgcttatttgttttcccacggttgtccagcaattaataaaacataaccttttttactgcctaaaaaaaaaaaaaaaaaaaa

SEQ ID NO: 1460 - protein, 300 aa, Homo sapiens
MRIAVICFCLLGITCAIPVKQADSGSSEEKQLYNKYPDAVATWLNPDPSQKQNLLAPQTLPSKSNESHDHMDDMDDEDDDDHVDSQDSIDSNDSDDVDDTDDSHQSDESHHSDESDELVTDFPTDLPATEVFTPVVPTVDTYDGRGDSVVYGLRSKSKKFRRPDIQYPDATDEDITSHMESEELNGAYKAIPVAQDLNAPSDWDSRGKDSYETSQLDDQSAETHSHKQSRLYKRKANDESNEHSDVIDSQELSKVSREFHSHEFHSHEDMLVVDPKSKEEDKHLKFRISHELDSASSEVN

SEQ ID NO: 1461 - DNA, 2529 bp, Homo sapiens
ctccagcacagcgttggtgctgcctgggtatcagaaagcaagctcacattgctctccagtacgtgtaagccttttcttttcaagatgcctgaggaagtgcaccatggagaggaggaggtggagacttttgcctttcaggcagaaattgcccaactcatatccctcatcatcaataccttctattccaacgaggagattttccttcaggagttgatctctaatgcttctgatgccttggacaagattcgctatgagagcctgacagacccttcaaagttggacagtggtaaagagctgaaaattgacatcatccccaaccctcaggaacgtaccctggctttggtagacacaggcattggcatgaccaaagctgatctcataaataatttgagaaccattgccaagtctggtactaaagcatgcatggaggctcttcaggctggtgcagacatctccatgattgggcagtttggtgttggcttttttctgcctacctggtggcagagaaactggttgtgatcacaaagcacaacgatgatgaacagtatgcttgggagtcttctgctggaggttccttcactgtgcatgctgatcatggtgagcccattggcaggggtaccaaagtgatcctccatcttaaagaagatcagacagagtacttagaagagaggcgggtcaaagaagtagtgaagaagcattctcagttcataggctatcccatcaccctttatttggagaaggaacaagacaaggaaattagtgatgatgaggcagaagaagagaaaggtgagaaagaagaggaagataaagatgacgaagaaaagcccaagatcaaagatgtgggttcagatgaggaggatgacagcagtaaggataagaagaagaaaactaagaagatcaaagagaaatacattgactaggaagaactaaacaagaccaagcctatttggaccagaaaccatgatgacatcacccaagaggagtatggagaattctataagagcctcaccagtgactgggaagaccacttggcagtcaagcacttttctgtagaaggtcagttggaattcagggcattgctattcagtcctcgtcgggctccctttgacctttttgagaacaagaagaaaaagaacaacatcaaactgtatgtccgccgtgtgttcatcatggacagctgtgatgagttgataccagagtatctcaattttatccatggtgtggttgactctgaggatctgcccctgaacatctcccgagaaatgctccagcagagcaaaatcttgaaagtcattcgcaaaaacattgttaagaagtgccttgagctcttctctgagctggcagaagacaaggagattataagaaattctatgaggcattttctaaaaatctcaagcttggaatccacgaagactccactaaccgccaccgcctgtctgagctgctgcgctgtcacacctcccagtctggagatgagatgacatctctgtcgtagtatgtttctcacatgaaggagacacagaagtccacctattacatcactggtgagagcaaagagcaggtggccaactctgcttttgtggagcgagtgcggaaacagggcttcgaggtggtatatatgactgagcccattgacgagtactgtgtgcagcagctcaaggagtttgatgggaaaagcctggtctcagttaccaaggagggtctggagctacctgaggatgaggaggagaagaagaagatggaagaaagcaaggaaaagtttgagaacctctgcaagctcatgaaagaaatcttagataagaaggttgagaaggtgacaatctccaatagacttgtgtcttcaccctgctgcattgtgaccagcacctacggctggacagccaatatggagcagatcatgaaagcccaggcacttcgggacaactccaccatgggctatatgatggccaaaaagcacctggagatcaaccccgaccaccccatcatggagacgctgcggcagaaggctgaggccgacaagaatgataaggcagttaaggacctggtggtgctgctgtttgaaaccgccctgctatcttcgggcttttcccttgaggatccccagacccactccaaccacatctaccacatgatcaagctaggtctaggtactgatgaagatgaagtggcagcagaggaacccagtgatgcagttcctgatgagatcccccctcttgagggtgatgaggatgcgtctcgcatggaagaagtcgattaggagttcatagttggaaaacttgtgcccttgtatagtgtccccatggctcccactgcagcctcgagtgcccctgtcccacctggctgctggtgtctagtgtttttttccctctcctgtccttgtgttgaaggcaggaaaccaagggtgtcaagccccattccctctctactcttgacagcaggattggatgttgtgtattgtggtttattttattttcttcattttgttctgaaattaaagaatgtaaaataaagaatatgccgtttttatac

SEQ ID NO: 1462 - protein, 249 aa, Homo sapiens [sequence omitted]

SEQ ID NO: 1463 - DNA, 700 bp, Homo sapiens
ctctcaagtcactccagcacagcgttggtgctgcctgggtatcagaaagcaagctcacattgctctccagtacgtgtaagccttttcttttcaagatgcctgaggaagtgcaccatggagaggaggaggtggagacttttgcctttcaggcagaaattgcccaactcatatccctcatcatcaataccttctattccaacgaggagattttccttcaggagttgatctctaatgcttctgatgccttggacaagattcgctatgagagcctgacagacccttcaaagttggacagtggtaaagagctgaaaattgacatctccatgattgggcagtttggtgttggcttttttctgcctacctggtggcagagaaactggttgtgatcacaaagcacaacgatgatgaacagtatgcttgggagtcttctgctggaggttccttcactgtgcatgctgatcatggtgagcccattggcaggggtaccaaagtgatcctccatcttaaagaagatcagacagagtacttagaagagaggcgggtcaaagaagtagtgaagaagcattctcagttcataggctatcccatcaccctttatttggagaaggaacaagacaaggaaattagtgatgatgaggcagaagaagagaaaggtgagaaagaagaggaagataaagatgacgaagaaaagcccaagatc

SEQ ID NO: 1464 - DNA, 2629 bp, Homo sapiens
gagcagcagaatttcaactccagtagacttgaatatgcctctgggcaaagaagcagagctaacgaggaaagggatttaaagagtttttcttgggtgtttgtcaaacttttattccctgtctgtgtgcagaggggattcaacttcaatttttctgcagtggctctgggtccagccccttacttaaagatctggaaagcatgaagactgggctttttttcctatgtctcttgggaactgcagctgcaatcccgacaaatgcaagattattatctgatcattccaaaccaactgctgaaacggtagcacctgacaacactgcaatccccagtttaagggctgaagctgaagaaaatgaaaaagaaacagcagtatccacagaagacgattcccaccataaggctgaaaaatcatcagtactaaagtcaaaagaggaaagccatgaacagtcagcagaacagggcaagagttctagccaagagctgggattgaaggatcaagaggacagtgatggtcacttaagtgtgaatttggagtatgcaccaactgaaggtacattggacataaaagaagatatgagtgagcctcaggagaaaaaactctcagagaacactgattttttggctcctggtgttagttccttcacagattctaaccaacaagaaagtatcacaaagagagaggaaaaccaagaacaacctagaaattattcacatcatcagttgaacaggagcagtaaacatagccaaggcctaagggatcaaggaaaccaagagcaggatccaaatatttccaatggagaagaggaagaagaaaaagagccaggtgaagttggtacccacaatgataaccaagaaagaaagacagaattgcccagggagcatgctaacagcaagcaggaggaagacaatacccaatctgatgatattttggaagagtctgatcaaccaactcaagtaagcaagatgcaggaggatgaatttgatcagggtaaccaagaacaagaagataactccaatgcagaaatggaagaggaaaatgcatcgaacgtcaataagcacattcaagaaactgaatggcagagtcaagagggtaaaactggcctagaagctatcagcaaccacaaagagacagaagaaaagactgtttctgaggctctgctcatggaacctactgatgatggtaataccacgcccagaaatcatggagttgatgatgatggcgatgatgatggcgatgatggcggcactgatggccccaggcacagtgcaagtgatgactacttcatcccaagccaggcctttctggaggccgagagagctcaatccattgcctatcacctcaaaattgaggagcaaagagaaaaagtacatgaaaatgaaaatataggtaccactgagcctggagagcaccaagaggccaagaaagcagagaactcatcaaatgaggaggaaacgtcaagtgaaggcaacatgagggtgcatgctgtggattcttgcatgagcttccagtgtaaaagaggccacatctgtaaggcagaccaacagggaaaacctcactgtgtctgccaggatccagtgacttgtcctccaacaaaaccccttgatcaagtttgtggcactgacaatcagacctatgctagttcctgtcatctattcgctactaaatgcagactggaggggaccaaaaaggggcatcaactccagctggattattttggagcctgcaaatctattcctacttgtacggactttgaagtgattcagtttcctctacggatgagagactggctcaagaatatcctcatgcagctttatgaagccaactctgaacacgctggttatctaaatgagaagcagagaaataaagtcaagaaaatttacctggatgaaaagaggcttttggctggggaccatcccattgatcttctcttaagggactttaagaaaaactaccacatgtatgtgtatcctgtgcactggcagtttagtgaacttgaccaacaccctatggatagagtcttgacacattctgaacttgctcctctgcgagcatctctggtgcccatggaacactgcataacccgtttctttgaggagtgtgaccccaacaaggataagcacatcaccctgaaggagtggggccactgctttggaattaaagaagaggacatagatgaaaatctcttgttttgaacgaagattttaaagaactcaactttccagcatcctcctctgttctaaccacttcagaaatatatgcagctgtgatacttgtagatttatatttagcaaaatgttagcatgtatgacaagacaatgagagtaattgcttgacaacaacctatgcaccaggtatttaacattaactttggaaacaaaaatgtacaattaagtaaagtcaacatatgcaaaatactgtacattgtgaacagaagtttaattcatagtaatttcactctctgcattgacttatgagataattaatgattaaactattaatgataaaaataatgcatttgtattgttcataatatcatgtgcacttcaagaaaatggaatgctactcttttgtggtttacgtgtattattttcaatatcttaataccctaataaagagtccataaaaatcc

SEQ ID NO: 1465 - DNA, 528 bp, Homo sapiens
cttcgccgcgtggatggcctattacatcaatcaccctctctacactccccctacctacggagctcagcaggtgaaactggcgctcgccatctttgtgatctgccagctcggcaacttctccatccacatggccctgcgggacctgcggcccgctgggtccaagacgcggaagatcccataccccaccaagaaccccttcacgtggctcttcctgctggtgtcctgccccaactacacctacgaggtggggtcctggatcggtttcgccatcatgacgcagtgtctcccagtggccctgttctccctggtgggcttcacccagatgaccatctgggccaagggcaagcaccgcagctacctgaaggagttccgggactacccgcccctgcgcatgcccatcatccccttcctgctctgagcgctcacccctgctgaggctcagcccctcaacccggtggcattctgggggaggagtggggcccacagctctccagcacccggaataaagcccgcctgccccagtcggga

SEQ ID NO: 1466 - DNA, 1097 bp, Homo sapiens
gagggcgggcctgtttccgggaggcgcgtggggcttgaggccgagaacggcccttgctgccaccaacatggagactttgtaccgtgtcccgttcttagtgctcgaatgtcccaacctgaagctgaagaagccgccctggttgcacatgccgtcggccatgactgtgtatgctctggtggtggtgtcttacttcctcatcaccggaggaataatttatgatgttattgttgaacctccaagtgtcggttctatgactgatgaacatgggcatcagaggccagtagctttcttggcctacagagtaaatggacaatatattatggaaggacttgcatccagcttcctatttacaatgggaggtttaggtttcataatcctggaccgatcgaatgcaccaaatatcccaaaactcaatagattccttcttctgttcattggattcgtctgtgtcctattgagttttttcatggctagagtattcatgagaatgaaactgccgggctatctgatgggttagagtgcctttgagaagaaatcagtggatactggatttgctcctgtcaatgaagttttaaaggctgtaccaatcctctaatatgaaatgtggaaaagaatgaagagcagcagtaaaagaaatatctagtgaaaaaacaggaagcgtattgaagcttggactagaatttcttcttggtattaaagagacaagtttatcacagaattttttttcctgctggcctattgctataccaatgatgttgagtggcattttctttttagtttttcattaaaatatattccatatctacaactataatatcaaataaagtgattattttttacaaccctcttaacattttttggagatgacatttctgattttcagaaattaacataaaatccagaagcaagattccgtaagctgagaactctggacagttgatcagctttacctatggtgctttgcctttaactagagtgtgtgatggtagattatttcagatatgtatgtaaaactgtttcctgaacaataagatgtatgaacggagcagaaataaatactttttctaattgcaaaaaaaaaaaaaaaaaaaaaaaaa

SEQ ID NO: 1467 - protein, 149 aa, Homo sapiens
METLYRVPFLVLECPNLKLKKPPWLHMPSAMTVYALVVVSYFLITGGIIYDVIVEPPSVGSMTDEHGHQRPVAFLAYRVNGQYIMEGLASSFLFTMGGLGFIILDRSNAPNIPKLNRFLLLFIGFVCVLLSFFMARVFMRMKLPGYLMG

SEQ ID NO: 1468 - DNA, 1200 bp, Homo sapiens
atgccccaactctccggaggaggtggcggcggcgggggggacccggaactctgcgccacggacgagatgatccccttcaaggacgagggcgatcctcagaaggaaaagatcttcgccgagatcagtcatcccgaagaggaaggcgatttagctgacatcaagtcttccttggtgaacgagtctgaaatcatcccggccagcaacggacacgaggtggccagacaagcacaaacctctcaggagccctaccacgacaaggccagagaacaccccgatgacggaaagcatccagatggaggcctctacaacaagggaccctcctactcgagttattccgggtacataatgatgccaaatatgaataacgacccatacatgtcaaatggatctctttctccacccatcccgagaacatcaaataaagtgcccgtggtgcagccatcccatgcggtccatcctctcacccccctcatcacttacagtgacgagcacttttctccaggatcacacccgtcacacatcccatcagatgtcaactccaaacaaggcatgtccagacatcctccagctcctgatatccctactttttatcccttgtctccgggtggtgttggacagatcaccccacctcttggctggcaaggtcagcctgtatatcccatcacgggtggattcaggcaaccctacccatcctcactgtcagtcgacacttccatgtccaggttttcccatcatatgattcccggtcctcctggtccccacacaactggcatccctcatccagctattgtaacacctcaggtcaaacaggaacatccccacactgacagtgacctaatgcacgtgaagcctcagcatgaacagagaaaggagcaggagccaaaaagacctcacattaagaagcctctgaatgcttttatgttatacatgaaagaaatgagagcgaatgtcgttgctgagtgtactctaaaagaaagtgcagctatcaaccagattcttggcagaaggtggcatgccctctcccgtgaagagcaggctaaatattatgaattagcacggaaagaaagacagctacatatgcagctttatccaggctggtctgcaagagacaattatggtaagaaaaagaagaggaagagagagaaactacaggaatctgcatcaggtacaggtccaagaatgacagctgcctacatctga

SEQ ID NO: 1469 - DNA, 662 bp, Homo sapiens
tggccacaacaccgacacagtagcatttgtgccagtttctggttggaatggtgacaacacgctggagccaagtgctaacatgccttggttcaagggatggaaagtcacccgtaaggatggcaatgccagtggaaccacgctgcttgaggctcttgactgcatcctaccaccaactcgtccaactgacaagcccttgtgcctgcctctccaggatgtctacaaaattggtggtattggtactgttcctgttggctgagtggagactggtgttctcaaacctggtatggtggtcacctttgctccagtcaacgttgcaacagaagtaaaatctgttgaaatgcaccatgaagcagaaggctaaataaatattatccctactacctgccaccccactgttaatcagtggtggaagaatggtctcagaactgtttgtttcaattggccattgaagtttagtagtaaaagactggttaatgataacaatgcatcataaaaccttcagaaggaaaggagaatgttttgtggaccactttggttttctttctttgcatgtggcagttttaagttattagtttttaaaatcagtactttttactggaaacaacttgaccaaaaatttgtcacagaattttgagacccattaaaaaagtttaatgaaaaaa

SEQ ID NO: 1470 - DNA, 754 bp, Homo sapiens
aagccagaacgagaaaggaaaagactcatatcaacactgtgatcatcggacacgtagattcgggcaagtccaccactactggccatctgatctacaaatgcggtggcgtcgacaaaagaaccatcgaaaaatttgagaaggaggctgctgagatgggaaagtgctccttcaagtatgcctgggtcttggataaactgaaagctgagcgtgaacatggtatcaccattgatatctctttgtggaaatttgagaccagcaagtactatgggacaatgtgggcttcaatgtcaagaatgtgtctgtcaaggatgttcgtcgtggcaacgttgctggtgacagcaaaaaggacccaccaatggaagcagctggcttcactgctcaggtgattatcctgaaccatccaggccaaataagtgctggctatgcccctgtattggattgccacacggctcacattgcatgcaagtttgctgagctgaaggaaaagactgatcgccattctggtaaaaagctggaagatggccctaaattcttgaagtctggtgatgctgccattgttgatatggttcctggcaagcccgtgtatgttgagagcttctcagactatccacctttgggtcgctttgctgttcatgatatcagacagacagttgcggtgggtgtcatcaaagcagtggacaagaaggctgctggagctggcaaggtcaccaagtctgcccagaaagctcagaaggctaaataaatattatcccta

SEQ ID NO: 1471 - DNA, 725 bp, Homo sapiens
aaattgttaaggaagtcagcacttacattaagaaaattggccacaacaccgacacagtagcatttgtgccagtttctggttggaatggtgacaacacgctggagccaagtgctaacatgccttggttcaagggatggaaagtcacccgtaaggatggcaatgccagtggaaccacgctgcttgaggctcttgactgcatcctaccaccaactcgtccaactgacaagcccttgtgcctgcctctccaggatgtctacaaaattggtggtattggtactgttcctgttggctgagtggagactggtgttctcaaacctggtatggtggtcacctttgctccagtcaacgttgcaacagaagtaaaatctgttgaaatgcaccatgaagctttgagtgaagttcttcctggggacaatgtgggcttcaatgtcaagaatgtgtctgtcaaggatgttcgtcgtggcaacgttgctggtgacagcaaaaaggacccaccaatggaagcagctggcttcactgctcaggtgattatcctgaaccatccaggccaaataagtgctggctatgcccctgtattggattgccacacggctcacattgcatgcaagtttgctgagctgaaggaaaagactgatcgccattctggtaaaaagctggaagatggccctaaattcttctttgggtcgctttgctgttcatgatatcagacagacagttgcggtggg

SEQ ID NO: 1472 - DNA, 801 bp, Homo sapiens
gtgaacatggtatcaccattgatatctctttgtggaaatttgagaccagcaagtactatgtgactatcattgatgccccaggacacagagacctcatcaaaaacatgattacagggacatctcaggctgactgtgctgtcttgattgttgctgctggttttggtgaatttgaagctggtatctccaagaatgggcagacccgagagcacgcccttctggcttacacactgggtgtgaaacaactaattgttggtgttaacaaaatggattccactgagccaccctacagccataagagatatgaggaaattgttaaggaagtcagcacttacattaagaaaattggccacaacaccgacacagtagcatttgtgccagtttctggttggaatggtgacaacacgctggagccaagtgctaacatgccttggttcaagggatggaaagtcacccgtaaggatggcaatgccagtggaaccagcctgcctctccaggatgtctacaaaattggtggtattggtactgttcctgttggctgagtggagactggtgttctcaaacctggtatggtggtcacctttgctccagtcaacgttgcaacagaagtaaaatctgttgaaatgcaccatgaagctttgagtgaagttcttcctggggacaatgtgggcttcaatgtcaagaatgtgtctgtcaaggatgttcgtcgtggcaacgttgctggtgacagcaaaaaggacccaccaatggaagcagctggcttcactgctcaggtgattatcctgaaccatccaggccaaataa

SEQ ID NO: 1473 - DNA, 851 bp, Homo sapiens
gaaaaatttgagaaggaggctgctgagatgggaaagtgctccttcaagtatgcctgggtcttggataaactgaaagctgagcgtgaacatggtatcaccattgatatctctttgtggaaatttgagaccagcaagtactatgtgactatcattgatgccccaggacacagagacctcatcaaaaacatgattacagggacatctcaggctgactgtgctgtcttgattgttgctgctggttttggtgaatttgaagctggtatctccaagaatgggcagacccgagagcacgcccttctggcttacacactgggtgtgaaacaactaattgttggtgttaacaaaatggattccactgagccaccctacagccataagagatatgaggaaattgttaaggaagtcagcacttacattaagaaaattggccacaacaccgacacagtagcatttgtgccagtttctggttggaatggtgacaacacgctggagccaagtgctaacatgccttggttcaagggatggaaagtcacccgtaaggatggcaatgccagtggaaccacgctgcttgaggctcttgactgcatcctaccaccaactcgtccaactgacaagcccttgtgcctgcctctccaggatgtctacaaaattggtggtattggtactgttcctgttggctgagtggagactggtgttctcaaacctggtatggtggtcacctttgctccagtcaacgttgcaacagaagtaaaatctgtgtcaaggatgttcgtcgtggcaacgttgctggtgacagcaaaaaggacccaccaatggaagcagctggcttcactgctcaggtgattatcctg

SEQ ID NO: 1474 - DNA, 5698 bp, Homo sapiens
ggtggttcgcagaagcagcagtgaagagaagctactgtgtttggtgcgggagcgagctggccacacctgtgaggctgcagtgattgtgattctcatcctggtgtgggaaggaatcccgctgtctctggctgacaaactctactcggagcttaccgagacgctgaggaaatacggcacgctcaccaatcgccggtgtgccttgaatgaagagagaacttgcgcctgtcaggggctggatccagaaacctgtggtgcctccttctcttttggttgttcatggagcatgtactacaatggatgtaagtttgccagaagcaagatcccaaggaagtttaagctgcttggggatgacccaaaagaggaagagaaactggagtctcatttgcaaaacctgtccactcttatggcaccaacatataagaaacttgcacctgatgcatataataatcagattgaatatgaacacagagcaccagagtgccgtctgggtctgaaggaaggccgtccattctcaggggtcactgcatgtttggacttctgtgctcatgcccacagagacttgcacaacatgcagaatggcagcacattggtatgcactctcactagagaagacaatcgagaatttggaggaaaacctgaggatgagcagcttcacgttctgcctttatacaaagtctctgacgtggatgagtttgggagtgtggaagctcaggaggagaaaaaacggagtggtgccattcaggtactgagttcttttcggcgaaaagtcaggatgttagcagagccagtcaagacttgccgacaaaggaaactagaagccaagaaagctgcagctgaaaagctttcctccctggagaacagctcaaataaaaatgaaaaggaaaagtcagccccatcacgtacaaaacaaactgaaaacgcaagccaggctaaacagttggcagaacttttgcgactttcaggaccagtcatgcagcagtcccagcagccccagcctctacagaagcagccaccacagccccagcagcagcagagaccccagcagcagcagccacatcaccctcagacagagtctgtcaactcttattctgcttctggatccaccaatccatacatgagacggcccaatccagttagtccttatccaaactcttcacacacttcagatatctatggaagcaccagccctatgaacttctattccacctcatctcaagctgcaggttcatatttgaattcttctaatcccatgaacccttaccctgggcttttgaatcagaatacccaatatccatcatatcaatgcaatggaaacctatcagtggacaactgctccccatatctgggttcctattctccccagtctcagccgatggatctgtataggtatccaagccaagaccctctgtctaagctcagtctaccacccatccatacactttaccagccaaggtttggaaatagccagagttttacatctaaatacttaggttatggaaaccaaaatatgcagggagatggtttcagcagttgtaccattagaccaaatgtacatcatgtagggaaattgcctccttatcccactcatgagatggatggccacttcatgggagccacctctagattaccacccaatctgagcaatccaaacatggactataaaaatggtgaacatcattcaccttctcacataatccataactacagtgcagctccgggcatgttcaacagctctcttcatgccctgcatctccaaaacaaggagaatgacatgctttcccacacagctaatgggttatcaaagatgcttccagctcttaaccatgatagaactgcttgtgtccaaggaggcttacacaaattaagtgatgctaatggtcaggaaaagcagccattggcactagtccagggtgtggcttctggtgcagaggacaacgatgaggtctggtcagacagcgagcagagctttctggatcctgacattgggggagtggccgtggctccaactcatgggtcaattctcattgagtgtgcaaagcgtgagctgcatgccacaacccctttaaagaatcccaataggaatcaccccaccaggatctccctcgtcttttaccagcataagagcatgaatgagccaaaacatggcttggctctttgggaagccaaaatggctgaaaaagcccgtgagaaagaggaagagtgtgaaaagtatggcccagactatgtgcctcagaaatcccatggcaaaaaagtgaaacgggagcctgctgagccacatgaaacttcagagcccacttacctgcgtttcatcaagtctcttgccgaaaggaccatgtccgtgaccacagactccacagtaactacatctccatatgccttcactcgggtcacagggccttacaacagatatatatgatatcacccccttttgttggttacctcacttgaaaagaccacaaccaacctgtcagtagtatagttctcatgacgtgggcagtggggaaaggtcacagtattcatgacaaatgtggtgggaaaaacctcagctcaccagcaacaaaagaggttatcttaccatagcacttaattttcactggctcccaagtggtcacagatggcatctaggaaaagaccaaagcattctatgcaaaaagaaggtggggaagaaagtgttccgcaatttacatttttaaacactggttctattattggacgagatgatatgtaaatgtgatcccccccccccgcttacaactctacacatctgtgaccacttttaataatatcaagtttgcatagtcatggaacacaaatcaaacaagtactgtagtattacagtgacaggaatcttaaaataccatctggtgctgaatatatgatgtactgaaatactggaattatggctttttgaaatgcagtttttactgtaatcttaacttttatttatcaaaatagctacaggaaacatgaatagcaggaaaacactgaatttgtttggatgttctaagaaatggtgctaagaaaatggtgtctttaatagctaaaaatttaatgcctttatatcatcaagatgctatcagtgtactccagtgcccttgaataataggggtaccttttcattcaagtttttatcataattacctattcttacacaagcttagtttttaaaatgtggacattttaaaggcctctggattttgctcatccagtgaagtccttgtaggacaataaacgtatatatgtacatatatacacaaacatgtatatgtgcacacacatgtatatgtataaatattttaaatggtgttttagaagcactttgtctacctaagctttgacaacttgaacaatgctaaggtactgagatgtttaaaaaacaagtttactttcattttagaatgcaaagttgatttttttaaggaaacaaagaaagcttttaaaatatttttgcttttagccatgcatctgctgatgagcaattgtgtccatttttaacacagccagttaaatccaccatggggcttactggattcaagggaatacgttagtccacaaaacatgttttctggtgctcatctcacatgctatactgtaaaacagttttatacaaaattgtatgacaagttcattgctcaaaaatgtacagttttaagaattttctattaactgcaggtaataattagctgcatgctgcagactcaacaaagctagttcactgaagcctatgctattttatggatcataggctcttcagagaactgaatggcagtctgcctttgtgttgataattatgtacattgtgacgttgtcatttcttagcttaagtgtcctctttaacaagaggattgagcagactgatgcctgcataagatgaataaacagggttagttccatgtgaatctgtcagttaaaaagaaacaaaaacaggcagctggtttgctgtggtggttttaaatcattaatttgtataaagaagtgaaagagttgtatagtaaattaaattgtaaacaaaacttttttaatgcaatgctttagtattttagtactgtaaaaaaattaaatatatacatatatatatatatatatatatatatatatatgagtttgaagcagaattcacatcatgatggtgctactcagcctgctacaaatatatcataatgtgagctaagaattcattaaatgtttgagtgatgttcctacttgtcatatacctcaacactagtttggcaataggatattgaactgagagtgaaagcattgtgtaccatcatttttttccaagtccttttttttattgttaaaaaaaaaagcataccttttttcaatacttgatttcttagcaagtataacttgaacttcaacctttttgttctaaaaattcagggatatttcagctcatgctctccctatgccaacatgtcacctgtgtttatgtaaaattgttgtaggttaataaatatattctttgtcagggatttaacccttttattttgaatcccttctattttacttgtacatgtgctgatgtaactaaaactaattttgtaaatctgttggctctttttattgtaaagaaaagcattttaaaagtttgaggaatcttttgactgtttcaagcaggaaaaaaaaattacatgaaaatagaatgcactgagttgataaagggaaaaattgtaaggcaggagtttggcaagtggctgttggccagagacttacttgtaactctctaaatgaagtttttttgatcctgtaatcactgaaggtacatactccatgtggacttcccttaaacaggcaaacacctacaggtatggtgtgcaacagattgtacaattacattttggcctaaatacatttttgcttactagtatttaaaataaattcttaatcagaggaggcctttgggttttattggtcaaatctttgtaagctggcttttgtctttttaaaaaatttcttgaatttgtggttgtgtccaatttgcaaacatttccaaaaatgtttgctttgcttacaaaccacatgattttaatgttttttgtataccataatatctagccccaaacatttgattactacatgtgcattggtgattttgatcatccattcttaatatttgatttctgtgtcacctactgtcatttgttaaactgctggccaacaagaacaggaagtatagtttggggggttggggagagtttacataaggaagagaagaaattgagtggcatattgtaaatatcagatctataattgtaaatataaaacctgcctcagttagaatgaatggaaagcagatctacaatttgctaatataggaatatcaggttgactatatagccatacttgaaaatgcttctgagtggtgtcaactttacttgaatgaatttttcatcttgattgacgcacagtgatgtacagttcacttctgaagctagtggttaacttgtgtaggaaacttttgcagtttgacactaagataacttctgtgtgcatttttctatgcttttttaaaaactagtttcatttcattttcatgagatgtttggtttataagatctgaggatggttataaatactgtaagtattgtaatgttatgaatgcaggttatttgaaagctgtttattattatatcattcctgataatgctatgtgagtgtttttaataaaatttatatttatttaatgcactct

SEQ ID NO: 1475 - protein, 670 aa, Homo sapiens [sequence omitted]

SEQ ID NO: 1476 - DNA, 3339 bp, Homo sapiens
aggcacaggcagcctgcatacactccttttcctggtgtcaacattatttaaaagcatgggaaatagtaatgagacagtgtcttcttcattagaaccttaggagtctactagatttcttcatctctatttgttgttattagtagccaaactgtgcaaaaaacacggtcttgagaaatgacagcacagtatcttagagggaaaggaaatgtaggatgccagtgtggggacaaatttctgattgccagtgattgttgtgagcataacaataatttcatgaacattaaagcctctattgagggcagctgcagttgtaaaggaaaaaaaatggtcctgaacatttaaaactacactggtgtacatcataatcaaacaaagtaaacagaaaaaaatttaaactttgctaaaaaaaaaaagcagaagcacttgatctttaggaaggcacgcagttgcttattatgaatcatttctagagtccgatgcattttcaaagccggttacagtcattacgaagcacacccttgtgaggtaagtgtatcatcacctttggttcataaataaaaaagctgagacgccgagcgattaagtcactcgcctaaggagaatgagtcaacgtcaagagtcatagttgacccggcctaaagactccagaccatcagtccagggcttagtcagcggggcccggagtggcttccctggctggcatctggacttaggctatttccgtgcacgtaaaagcggaatattggaacggttgcacagaacttccaaataatttttaccgccacgcaagatttagccctgaggtcttaatctcaggatttgggacagtaaaagctgtcgtccctccccctcgtccagccggtggcaagcgggtactgcgggcggttccgtccgtcccctttcgcagaaatggcaacgaatgaccaccagcattagctgagccaggggacgtgggagggttgattgcctaaacgactctgcatcgccgcctctttttgaaactaagagaaaatggtgggagatcaaaagaaaactaaataaacacacaggcaacttgtcctgggacctcaactaagcaaatgaagccttattgtgtgtgctgagcctgcagttcccaaccttccggggaagatgggaggacagggcgacaaagggcacagtaggcttgcctggcagtaagtgtgaccgcagctatccaggcggaagagcagaggactgaaaccaccctccagcaagcgagtgtccgccgcgttgagaaccgcgcaccctacccatcggccacgtgaccagtcctttttaaaaaaaatttctttaccttaaaaaaaaaaaaaaaaaaaaggtgggggagagactccacttcccagaagcctctcgttactcacgcagccgcagtcttgcgcaggtgccgccagggccaaacggacatatccgtcacgtggccagaagctggccaatccggtttgaatctcatttttttcctcttacccccccttctggagcggttgtgcgatcagatcgatctaagatggcgactgtcgaaccggaaaccacccctactcctaatcccccgactacagaagaggagaaaacggaatctaatcaggaggttgctaacccagaacactatattaaacatcccctacagaacagatgggcactctggttttttaaaaatgataaaagcaaaacttggcaagcaaacctgcggctgatctccaagtttgatactgttgaagacttttgggctctgtacaaccatatccagttgtctagtaatttaatgcctggctgtgactactcactttttaaggatggtattgagcctatgtgggaagatgagaaaaacaaacggggaggacgatggctaattacattgaacaaacagcagagacgaagtgacctcgatcgcttttggctagagacacttctgtgccttattggagaatcttttgatgactacagtgatgatgtatgtggcgctgttgttaatgttagagctaaaggtgataagatagcaatatggactactgaatgtgaaaacagagaagctgttacacatatagggagggtatacaaggaaaggttaggacttcctccaaagatagtgattggttatcagtcccacgcagacacagctactaagagcggctccaccactaaaaataggtttgttgtttaagaagacaccttctgagtattctcataggagactgcgtcaagcaatcgagatttgggagctgaaccaaagcctcttcaaaaagcagagtggactgcatttaaatttgatttccatcttaatgttactcagatataagagaagtctcattcgcctttgtcttgtacttctgtgttcatttttttttttttttttggctagagtttccactatcccaatcaaagaattacagtacacatccccagaatccataaatgtgttcctggcccactctgtaatagttcagtagaattaccattaattacatacagattttacctatccacaatagtcagaaaacaacttggcatttctatactttacaggaaaaaaaattctgttgttccattttatgcagaagcatattttgctggtttgaaagattatgatgcatacagttttctagcaattttctttgtttctttttacagcattgtctttgctgtactcttgctgatggctgctagattttaatttatttgtttccctacttgataatattagtgattctgatttcagtttttcatttgttttgcttttgtttttttcctcatgtaacattggtgaaggatccaggaatatgacacaaaggtggaataaacattaattttgtgcattctttggtaattttttttgttttttgtaactacaaagctttgctacaaatttatgcatttcattcaaatcagtgatctatgtttgtgtgatttcctaaacataattgtggattataaaaaatgtaacatcataattacattcctaactagaattagtatgtctgtttttgtatctttatgctgtattttaacactttgtattacttaggttattttgctttggttaaaaatggctcaagtagaaaagcagtcccattcatattaagacagtgtacaaaactgtaaataaaatgtgtacagtgaattgtcttttagacaactagatttgtccttttatttctccatctttatagaaggaatttgtacttcttattgcaaggcagtctctatattatgtcttcttttgtggtgtcttccatgtgaacagcataagtttggagcactagtttgattattatgtttattacaatttttaataaattgaataggtagtatcatatatatgga

SEQ ID NO: 1477 - DNA, 2492 bp, Homo sapiens
agcggcacgcaccacagctcgagcaccgcccttccggttggagccattgcaagccccccccacgccccgcccccctcgctaggcgctcgccacgcccatgcctccgtcgctgcgcggcccaccccggatgtcagccccccgcgccgaccagaatccgtgaacatggcgaacgaggttatcaagtgcaaggctgcagttgcttgggaggctggaaagcctctctccatagaggagatagaggtggcacccccaaaggctcatgaagttcgaatcaagatcattgccactgcggtttgccacaccgatgcctataccctgagtggagctgatcctgagggttgttttccagtgatcttgggacatgaaggtgctggaattgtggaaagtgttggtgagggagttactaagctgaaggcgggtgacactgtcatcccactttacatcccacagtgtggagaatgcaaattttgtctaaatcctaaaactaacctttgccagaagataagagtcactcaagggaaaggattaatgccagatggtaccagcagatttacttgcaaaggaaagacaattttgcattacatgggaaccagcacattttctgaatacacagttgtggctgatatctctgttgctaaaatagatcctttagcacctttggataaagtctgccttctaggttgtggcatttcaaccggttatggtgctgctgtgaacactgccaagttggagcctggctctgtttgtgccgtctttggtctgggaggagtcggattggcagttatcatgggctgtaaagtggctggtgcttcccggatcattggtgtggacatcaataaagataaatttgcaagggccaaagagtttggagccactgaatgtattaaccctcaggattttagtaaacccatccaggaagtgctcattgagatgaccgatggaggagtggactattcctttgaatgtattggtaatgtgaaggtcatgagagcagcacttgaggcatgtcacaagggctggggcgtcagcgtcgtggttggagtagctgcttcaggtgaagaaattgccactcgtccattccagctggtaacaggtcgcacatggaaaggcactgcctttggaggatggaagagtgtagaaagtgtcccaaagttggtgtctgaatatatgtccaaaaagataaaagttgatgaatttgtgactcacaatctgtcttttgatgaaatcaacaaagcctttgaactgatgcattctggaaagagcattcgaactgttgtaaagatttaattcaaaagagaaaaataatgtccatcctgtcgtgatgtgataggagcagcttaacaggcagggagaagcgcctccaacctcacagcctcgtagagcttcacagctactccagaaaatagggttatgtgtgtcattcatgaatctctataatcaaggacaaggataattcagtcatgaacctgttttctggatgctcctccacataaataattgctagtttattaaggaatattttaacataataaaagtaatttctacatttgtgtggaaattgtcttgttttatgctgtcatcattgtcacggtttgtctgcccattatcttcattctgcaagggaaagggaaaggaagcagggcagtggtgggtgtctgaaacctcagaaacataacgttgaacttttaagggtctcagtccccgttgattaaagaacagatcctagccatcagtgacaaagttaatcaggacccaagtctgcttctgtgatattatcttgaagggaggtactgtgccttgttcatacctgtaccccaaattcctaggatggcatctgcccttcagggggcactaaaatgtattattgaaacagcattctgggcttaaataggtgtatgtatgtgttggttgtgactgtactatttctagtatagtgaactacatactgaatatccaagttctcagcacctacttttgtcaaatcttaacattttgccacttcgagatcacattgccattcctcccctccagaggtaacaattatccacaatttgatgtttatcattcctgtgttgttgtactttcactgtgtataacctaaaccatctactctttagtactgttttatatatttttaagcctcatacttgctcattctacagcttttttcactcattattgtataattatatctgaagctctcgttcattaattttagtcctgtgtagcagaattcaattacgggaactaccataatttatctgttctccagttgaaggcatgaagttgttgccagtttctgtattataacactgtagtggaacattcttctgcattgggctcactgcgtgttacctaagacgtatcacagaataaacacatttagccttatagacattgccaaattgctcttcaaagtaaatgtgagtttttgtgaattacatgagtatggaatggtgttttattatgactttagtttgcattttcctcaa

SEQ ID NO: 1478 - DNA, 873 bp, Rattus norvegicus
cgcagtttgaatcgcggtgcgacgaaggagtaggtggtgggatctcaccgtgggtccgattagccttttctctgccttgcttgcttgagcttcagcggaattcgaaatggctggcggtaaggctggaaaggactccggaaaggccaagacaaaggcggtttcccgctcgcagagagccggcttgcagttcccagtgggccgtattcatcgacacctaaaatctaggacgaccagtcatggacgtgtgggcgcgactgccgctgtgtacagcgcagccatcctggagtacctcaccgcagaggtacttgaactggcaggaaatgcatcaaaagacttaaaggtaaagcgtattacccctcgtcacttgcaacttgctattcgtggagatgaagaattggattctctcatcaaggctacaattgctggtggtggtgtcattccacacatccacaaatctctgattgggaagaaaggacaacagaagactgtctaaaggatgcctggattccttgttatctcaggactctaaatactctaacagctgtccagtgttggtgattccagtggactgtatctctgtgaaaaacacaattttgcctttttgtaattctatttgagcaagttggaagtttaattagctttccaaccaaccaaatttctgcattcgagtcttaaccatatttaagtgttactgtggcttcaaagaagctattgattctgaagtagtgggttttgattgagttgactgtttttaaaaaactgtttggattttaattgtgatgcagaagttatagtaacaaacatttggttttgtacagacattatttccactctggtggataagttcaataaaggtcatatcccaaactaaaa

SEQ ID NO: 1479 - protein, 128 aa, Rattus norvegicus
MAGGKAGKDSGKAKTKAVSRSQRAGLQFPVGRIHRHLKSRTTSHGRVGATAAVYSAAILEYLTAEVLELAGNASKDLKVKRITPRHLQLAIRGDEELDSLIKATIAGGGVIPHIHKSLIGKKGQQKTV

SEQ ID NO: 1480 - DNA, 803 bp, Homo sapiens
aagatgctgaaaggaaagaaggccaagggaaagaaggtggctccggcccctgctgtcgtgaagaagcaggaggctaagaaagtggtgaatcccctgtttgaggaaaggcctaagaattttggcattggacaggacatccagcccaaaagagacctcacccgctttgtgaaatggccccgctatatcaggttgcagcagcagagagccatcctctataagcggctgaaagtgcctcctgcgattaaccagttcacccaggccctggaccgccaaacagctactcagctgcttaagctggcccacaagtacagaccagagacaaagcaagagaagaaggctgttggcccaggccgagaagaaagctgctggcaaaggggacgtccccaccaagagaccacctgtcctttgagcaggagctggctgtcttcttgcctgccctatgtcgtaaaatggtggtcccttagtgcattatcaagaggaaggcaagactgggacgtctcgtccacaggaagacctgcaccactgtcgccttcacacaggtgaactcggaagacaaaggcgctttggctaagctggtggaagctatcaggaccaattacaatgacagatacgatgagatctgccgtcactggggtggcaacatcctgggtcctaagtctgtggctcgcattgccaagctcgaaaaggcaaaggctaaagaacttgccactaaactgggttaaatgtgcactgttgagttttctgtacataaaaataattaaaataatacaaattttccttcaaagaaaaaaaaaaaaaaaaaa

SEQ ID NO: 1481 - protein, 178 aa, Homo sapiens
MLKGKKAKGKKVAPAPAVVKKQEAKKVVNPLFEERPKNFGIGQDIQPKRDLTRFVKWPRYIRLQQQRAILYKRLKVPPAINQFTQALDRQTATQLLKLAHKYRPETKQEKKAVGPGREESCWQRGRPHQETTCPLSSWLSSCLPYVVKWWSLSALSRGRQDWDVSSTGRPAPLSPSHR

SEQ ID NO: 1482 - DNA, 441 bp, Rattus norvegicus
cctctctccggtccgtgcctccaagatgacaaagaaaagaaggaacaatggtcgtgccaaaaagggccgcggccacgtgcagcctattcgctgcactaactgtgcccgatgcgtgcccaaggacaaggccattaagaaattcgtcattcgaaacatagtggaggccgcagcagtcagggacatttctgaagcgagcgtcttcgatgcctatgtgcttcccaagctgtatgtgaagctacattactgtgtgagttgtgcaattcacagcaaagtagtcaggaatcgatctcgtgaagcccgcaaggaccgaacacccccaccccgatttagacctgcgggtgctgccccacgtcccccaccaaagcccatgtaaggagctgagttcttaaagactgaagacaggctattctctggagaaaaataaaatggaaattgtactta

SEQ ID NO: 1483 - DNA, 553 bp, Homo sapiens
gaaccgccatcttccagtaattcgccaaaatgacgaacacaaagggaaagaggagaggcacccgatatatgttctctaggccttttagaaaacatggagttattcctttggccacgtatatgcgaatctataagaaaggtgatattgtagacatcaagggaacgggtactgttcaaaaaggaatgccccacaagtgttaccatggcaaaactggaagagtctacaatgttacccagcatgctgttggcattgttgtaaacaaacaagttaagggcaagattcttgccaagagaattaatgtgcgtattgagcacattaagcactctaagagccgagatagcttcctgaaacgtgtgaaggaaaatgatcagaaaaagaaagaagccaaagagaaaggtacctgggttcaactaaagcgccagcctgctccacccagagcagcacactttgtgagaaccaatgggaaggagcctgagctgctggaacctattccctatgaattcatggcataggtgttaaaaaaaaaaaaaaataaaggacctctgggctacaa

SEQ ID NO: 1484 - DNA, 594 bp, Homo sapiens
atgaattttgaacccttatccttgagcactgatcaattttctaaagttactgggggtgtggaaacagtaaagcttaaactgacacaagatgaaatagaaaacttacattgccctgtctccattaaggaacttgaagaagccaaattggcagagaatgcttgtaccctggctgacctgacagagggtcaggttggcaagctactcatccgcaagtctggaagggtgcaactcctcttgggcaaggtgactctggacgtgaccatgggaactgcctgctccttcctgcaggagctggtgtccgtgggccttggagacagtaggacaggggagatgacagtcctgggacacgtgaagcacaaacttaggaagcagcagcagggaggagtggctgtgacatcacagcctgtgactctactggtgcaacaagcagtaacccctctgggcacctctagctctctctcagggccctggggccacactggtgaagcaaggcccccgaaggcgagtcccatcccctttccaccccgagaaaagcacctttccccaaagccacagccctgccaggggttctatctcctctctcaggccaaataa

SEQ ID NO: 1485 - DNA, 1390 bp, Homo sapiens
gggaagtgctgttggagccgctgtggttgctgtccgcggagtggaagcgcgtgcttttgtttgtgtccctggccatggcgctgcagctctcccgggagcagggaatcaccctgcgcgggagcgccgaaatcgtggccgagttcttctcattcggcatcaacagcattttatatcagcgtggcatatatccatctgaaacctttactcgagtgcagaaatacggactcaccttgcttgtaactactgatcttgagctcataaaatacctaaataatgtggtggaacaactgaaagattggttatacaagtgttcagttcagaaactggttgtagttatctcaaatattgaaagtggtgaggtcctggaaagatggcagtttgatattgagtgtgacaagactgcaaaagatgacagtgcacccagagaaaagtctcagaaagctatccaggatgaaatccgttcagtgatcagacagatcacagctacggtgacatttctgccactgttggaagtttcttgttcatttgatctgctgatttatacagacaaagatttggttgtacctgaaaaatgggaagagtcgggaccacagtttattaccaattctgaggaagtccgccttcgttcatttactactacaatccacaaagtaaatagcatggtggcctacaaaattcctgtcaatgactgaggatgacatgaggaaaataatgtaattgtaattttgaaatgtggttttcctgaaatcaggtcatctatagttgatatgttttatttcattggttaatttttacatggagaaaaccaaaatgatacttactgaactgtgtgtaattgttcctttatttttttggtacctatttgacttaccatggagttaacatcatgaatttattgcacattgttcaaaaggaaccaggaggtttttttgtcaacattgtgatgtatattcctttgaagatagtaactgtagatggaaaaacttgtgctataaagctagatgctttcctaaatcagatgttttggtcaagtagtttgactcagtataggtagggagatatttaagtataaaatacaacaaaggaagtctaaatattcagaatctttgttaaggtcctgaaagtaactcataatctataaacaatgaaatattgctgtatagctccttttgaccttcatttcatgtatagttttccctattgaatcagtttccaattatttgactttaatttatgtaacttgaacctatgaagcaatggatatttgtactgtttaatgttctgtgatacagaactcttaaaaatgttttttcatgtgttttataaaatcaagttttaagtgaaagtgaggaaataaagttaagtttgttttaaaaaaaaaaaaaaaaaa

SEQ ID NO: 1486 - protein, 205 aa, Homo sapiens
MALQLSREQGITLRGSAEIVAEFFSFGINSILYQRGIYPSETFTRVQKYGLTLLVTTDLELIKYLNNVVEQLKDWLYKCSVQKLVVVISNIESGEVLERWQFDIECDKTAKDDSAPREKSQKAIQDEIRSVIRQITATVTFLPLLEVSCSFDLLIYTDKDLVVPEKWEESGPQFITNSEEVRLRSFTTTIHKVNSMVAYKIPVND

SEQ ID NO: 1487 - DNA, 1142 bp, Homo sapiens
ctgggattacaggtgtgagccatcttgctcattttagtttaaacttttgagtggtttgtgtctcctgattggactcctacaaatacagaattgatgctaggaagggtaccaggagatagatgcacacagatgggatttgggagtaggtttggttatccaaggagcagtgctgagctccttgctaatgggatatgggatgctggtgatttccaggaagtgacctcacaatgactcaagctaccacatactgttgattgtgaaatgccagttgaagcatatgtcctgcgagcttaggggtgctacaagttgaccactgcagcagtaaagatgactctgaagaatggcatgggatggatcctttcgaatgcacttgagcagcggtctccaaccacagggccacagagctggagctggatctaccatgaaagacttctgaatccaggaagagagactgactgggcaacatgttattcaggtgggaccatccagttgcaggaaaacaagcttaacatgcccactgattctacattatgctcctacctcccggcagcctctccaggcccagaactttctccagtcagcctctacagaccaagctcatgactcacaatggcctatttaggcccataccctacctcacggcagtctccgcagatgagcctactgcctcacaacagcctccacaggcacagctccatcgttacaatggcctctttagacccagctcctgcctcccagccttctctctaggccctgaactttctgaagtcgacctcaccaggcccagctcatgcttctttgcagcctctccaggcccagctcctgcatcttggtggcccctccaggcccagcctctgcctcccgtcggcctctacagtcccaacatctgcctcatagcagattcttgaggcccagcatctgcctcactgtggaccccccagacccagatggtgtctcactgtggcatcctcaggcaaagctcctgcctttcggcagcctctccaggcccagctcctcctgcctcccagtggcctctttcggcccagcccagctcatgcctcccagcggccttcccaggccccgcttttgactttcggtggcctctgcaggcctcgacaaggcctggcctcctgcctcccgaa

SEQ ID NO: 1488 - protein, 114 aa, Homo sapiens
MLLPPGSLSRPRTFSSQPLQTKLMTHNGLFRPIPYLTAVSADEPTASQQPPQAQLHRYNGLFRPSSCLPAFSLGPELSEVDLTRPSSCFFAASPGPPLPPVGLYSPNICLIADS

SEQ ID NO: 1489 - DNA, 1630 bp, Homo sapiens
agggccggggtggggcgctggcgtttccgttgcttggatcagtctaggtgcagctgcggatccttcagcgtctgcatctcggcgtcgccccgcgtaccgtcgcccggctctccgccgctctcccgggggttcggggcacttgggtcccacagtctggtcctgcttcaccttcccctgacctgagtagtcgccatggcacaggttctcagaggcactgtgactgacttccctggatttgatgagcgggctgatgcagaaactcttcggaaggctatgaaaggcttgggcacagatgaggagagcatcctgactctgttgacatcccgaagtaatgctcagcgccaggaaatctctgcagcttttaagactctgtttggcagggatcttctggatgacctgaaatcagaactaactggaaaatttgaaaaattaattgtggctctgatgaaaccctctcggctttatgatgcttatgaactgaaacatgccttgaagggagctggaacaaatgaaaaagtactgacagaaattattgcttcaaggacacctgaagaactgagagccatcaaacaagtttatgaagaagaatatggctcaagcctggaagatgacgtggtgggggacacttcagggtactaccagcggatgttggtggttctccttcaggctaacagagaccctgatgctggaattgatgaagctcaagttgaacaagatgctcaggctttatttcaggctggagaacttaaatgggggacagatgaagaaaagtttatcaccatctttggaacacgaagtgtgtctcatttgagaaaggtgtttgacaagtacatgactatatcaggatttcaaattgaggaaaccattgaccgcgagacttctggcaatttagagcaactactccttgctgttgtgaaatctattcgaagtatacctgcctaccttgcagagaccctctattatgctatgaagggagctgggacagatgatcataccctcatcagagtcatggtttccaggagtgagattgatctgtttaacatcaggaaggagtttaggaagaattttgccacctctctttattccatgattaagggagatacatctggggactataagaaagctcttctgctgctctgtggagaagatgactaacgtgtcacggggaagagctccctgctgtgtgcctgcaccaccccactgccttccttcagcacctttagctgcatttgtatgccagtgcttaacacattgccttattcatactagcatgctcatgaccaacacatacacgtcatagaagaaaatagtggtgcttctttctgatctctagtggagatctctttgactgctgtagtactaaagtgtacttaatgttactaagtttaatgcctggccattttccatttatatatattttttaagaggctagagtgcttttagccttttttaaaaactccatttatattacatttgtaaccatgatactttaattagaagcttagccttgaaattgtgaactcttggaaatgttattagtgaagttcgcaactaaactaaacctgtaaaattatgatgattgtattcaaaagattaatgaaaaataaacatttctgtccccctgaattat

SEQ ID NO: 1490 - protein, 320 aa, Homo sapiens
MAQVLRGTVTDFPGFDERADAETLRKAMKGLGTDEESILTLLTSRSNAQRQEISAAFKTLFGRDLLDDLKSELTGKFEKLIVALMKPSRLYDAYELKHALKGAGTNEKVLTEIIASRTPEELRAIKQVYEEEYGSSLEDDVVGDTSGYYQRMLVVLLQANRDPDAGIDEAQVEQDAQALFQAGELKWGTDEEKFITIFGTRSVSHLRKVFDKYMTISGFQIEETIDRETSGNLEQLLLAVVKSIRSIPAYLAETLYYAMKGAGTDDHTLIRVMVSRSEIDLFNIRKEFRKNFATSLYSMIKGDTSGDYKKALLLLCGEDD

SEQ ID NO: 1491 - DNA, 3558 bp, Homo sapiens
cataacaagccaaacgccagaccgagagtgcctccgtgcgcgagtgcccggtgtgtgcgcgccggcgagagcaggggcccgcccggctccccgcccgccgcggcccgaactcatgcagctccgagcgagcgagcggcgcccagcccagcgcctcggccgaacccctccgcagcaggctgcctgctgtttcccggggagatcatgaaacgaggtcgccttcccagcagcagtgaggattctgacgacaatggcagcctgtcaactacttggtcccagaattcccgatcccagcataggagaagctcctgctccagacatgaagatcgaaagccttcagaggtgtttaggacagacctgatcactgccatgaagttgcatgactcctaccagctgaatccggatgagtactatgtgttggcagatccctggagacaggaatgggagaaaggggtccaggtgcctgtgagcccggggaccatccctcagcctgtggccagggttgtgtctgaagagaaatccctcatgttcatcaggcccaagaagtacatcgtgtcatcaggctctgagcctcccgagttgggctatgtggacatccggacgctggctgacagcgtgtgtcgctatgacctcaatgacatggatgctgcatggctggaactgaccaatgaagaatttaaggagatgggaatgcctgaactagatgaatacaccatggagagggtcctagaggaatttgagcagcgatgctacgacaatatgaatcatgccatagagactgaggaaggcctggggatcgaatatgatgaagatgttgtctgtgatgtctgccagtctcctgatggtgaggacggcaatgagatggtgttctgtgacaaatgcaacatctgtgtgcaccaggcctgttatggaatcctcaaggtaccagagggcagctggctgtgccggacatgtgccctgggggttcagccaaaatgtctgctgtgtccgaagaagggtggagctatgaagcccacccgtagcggaaccaagtgggtccacgttagctgtgctctgtggatccctgaggtgagcattggcagcccagagaagatggagcccatcaccaaggtgtcacacattcccagcagccggtgggcgctagtgtgcagcctctgcaatgagaagtttggggcctctatacagtgctctgtgaagaactgccgcacagccttccatgtgacctgtgcttttgaccggggcctggagatgaagaccatcttagcagagaatgatgaagtcaagttcaagtcctattgcccaaagcacagctcacataggaaacccgaggagagtcttggcaagggggctgcacaggagaatggggcccctgagtgttccccccggaatccgctggagccctttgccagccttgagcagaaccgggaggaggcccaccgggtgagtgtccgtaagcagaagctgcagcagttggaggatgagttctacaccttcgtcaacctgctggatgttgccagggctctgcggctgcctgaggaagtagtggatttcctgtaccagtactggaagttgaagaggaaggtcaacttcaacaagcccctgatcaccccaaagaaagatgaagaggacaatctagccaagcgggagcaggatgtcttatttaggaggctgcagctgttcacgcacctgcggcaggacctggagagggtaatgattgacactgacaccttatagtgacttagagaagaagatgcaaagaggcgaacgctcgcccagagcaagaaatgatagccagtcatatactctcagacccttgtacacaccacagcatgaggttgtgttggttaaaaatatttatgggctggtaaactcattgtacatatgtgcaaaactgctactgagtggggagcttctttgtggttttttttttttaaaaacactttcccattaatctttactgttttgtaagatcaaatggggtgtgtcttccccacccccattccttcattctagagctagagtgaatgagccccaagaaaatgacccaaggagttgactcaggatggtttacagactgatttagaaaaccagaacggatttcatttctaatggagggggccagagatgggaaaatttcttgttcagtccggggaaacacacctaggtgctggtgatgggcttatgaaggaagctaagcacggctgctcactggcccccactttgtttcttgggtaattcacaggggaattcccagtactgtcatggagcagagcaggcagtgggtgctgatgtgtgtgcatgagctgtatgtacacatgcatatatctgttacagaagatactcctggcagtgaggtgctaagtcatcactgaggctgtgtgtgtgtgtgtgtgtgcgcgtgcccgtgtccatccatgtctctgttgtgtgtctgtgtgcgggtatgggtgggattcctggtggacaggggtgtcagatctgtctgaggagccccagtcatgctcagcacgctacagatgtgttgtttgtcacactgagattgctgaatgtcgtggctgttggctgccgagcctcagctgctggcatttccttctgctgtttgctgcttttgtgcctcccccactttccatcacctctggagtcccgtctggacgtcccttcctgctacaggaataatgaggcgtgggctgcctcccgctagggcctcctgctccctgtaggtagtttctggctgaggcttgctaattggggatgcttcttagagcatcttccacatcaactcccctggctgctggctaccgattaaattcattagtgtgaaagaggtgggagtgaggttttctggcctgaagcagtctgcactgaaaggtacccaagtggcctgaaacagtgtagggaaagacctgggaaacactggaccaaaaaagcctgatctcatggagacctgcatggccctgttagagatggcgtagaagtgaaagtcttaaagggagcattagagatccttttaatacacgactgagtgccagcttatttgtgatgccccttcccagaccaggttaggattcctgggaaggccgcggattccggccctggaagaggcaggatcctggagcagttttgtgaggcttttgtgctcccatacgccccctggtggtgagtgtaaagaagactttgcctctcacaactacatgtatgtgtggcatttttgttagagatgagaaaaggattgagaaggataaactggaatcctggtaagaagcctttatgccagcccgacacctgctgtaattggggtgcatgagctatggagtcagatagttgttgggagggggaggacaagaagtctattgtttggactgtgtttgtctcacaatcaccacaaaataaaagtgtagaaaatgcttgtggtgtactaactcttttctgtacttaagttactcagattaacatgcacttctaattctaaacattttttttggagtcatcactgtcgctgtttaagtagaacaatgccaacgatgtatgagaaacagggaataaatcaggatttgtgtgtgt

SEQ ID NO: 1492 - protein, 509 aa, Homo sapiens
MKRGRLPSSSEDSDDNGSLSTTWSQNSRSQHRRSSCSRHEDRKPSEVFRTDLITAMKLHDSYQLNPDEYYVLADPWRQEWEKGVQVPVSPGTIPQPVARVVSEEKSLMFIRPKKYIVSSGSEPPELGYVDIRTLADSVCRYDLNDMDAAWLELTNEEFKEMGMPELDEYTMERVLEEFEQRCYDNMNHAIETEEGLGIEYDEDVVCDVCQSPDGEDGNEMVFCDKCNICVHQACYGILKVPEGSWLCRTCALGVQPKCLLCPKKGGAMKPTRSGTKWVHVSCALWIPEVSIGSPEKMEPITKVSHIPSSRWALVCSLCNEKFGASIQCSVKNCRTAFHVTCAFDRGLEMKTILAENDEVKFKSYCPKHSSHRKPEESLGKGAAQENGAPECSPRNPLEPFASLEQNREEAHRVSVRKQKLQQLEDEFYTFVNLLDVARALRLPEEVVDFLYQYWKLKRKVNFNKPLITPKKDEEDNLAKREQDVLFRRLQLFTHLRQDLERVMIDTDTL

SEQ ID NO: 1493 - DNA, 2986 bp, Homo sapiens
gtgagtgtgtgtcggtcgcacggcgtgtgtctccggccgcgggttccgcctcctcccctgccgccgctgctcacggtgtaagtcaatgtgaagcagcagctccagccccgggataaacatggcgacgtctctgcatgagggacccacgaaccagctggatctgctcattcgggccgtggaagcatcagttcacagcagtaatgcacactgtacagataagacaattgaagctgctgaagccctgcttcatatggaatctcctacctgcttgagggattcaagaagtcctgtggaagtgtttgttcctccttgtgtatcaactccagaattcatccatgctgctatgaggccagatgtcattacagaaactgtagtggaggtgtcaactgaagagtctgaacccatggatacctctcctattccaacatcaccagatagccatgaaccaatgaaaaagaaaaaagttggccgtaaaccaaagacccagcaatcaccaatttccaatgggtctcctgagttaggtataaagaagaaaccaagagaaggaaaaggaaacacaacctatttgtgggagtttcttttagatctacttcaagataaaaatacttgtcccaggtatattaaatggactcagagagaaaaaggcatattcaagctggtggattcaaaggctgtctctaagctttggggaaagcataagaacaaaccagacatgaactatgaaaccatgggacgagctttgagatactactaccaaaggggaattcttgcaaaggttgaaggacagaggcttgtatatcagttcaaggatatgccgaaaaacatagtggtcatagatgatgacaaaagtgaaacctgtaatgaagatttagcaggaactactgatgaaaaatcattagaacgagtgtcactgtctgcagaaagtctcctgaaagcagcatcctctgttcgcagtggaaaaaattcatcccctataaactgctccagagcagagaagggtgtagctagagttgtgaatatcacttcccctgggcacgatgcttcatccaggtctcctactaccactgcatctgtgtcagcaacagcagctccaaggacagttcgtgtggcaatgcaggtacctgttgtaatgacatcattgggtcagaaaatttcaactgtggcagttcagtcagttaatgcaggtgcaccattaataaccagcactagtccaacaacagcgacctctccaaaggtagtcattcagacaatccctactgtgatgccagcttctactgaaaatggagacaaaatcaccatgcagcctgccaaaattattaccatcccagctacacagcttgcacagtgtcaactgcagacaaagtcaaatctgactggatcaggaagcattaacattgttggaaccccattggctgtgagagcacttacccctgtttcaatagcccatggtacacctgtaatgagactatcaatgcctactcagcaggcatctggccagactcctcctcgagttatcagtgcagtcataaaggggccagaggttaaatcggaagcagtggcaaaaaagcaagaacatgatgtgaaaactttgcagctagtagaagaaaaaccagcagatggaaataagacagtgacccacgtagtggttgtcagtgcgccttcagctattgcccttcctgtaactatgaaaacagaaggactagtgacatgtgagaaataaaatagcagctccaccatggacttcaggctgttagtggcagtactgacataaacatttgcaagggaagtcatcaagaaaagtcaaagaagactttaaaacatttttaatgcatatacaaaaacaatcagacttactggaaataaattacctatcccatgtttcagtgggaaatgaactacatattgagatgctgacagaaaactgcctcttacagtaggaaacaactgaacccatcaataagaaaaaggatcgaaagggaccaagcagctcactacgatatcaagttacactaagacttggaacactaacattctgtaagaggttatatagttttcagtgggaggggttgggatgggtaatctcattgttacatatagcaatttttgatgcattttatatgcataccagcaattattactgtgttcgcacagttctcacttaactggtgctatgtgaagactctgctaatataggtattttagaatgtgaattgaagaatggatcccaaaaacttcagaaagaggatagcaaaaaaagatctagtgcgattttatatatatatatatatatatatacatacatatatatatatcatatagcttaagctgatttaaaacaaaggccttagactaattttcgattttctttcttgaaataagctaatggcttgtttgtgtaaagcttttttattaaaagaaaaattttaaaaatcttgtacctagcacagtattgttatagaatatacatgtaacattttatatggtagtttaagtctgtcagtttcttaattgtggacaaattaacagttggctctggccttttgctgtaacatgcctgtgtcactcacttagccttggcatttgtgcagacataccattttcagttctgctgtcacttggaagttcaggctcagcatgaatttttggcaggtagctctaatacctggagttttctttgtttttttttcttttttttagttgaagtttatgagggaaataccagtgttcagttttgaactataatagtttgtatattcaacatttgaagtatattctattttgttgtactcttgtttcaaagtgtattcaagtaggttttctgaaatatagaaatgaaatttatcttctgttttggtctctggtgatattttaaacaatatttaaaagtcagtatagaagtgttttagttaggaagtgataaaacatctctcttctccttcccaactactgcatgaagaaattctacttccattatattaatatttgg

SEQ ID NO: 1494 - DNA, 724 bp, Homo sapiens
gcacgagggacttctgttccagagcaaaggtcattcagccgcttgaatcagccttttccccccacccggtccccaactttgtttacccgataaggaaggtcagcattcaaagtcaagaagcgccatttatcttcccgtgcgctctacaaatagttccgtgagaaagatggccgggaactcgatcctgctggctgctgtctctattctctcggcctgtcagcaaagttattttgctttgcaagttggaaaggcaagattaaaatacaaagttacgcccccagcagtcactgggtcaccagagtttgagagagtatttcgggcacaacaaaactgtgtggagttttatcctatattcataattacattgtggatggctgggtggtatttcaaccaagtttttgctacttgtctgggtctggtgtacatatatggccgtcacctatacttctggggatattcagaagctgctaaaaaacggatcaccggtttccgactgagtctggggattttggccttgttgaccctcctaggtgccctgggaattgcaaacagctttctggatgaatatctggacctcaatattgccaagaaactgaggcggcaattctaactttttctcttccctttaatgcttgcagaagctgttcccaccatgaaggtaatatggtatcatttgttaaataaaaataaagtctttattctgttaaaaaaaaaaaaaaaaaaa

SEQ ID NO: 1495 - protein, 147 aa, Homo sapiens
MAGNSILLAAVSILSACQQSYFALQVGKARLKYKVTPPAVTGSPEFERVFRAQQNCVEFYPIFIITLWMAGWYFNQVFATCLGLVYIYGRHLYFWGYSEAAKKRITGFRLSLGILALLTLLGALGIANSFLDEYLDLNIAKKLRRQF

SEQ ID NO: 1496 - DNA, 539 bp, Homo sapiens
cgccgagctccagccgaaggagaaggggggtaagtaaggaggtctctgtaccatggctcgtacaaagcagactgcccgcaaatcgaccggtggtaaagcacccaggaagcaactggctacaaaagccgctcgcaagagtgcgccctctactggaggggtgaagaaacctcatcgttacaggcctggtactgtggcgctccgtgaaattagacgttatcagaagtccactgaacttctggttcgcaaacttcccttccagcgtctggtgcgagaaattgctcaggactttaaaacagatctgcgcttccagagcgcagctatcggtgctttgcaggaggcaagtgaggcctatctggttggcctttttgaagacaccaacctgtgtgctatccatgccaaacgtgtaacaattatgccaaaagacatccagctagcacacagcatacgtggagaacgtgcttaagaatccactatgatgggaaacatttcattctcccatggggtcaaaaggtacctaagtatatgattgcgagtggaaa

SEQ ID NO: 1497 - DNA, 960 bp, Homo sapiens
atgaagaaaggaaagctcatctctgccacatttctggaaagcgctgttcccggtgctcacctattgtctcgcaggcaggtttctgaaaggatggaggaaatctgcaggaagcacatgtttctgcttaattcctgccagcttttggctgtcagaccccaaatccttcagccactagcctgttcagggccctggtttgataaccctgcaattgcagagtggagtgggaggagaagcctcatacctttgtttttctggttcttcccaacaccctggtggcctacttgggtgtcccacaagctctctgtggaaaatagtgcatctcatttagcaacaactccacctagcacaagttctgagctatacttaaaccagtggggagagagtgttggaatgattaaggcttgcattcgactgtgcaagaagaaccattttctcttcatggtgctggaggcagagattgaggctctcaaggaggagctgctcttcatgaagaagaaccacgaagaggaagtaaaaggcctacaagcccagagtgccagctctggtttgaccctggaggagctggacaagtattggtctcagcagattgaggagagcgccacagtggtcaccacgcagcctgccaaggttggagctgctgagatgatgctcacagagctgagacatacagtccagtctttggagatcgacctggactccttgagaaatctgaaggccagcttggagaacagcctgaatggagcagctcaacggcatcctgctgcacccggagtcagagctggcacagacccagagggacagtgccaggcccaggagtacgaggccctgctgaacatcaaggtcaagctggaggctgagatcaccacctactgccgcctgctggaagatgacgaggacttcaatcttgtggatggcaaagtggtgtctgagaccaatgataccaaagttctgagacattaa

SEQ ID NO: 1498 - protein, 319 aa, Homo sapiens [sequence omitted]

SEQ ID NO: 1499 - DNA, 918 bp, Homo sapiens
aaaacaccaaatggcggatgacgccggtgcagcgggagggcccggaggccctggtggccctgggatggggaaccgcggtggcttccgcggaggtttcggcagtggcatccggggccggggtcgcggaggcaaggccgaggataaggagtggatgcccgtcaccaagttgggccgcttggtcaaggacatgaagatcaagtccctggaggagatctatctcttctctctgcccattaaggaatcagagatcattgactttttcctgggggcctctctcaaggatgaggttttgaagattatgccagtgcagaagcagacccgtgccggccagcgcacgaggttcaaggcattcgttgctatcggggactacaatggccacgtcggtctgggtgttaagtgctccaaggaggtggccaccgccatctgtggggccatcatcctggccaagctctccattgtccccgtgcacagaggctactgggggaacaagatcggcaagccccacaccgtcccttgcaaggtgacaggccgctgcggctctgtgctggtgcacctcatccctgcacccaggggcactggcatcgtctccgcacctgtgcctaagaagctgctcatgatggctggtatcgatgactgctacaccccagcccagggctgcactgccaccctgggcaacttcgccaaggccacctttgatgccatttctaagacctacagctatctgacccctgacctctggaaagagactgtatttaccaagtctccctatcaggacttcactgaccacctagtcaagacccacaccagagtctccatgcagcggactcaggctccagctgtggctacaacgtagggtttttatacaagaaaaataaagtgaattaagcgtgtcaaaaaaaaaaaaaaaaaaaaaaaaaa

SEQ ID NO: 1500 - DNA, 3519 bp, Homo sapiens
tgagaacacgctgtgtggctgaaaagtgaaggcaagagctgatttggcctctgtgctcccctccgcaaggggatcgttttctccagaagagctggatattctttcgcccagttatggcagacaagttaacgagaattgctattgtcaaccatgacaaatgtaaacctaagaaatgtcgacaggaatgcaaaaagagttgtcctgtagttcgaatgggaaaattatgcatagaggttacaccccagagcaaaatagcatggatttccgaaactctttgtattggttgtggtatctgtattaagaaatgcccctttggcgccttatcaattgtcaatctaccaagcaacttggaaaaagaaaccacacatcgatattgtgccaatgccttcaaacttcacaggttgcctatccctcgtccaggtgaagttttgggattagttggaactaatggtattggaaagtcaactgctttaaaaattttagcaggaaaacaaaagccaaaccttggaaagtacgatgatcctcctgactggcaggagattttgacttatttccgtggatctgaattacaaaattactttacaaagattctagaagatgacctaaaagccatcatcaaacctcaatatgtagaccagattcctaaggctgcaaaggggacagtgggatctattttggaccgaaaagatgaaacaaagacacaggcaattgtatgtcagcagcttgatttaacccacctaaaagaacgaaatgttgaagatctttcaggaggagagttgcagagatttgcttgtgctgtcgtttgcatacagaaagctgatattttcatgtttgatgagccttctagttacctagatgtcaagcagcgtttaaaggctgctattactatacgatctctaataaatccagatagatatatcattgtggtggaacatgatctaagtgtattagactatctctccgacttcatctgctgtttatatggtgtaccaagcgcctatggagttgtcactatgccttttagtgtaagagaaggcataaacatttttttggatggctatgttccaacagaaaacttgagattcagagatgcatcacttgtttttaaagtggctgagacagcaaatgaagaagaagttaaaaagatgtgtatgtataaatatccaggaatgaagaaaaaaatgggagaatttgagctagcaattgtagctggagagtttacagattctgaaattatggtgatgctgggggaaaatggaacgggtaaaacgacatttatcagaatgcttgctggaagacttaaacctgatgaaggaggagaagtaccagttctaaatgtcagttataagccacagaaaattagtcccaaatcaactggaagtgttcgccagttactacatgaaaagataagagatgcttatactcacccacaatttgtgaccgatgtaatgaagcctctgcaaattgaaaacatcattgatcaagaggtgcagacattatctggtggtgaactacagcgagtagctttagccctttgcttgggcaaacctgctgatgtctatttaattgatgaaccatctgcatatttggattctgagcaaagactgatggcagctcgagttgtcaaacgtttcatactccatgcaaaaaagacagcctttgttgtggaacatgacttcatcatggccacctatctagcggatcgcgtcatcgtttttgatggtgttccatctaagaacacagttgcaaacagtcctcaaacccttttggctggcatgaataaatttttgtctcagcttgaaattacattcagaagagatccaaacaactataggccacgaataaacaaacttaattcaattaaggatgtagaacaaaagaagagtggaaactactttttcttggatgattagactgactctgagaatattgataagccatttattaaaaggagtatttactagaattttttgtcatataaaacttgaatcaggattttatgccccacatactctggaacttgaagtataatatacttaatataacataaaaagccagttgggttctaaattgtagttgaaacacagaaaatgccacttttctgttcctgaagaggctcttttgtgcataatattctaaaatgaagacatttcaagctatacaaattacttccaagttttcatgatgtatgggaagattttcagtaggtgtattatattcacggtaccaaatgctgaccagtgttgctccattttttaaatcttgaaaagggtttctgtacttacctggtttgccaagtatgccagtgtaatgaaactgcccttattttaaaagccagtcaaagattccactgattgacatttgataaataaacatcaggattatgtttattgtttgttttcagtctttgcactatattaccagtatatggtttccgaggaagattatctactgcaaaacaccactgttggaaaaataggtatttttaaattgtttttaatcttttttggtgcttttaaacatgtttagcaaaaaccaattcagttccattccccgcaaaaaacccctaactttactctgaactttttttgtttttgcattccatgaggttctgtattcagtcattctctaggtaatgtcatttttgtacacatatatttatataatcactgattgagatttaggaaaaagcatttctaaagaatatttgcttcccttagaactacagactcgaaatctttaaagatggtgcctaagcatctatgtattttttttaagttccacagatttttctgttgggcagccaaggattataaaccacttccctaaaggcaacattaatgcaaaagtccccagatggcaatacaaagtatcccctggtaccacatatattcatttgtgagtttggatatagagcacattatctaaaccattttgtagttccaaaaacccatctaaatttcttgagttcctgaattttgaacaggattacctggagcctggagccactttaagttgtacttctgactaaactggaattatgagtgaggaagagtgtttactaaataaatgactggggcaagcaaaattgaggaggaaattagaaactgtttgacaaactttaagagctacttgaaataacagaagtcttgattaatatgcaaataatggctagaaagtatggtttaactggaccctattatgccttttaaaaataatttcagtaacccataaatacatgttgtaaaaaattcaaatatacagaatggaataaaaaaatgatctccctttattaccctcccaaaggttaccagcgtttgaatttaataatgtatattctttcatgcttttttctgtgcacttacctaagtgtgaatatgtaaagggtttgttttgtatacaaatgggattatactaaaataagtaatgcctatttttaaggataggttaaatttgtgaatgatcatttcaaatatattgaataaaataagcaaaagctattgttatttactgatcctg

SEQ ID NO: 1501 - protein, 599 aa, Homo sapiens
MADKLTRIAIVNHDKCKPKKCRQECKKSCPVVRMGKLCIEVTPQSKIAWISETLCIGCGICIKKCPFGALSIVNLPSNLEKETTHRYCANAFKLHRLPIPRPGEVLGLVGTNGIGKSTALKILAGKQKPNLGKYDDPPDWQEILTYFRGSELQNYFTKILEDDLKAIIKPQYVDQIPKAAKGTVGSILDRKDETKTQAIVCQQLDLTHLKERNVEDLSGGELQRFACAVVCIQKADIFMFDEPSSYLDVKQRLKAAITIRSLINPDRYIIVVEHDLSVLDYLSDFICCLYGVPSAYGVVTMPFSVREGINIFLDGYVPTENLRFRDASLVFKVAETANEEEVKKMCMYKYPGMKKKMGEFELAIVAGEFTDSEIMVMLGENGTGKTTFIRMLAGRLKPDEGGEVPVLNVSYKPQKISPKSTGSVRQLLHEKIRDAYTHPQFVTDVMKPLQIENIIDQEVQTLSGGELQRVALALCLGKPADVYLIDEPSAYLDSEQRLMAARVVKRFILHAKKTAFVVEHDFIMATYLADRVIVFDGVPSKNTVANSPQTLLAGMNKFLSQLEITFRRDPNNYRPRINKLNSIKDVEQKKSGNYFFLDD

SEQ ID NO: 1502 - DNA, 1806 bp, Homo sapiens
aggaaatgaggctgaactttgtagtgccctcgctaaccttcagaccagtaaaccagatgctgtagagcagacatgtatattggaatctacagaaattgctttgcttaacaacatcccatatcatgaaggctttaaaatggcaatgagcaaagttttgtcttcactgactccagagaaactgtatcagaccatggatactcactgtcagaatgagatgagctctggaactggacagagtaatactgtacagaacatccttgaacctttctacgtgttagatgtgtccgaaggcttctctgttctgcctgttattgctggcacacttgggcaggttaaaccatacagttctgtggagaaagaccagcatcgtattgctctggacctcatatctgaagccaatcactttcctaaagaaacacttgagttttggctgagacatgtggaggatgaatctgctatgttacaaaggccaaaatcagacaagttatggagcataattatattggatgtcattgagccatctgggctcattcagcaggaaataatggaaaaagctgcaatatccaggtgtttactacaatctggaggcaagatctttcctcagtatgtgctgatgtttgggttgcttgtggaatcacagacactcctagaggagaatgctgttcaaggaacagaacgtactcttggattaaatatagcaccttttattaaccagtttcaggtacctatacgtgtatttttggacctatcctcattgccctgtatacctttaagcaagccagtggaactcttaagactagatttaatgactccgtatttgaacacctctaacagagaagtaaaggtatacgtttgtaaatctggaagactgactgctattccattttggtatcatatgtaccttgatgaagagattaggttggatacttcaagtgaagcctcccactggaaacaagctgcagttgttttagataatcccatccaggttgaaatgggagaggaacttgtactcagcattcagcatcacaaaagcaatgtcagcatcacagtaaagcaatgaagagcagttttccaatgaaaactgtgtaaatagagcatcaacaagtacaaaattcttgtcttaattagtgggggtatataaaaattccttgtaatggtcaaatattttttaaaattgacattaataaagcatattttaaaagattctaaataaaagggtagcattattatagaaatactgctgcagatttgctttctggaaaaggatacatcactagttttttaaattaggaaacttcttttgctcgattttacagaatagggattttaaaagtcttatcgttattgacatgtgtaagtaaagcaaaactttacttttgtaggcatcttggccttttttcttaaatccaaacttgtaattgggaaacactgaaaggcttccactgaagactgagggttatggttacctgtaaattccaatcttgcttcctttaaatactcagtgtacatctgaaacatctcaggttttgttttgagaatgcaagcttgaaaaagaatttaagctataagctaaatgtaattaaaacagtaaaggagttagggaatacatcttcaggaggcagcatttttcttggtctactttggcaaaagaacatttaaaagctggtaacaaaacaaagttaaattgaaggaagacttaatcctatactatttttcaaagttttgatttggatgtacaataagtacattaattgatccaatttttacaaacttttgaaataaaggaagatcattattatgcctcct

SEQ ID NO: 1503 - protein, 307 aa, Homo sapiens
MAMSKVLSSLTPEKLYQTMDTHCQNEMSSGTGQSNTVQNILEPFYVLDVSEGFSVLPVIAGTLGQVKPYSSVEKDQHRIALDLISEANHFPKETLEFWLRHVEDESAMLQRPKSDKLWSIIILDVIEPSGLIQQEIMEKAAISRCLLQSGGKIFPQYVLMFGLLVESQTLLEENAVQGTERTLGLNIAPFINQFQVPIRVFLDLSSLPCIPLSKPVELLRLDLMTPYLNTSNREVKVYVCKSGRLTAIPFWYHMYLDEEIRLDTSSEASHWKQAAVVLDNPIQVEMGEELVLSIQHHKSNVSITVKQ

SEQ ID NO: 1504 - DNA, 2618 bp, Homo sapiens
agatgcaacgcaagcaacgacttcgtcacactaaaacggattttgtgagggccaaaagtataaattacgaagcagaaatgattatcaaacaacttccagcggtttgcacctaaagaaacacaaggagaacccactacaaacaaacaaacccagtccaaacaacgcctccagtaggaaaagaggaaaactgcgataacacgaccccccgagaagagacgagaccaacacgctgagactgtggggcgtcagcaaacctccaagtgcacggcggactgagttgtacttcgcagctctctggacattaattacctcctgcaccttccatttgggggagggtgaggaagaaggcactcacctacactgagcgaagaagtcctatcagcgtggaagagaagtttaagaatgaaccactgaatgtttcgcttttatttttaaatttactttggcacttaaaaaacctcatttccagatttctggacaatctcggctgcagacatctaagcctaaccttttggtatcctgagttttttccctctccttctccttcctcacgcccaccccgcttctctcgcacacggtcatctttacatatcaagagaaagcaaaaaggttccaagaggtacttttctttttagaaaatcaccttttctcccctaattcttctgcagaagaaaagaggtttcgaaagagggaaaaggaaaaaacaagccggctacggtatcagccggtcagcccaggtggaaaacgagagtgaaagtagggcttaacggggagcgcaccgcctctttcgaaagccgctgggccaccaccagtgcgtgagccttggatccctcaacgtattgcgagacgccggtgtatagcccggacctgtgccccaacatgatcgccgctcaggccaagctggtttaccagctcaataagtactacactgagcgctgtcaggcgcgcaaggcggccatcgccaaaaccatccgagaggtctgtaaggtggtctcggacgtgctcaaggaagtggaggtgcaggagcctcgcttcatcagctccttgagcgagatcgatgcccgctacgaggggctcgaggtcatttcgcccaccgaatttgaggtggtgctctacctaaaccagatgggcgtcttcaacttcgtggacgacggctcgctgcccggctgcgcagtgctcaaactgagcgatgggcggaagcggagcatgtctctctgggtcgagttcatcacggcgtcgggctatctctcagcgcgtaagatccgctcgcgtttccagacgctggtggcccaggcggtggacaagtgcagctatcgggatgtggtcaagatgatcgcggacaccagcgaggtcaagttgcgcatcagggagcgctatgtggtgcaaatcactccggcgttcaagtgcaccgggatctggcctcgcagcgcggcacagtggcctatgccccacatcccttggcccggccccaatcgggtggccgaggtcaaggccgaagggttcaacttgctctcgaaggagtgctactcgctgaccggcaagcagagctcggcagagagcgacgcctgggtgctacagttcggggaggcggagaaccgcctgctgatgggcggctgccgaaacaagtgcctctcagtgctgaagactctgcgggaccgccacctggagctacccggccagccgctcaacaactaccacatgaagacgctgctgctgtacgagtgcgagaaacacccacgagaaacggactgggacgagtcgtgcctgggcgaccggctcaacggcatcctgctgcagctcatctcctgcctgcagtgccgccgctgccctcactactttctgcccaacctcgacctctttcagggcaagccccattcggccctggagagcgctgccaagcagacctggaggttggccagggaaattctcaccaatcccaaaagcctggacaaactatagggtgctggggactgcttgaaaagcgacacaaacgggcgtgctctctcagacacacaactcagctataaacagcagaaactctggacacaaacttttatgtaagtcacctgaaataggaatccggcagaagaccttcattaattaagaagcaaacaaaaagagagcaacccaaccaaaacaaatcacattcttgcacaaaagtgatcgttttcttccaaacaatgtgaatttaaaaggtcacacaaaagaagcaatcgggctccgccaccacaaaatgaaacccaaggtacattttcaaatcaatgtatagtagttccccccccttttccttctttccccctatcctttttctctccaccccatcccccccccatttcgttttgcttttggttgcctgaatgttgtcaccaagtgaaaaaattatttaactatatgtaaaatttctcttttaaaaaaaagttttactgatgttaaacgttctcagtgccaatgtcagactgtgctcctccctctcctgaacctctaccctcaccctgagctgtcttgttgaaaacagtaataaaaacattactttacattgtaaaaaaaaaaaaaaaaaaaaaaaaaaaaaaaaaaaaaaaaaaaaaaaaaaaaaaaaaaaaaaaaaaaaaaaaaaaaaa

SEQ ID NO: 1505 - protein, 359 aa, Homo sapiens
MIAAQAKLVYQLNKYYTERCQARKAAIAKTIREVCKVVSDVLKEVEVQEPRFISSLSEIDARYEGLEVISPTEFEVVLYLNQMGVFNFVDDGSLPGCAVLKLSDGRKRSMSLWVEFITASGYLSARKIRSRFQTLVAQAVDKCSYRDVVKMIADTSEVKLRIRERYVVQITPAFKCTGIWPRSAAQWPMPHIPWPGPNRVAEVKAEGFNLLSKECYSLTGKQSSAESDAWVLQFGEAENRLLMGGCRNKCLSVLKTLRDRHLELPGQPLNNYHMKTLLLYECEKHPRETDWDESCLGDRLNGILLQLISCLQCRRCPHYFLPNLDLFQGKPHSALESAAKQTWRLAREILTNPKSLDKL

SEQ ID NO: 1506 - DNA, 921 bp, Homo sapiens
cgcgactcccacttccgcccttttggctctctgaccagcaccatggcggttggcaagaacaagcgccttacgaaaggcggcaaaaagggagccaagaagaaagtggttgatccattttctaagaaagattggtatgatgtgaaagcacctgctatgttcaatataagaaatattggaaagacgctcgtcaccaggacccaaggaaccaaaattgcatctgatggtctcaagggtcgtgtgtttgaagtgagtcttgctgatttgcagaatgatgaagttgcatttagaaaattcaagctgattactgaagatgttcagggtaaaaactgcctgactaacttccatggcatggatcttacccgtgacaaaatgtgttccatggtcaaaaaatggcagacaatgattgaagctcacgttgatgtcaagactaccgatggttacttgcttcgtctgttctgtgttggttttactaaaaaacgcaacaatcagatacggaagacctcttatgctcagcaccaacaggtccgccaaatccggaagaagatgatggaaatcatgacccgagaggtgcagacaaatgacttgaaagaagtggtcaataaattgattccagacagcattggaaaagacatagaaaaggcttgccaatctatttatcctctccatgatgtcttcgttagaaaagtaaaaatgctgaagaagcccaagtttgaattgggaaagctcatggagcttcatggtgaaggcagtagttctggaaaagccactggggacgagacaggtgctaaagttgaacgagctgatggatatgaaccaccagtccaagaatctgtttaaagttcagacttcaaatagtggcaaataaaaagtgctatttgtgatggtttgcttctgaaaaaaaaaaaaaaaaaaaaaaaaaaa

SEQ ID NO: 1507 - protein, 264 aa, Homo sapiens [sequence omitted]

SEQ ID NO: 1508 - DNA, 1918 bp, Homo sapiens
aagtctacatgaaaaggatggtttcttggagcttccacaaacttaaaaccatgaaacatctattattgctactattgtgtgtttttctagttaagtcccaaggtgtcaacgacaatgaggagggtttcttcagtgcccgtggtcatcgaccccttgacaagaagagagaagaggctcccagcctgaggcctgccccaccgcccatcagtggaggtggctatcgggctcgtccagccaaagcagctgccactcaaaagaaagtagaaagaaaagcccctgatgctggaggctgtcttcacgctgacccagacctgggggtgttgtgtcctacaggatgtcagttgcaagaggctttgctacaacaggaaaggccaatcagaaatagtgttgatgagttaaataacaatgtggaagctgtttcccagacctcctcttcttcctttcagtacatgtatttgctgaaagacctgtggcaaaagaggcagaagcaagtaaaagataatgaaaatgtagtcaatgagtactcctcagaactggaaaagcaccaattatatatagatgagactgtgaatagcaatatcgcaactaaccttcgtgtgcttcgttcaatcctagaaaacctgagaagcaaaatacaaaagttagaatctgatgtctcagctcaaatggaatattgtcgcaccccatgcactgtcagttgcaatattcctgtggtgtctggcaaagaatgtgaggaaattatcaggaaaggaggtgaaacatctgaaatgtatctcattcaacctgacagttctgtcaaaccgtatagagtatactgtgacatgaatacagaaaatggaggatggacagtgattcagaaccgtcaagacggtagtgttgactttggcaggaaatgggatccatataaacagggatttggaaatgttgcaaccaacacagatgggaagaattactgtggcctaccaggtgaatattggcttggaaatgataaaattagccagcttaccaggatgggacccacagaacttttgatagaaatggaggactggaaaggagacaaagtaaaggctcactatggaggattcactgtacagaatgaagccaacaaataccagatctcagtgaacaaatacagaggaacagccggtaatgccctcatggatggagcatctcagctgatgggagaaaacaggaccatgaccattcacaacggcatgttcttcagcacgtatgacagagacaatgacggctggttaacatcagatcccagaaaacagtgttctaaagaagacggtggtggatggtggtataatagatgtcatgcagccaatccaaacggcagatactactggggtggacagtacacctgggacatggcaaagcatggcacagatgatggtgtagtatggatgaattggaaggggtcatggtactcaatgaggaagatgagtatgaagatcaggcccttcttcccacagcaatagtccccaatacgtagatttttgctcttctgtatgtgacaacatttttgtacattatgttattggaattttctttcatacattatattcctctaaaactctcaagcagacgtgagtgtgactttttgaaaaaagtataggataaattacattaaaatagcacatgattttcttttgttttcttcatttctcttgctcaccaagaagtaacaaaagtatagttttgacagagttggtgttcataatttcagttctagttgattgcgagaattttcaaataaggaagaggggtcttttatccttgtcgtaggaaaaccatgacggaaaggaaaaactgatgtttaaaagtccacttttaaaactatatttatttatgtaggatctgtcaaagaaaacttccaaaaagatttattaattaaaccagactctgttgcaat

SEQ ID NO: 1509 - protein, 491 aa, Homo sapiens
MKRMVSWSFHKLKTMKHLLLLLLCVFLVKSQGVNDNEEGFFSARGHRPLDKKREEAPSLRPAPPPISGGGYRARPAKAAATQKKVERKAPDAGGCLHADPDLGVLCPTGCQLQEALLQQERPIRNSVDELNNNVEAVSQTSSSSFQYMYLLKDLWQKRQKQVKDNENVVNEYSSELEKHQLYIDETVNSNIATNLRVLRSILENLRSKIQKLESDVSAQMEYCRTPCTVSCNIPVVSGKECEEIIRKGGETSEMYLIQPDSSVKPYRVYCDMNTENGGWTVIQNRQDGSVDFGRKWDPYKQGFGNVATNTDGKNYCGLPGEYWLGNDKISQLTRMGPTELLIEMEDWKGDKVKAHYGGFTVQNEANKYQISVNKYRGTAGNALMDGASQLMGENRTMTIHNGMFFSTYDRDNDGWLTSDPRKQCSKEDGGGWWYNRCHAANPNGRYYWGGQYTWDMAKHGTDDGVVWMNWKGSWYSMRKMSMKIRPFFPQQ

SEQ ID NO: 1510 - DNA, 373 bp, Homo sapiens
ctacatgaaaaggatggtttcttggagcttccacaaacttaaaaccatgaaacatctattattgctactattgtgtgtttttctagttaagtcccaaggtgtcaacgacaatgaggaggtgaattttttaaagcattattatattattagtagtattattaatataagatgtaacataatcatattatgtgcttattttaatgaaattagcattgcttatagttatgaaatggaattgttaacctctgacttattgtatttaaagaatgtttcatagtatttcttatataagatggcttagctaatgtaagatgtgtttttctcacttgctattctgagtactgtgattttcatttacttctagcaatacagg

SEQ ID NO: 1511 - DNA, 3627 bp, Homo sapiens
gtctaggagccagccccacccttagaaaagatgttttccatgaggatcgtctgcctagttctaagtgtggtgggcacagcatggactgcagatagtggtgaaggtgactttctagctgaaggaggaggcgtgcgtggcccaagggttgtggaaagacatcaatctgcctgcaaagattcagactggcccttctgctctgatgaagactggaactacaaatgcccttctggctgcaggatgaaagggttgattgatgaagtcaatcaagattttacaaacagaataaataagctcaaaaattcactatttgaatatcagaagaacaataaggattctcattcgttgaccactaatataatggaaattttgagaggcgatttttcctcagccaataaccgtgataatacctacaaccgagtgtcagaggatctgagaagcagaattgaagtcctgaagcgcaaagtcatagaaaaagtacagcatatccagcttctgcagaaaaatgttagagctcagttggttgatatgaaacgactggaggtggacattgatattaagatccgatcttgtcgagggtcatgcagtagggctttagctcgtgaagtagatctgaaggactatgaagatcagcagaagcaacttgaacaggtcattgccaaagacttacttccctctagagataggcaacacttaccactgataaaaatgaaaccagttccagacttggttcccggaaattttaagagccagcttcagaaggtacccccagagtggaaggcattaacagacatgccgcagatgagaatggagttagagagacctggtggaaatgagattactcgaggaggctccacctcttatggaaccggatcagagacggaaagccccaggaaccctagcagtgctggaagctggaactctgggagctctggacctggaagtactggaaaccgaaaccctgggagctctgggactggagggactgcaacctggaaacctgggagctctggacctggaagtactggaagctggaactctgggagctctggaactggaagtactggaaaccaaaaccctgggagccctagacctggtagtaccggaacctggaatcctggcagctctgaacgcggaagtgctgggcactggacctctgagagctctgtatctggtagtactggacaatggcactctgaatctggaagttttaggccagatagcccaggctctgggaacgcgaggcctaacaacccagactggggcacatttgaagaggtgtcaggaaatgtaagtccagggacaaggagagagtaccacacagaaaaactggtcacttctaaaggagataaagagctcaggactggtaaagagaaggtcacctctggtagcacaaccaccacgcgtcgttcatgctctaaaaccgttactaagactgttattggtcctgatggtcacaaagaagttaccaaagaagtggtgacctccgaagatggttctgactgtcccgaggcaatggatttaggcacattgtctggcataggtactctggatgggttccgccataggcaccctgatgaagctgccttcttcgacactgcctcaactggaaaaacattcccaggtttcttctcacctatgttaggagagtttgtcagtgagactgagtctaggggctcagaatctggcatcttcacaaatacaaaggaatccagttctcatcaccctgggatagctgaattcccttcccgtggtaaatcttcaagttacagcaaacaatttactagtagcacgagttacaacagaggagactccacatttgaaagcaagagctataaaatggcagatgaggccggaagtgaagccgatcatgaaggaacacatagcaccaagagaggccatgctaaatctcgccctgtcagagactgtgatgatgtcctccaaacacatccttcaggtacccaaagtggcattttcaatatcaagctaccgggatccagtaagattttttctgtttattgcgatcaagagaccagtttgggaggatggcttttgatccagcaaagaatggatggatcactgaattttaaccggacctggcaagactacaagagaggtttcggcagcctgaatgacgagggggaaggagaattctggctaggcaatgactacctccacttactaacccaaaggggctctgttcttagggttgaattagaggactgggctgggaatgaagcttatgcagaatatcacttccgggtaggctctgaggctgaaggctatgccctccaagtctcctcctatgaaggcactgcgggtgatgctctgattgagggttccgtagaggaaggggcagagtacacctctcacaacaacatgcagttcagcacctttgacagggatgcagaccagtgggaagagaactgtgcagaagtctatgggggaggctggtggtataataactgccaagcagccaatctcaatggaatctactaccctgggggctcctatgacccaaggaataacagtccttatgagattgagaatggagtggtctgggtttcctttagaggggcagattattccctcagggctgttcgcatgaaaattaggccccttgtgacccaataggctgaagaagtgggaatgggagcactctgtcttctttgctagagaagtggagagaaaatacaaaaggtaaagcagttgagattctctacaacctaaaaaattcctaggtgctattttcttatcctttgtactgtagctaaatgtacctgagacatattagtctttgaaaaataaagttatgtaaggttttttttatctttaaatagctctgtgggttttaacatttttgtaaagatataccaagggccattcagtacatcaggaaagtggcagacagaagcttctctctgcaaccttgaagactattggtttgagaacttctcttcccataccacccaaaatcataatgccattggaaagcaaaaagttgttttatccatttgatttgaattgttttaagccaatattttaaggtaaaactcactgaatctaaccatagctgacctttgtagtagaatttacaacttataattacaatgcacaatttataattacaatatgtatttatgtcttttgctatggagcaaatccaggaaggcaagagaaacattctttcctaaatataaatgaaaatctatcctttaaactcttccactagacgttgtaatgcacacttatttttttcccaaggagtaaccaatttctttctaaaacacatttaaaattttaaaactatttatgaatattaaaaaaagacataattcacacattaataaacaatctcccaagtattgatttaacttcatttttctaataatcataaactatattctgtgacatgctaattattattaaatgtaagtcgttagttcgaaagcctctcactaagtatgatctatgctatattcaaaattcaacccatttactttggtcaatatttgatctaagttgcatctttaatcctggtggtcttgccttctgatttttaatttgtatccttttctattaagatatatttgtcattttctcttgaatatgtattaaaatatcccaagc

SEQ ID NO: 1512 - protein, 866 aa, Homo sapiens
MFSMRIVCLVLSVVGTAWTADSGEGDFLAEGGGVRGPRVVERHQSACKDSDWPFCSDEDWNYKCPSGCRMKGLIDEVNQDFTNRINKLKNSLFEYQKNNKDSHSLTTNIMEILRGDFSSANNRDNTYNRVSEDLRSRIEVLKRKVIEKVQHIQLLQKNVRAQLVDMKRLEVDIDIKIRSCRGSCSRALAREVDLKDYEDQQKQLEQVIAKDLLPSRDRQHLPLIKMKPVPDLVPGNFKSQLQKVPPEWKALTDMPQMRMELERPGGNEITRGGSTSYGTGSETESPRNPSSAGSWNSGSSGPGSTGNRNPGSSGTGGTATWKPGSSGPGSTGSWNSGSSGTGSTGNQNPGSPRPGSTGTWNPGSSERGSAGHWTSESSVSGSTGQWHSESGSFRPDSPGSGNARPNNPDWGTFEEVSGNVSPGTRREYHTEKLVTSKGDKELRTGKEKVTSGSTTTTRRSCSKTVTKTVIGPDGHKEVTKEVVTSEDGSDCPEAMDLGTLSGIGTLDGFRHRHPDEAAFFDTASTGKTFPGFFSPMLGEFVSETESRGSESGIFTNTKESSSHHPGIAEFPSRGKSSSYSKQFTSSTSYNRGDSTFESKSYKMADEAGSEADHEGTHSTKRGHAKSRPVRDCDDVLQTHPSGTQSGIFNIKLPGSSKIFSVYCDQETSLGGWLLIQQRMDGSLNFNRTWQDYKRGFGSLNDEGEGEFWLGNDYLHLLTQRGSVLRVELEDWAGNEAYAEYHFRVGSEAEGYALQVSSYEGTAGDALIEGSVEEGAEYTSHNNMQFSTFDRDADQWEENCAEVYGGGWWYNNCQAANLNGIYYPGGSYDPRNNSPYEIENGVVWVSFRGADYSLRAVRMKIRPLVTQ

SEQ ID NO: 1513 - DNA, 2182 bp, Homo sapiens
gtctaggagccagccccacccttagaaaagatgttttccatgaggatcgtctgcctagttctaagtgtggtgggcacagcatggactgcagatagtggtgaaggtgactttctagctgaaggaggaggcgtgcgtggcccaagggttgtggaaagacatcaatctgcctgcaaagattcagactggcccttctgctctgatgaagactggaactacaaatgcccttctggctgcaggatgaaagggttgattgatgaagtcaatcaagattttacaaacagaataaataagctcaaaaattcactatttgaatatcagaagaacaataaggattctcattcgttgaccactaatataatggaaattttgagaggcgatttttcctcagccaataaccgtgataatacctacaaccgagtgtcagaggatctgagaagcagaattgaagtcctgaagcgcaaagtcatagaaaaagtacagcatatccagcttctgcagaaaaatgttagagctcagttggttgatatgaaacgactggaggtggacattgatattaagatccgatcttgtcgagggtcatgcagtagggctttagctcgtgaagtagatctgaaggactatgaagatcagcagaagcaacttgaacaggtcattgccaaagacttacttccctctagagataggcaacacttaccactgataaaaatgaaaccagttccagacttggttcccggaaattttaagagccagcttcagaaggtacccccagagtggaaggcattaacagacatgccgcagatgagaatggagttagagagacctggtggaaatgagattactcgaggaggctccacctcttatggaaccggatcagagacggaaagccccaggaaccctagcagtgctggaagctggaactctgggagctctggacctggaagtactggaaaccgaaaccctgggagctctgggactggagggactgcaacctggaaacctgggagctctggacctggaagtactggaagctggaactctgggagctctggaactggaagtactggaaaccaaaaccctgggagccctagacctggtagtaccggaacctggaatcctggcagctctgaacgcggaagtgctgggcactggacctctgagagctctgtatctggtagtactggacaatggcactctgaatctggaagttttaggccagatagcccaggctctgggaacgcgaggcctaacaacccagactggggcacatttgaagaggtgtcaggaaatgtaagtccagggacaaggagagagtaccacacagaaaaactggtcacttctaaaggagataaagagctcaggactggtaaagagaaggtcacctctggtagcacaaccaccacgcgtcgttcatgctctaaaaccgttactaagactgttattggtcctgatggtcacaaagaagttaccaaagaagtggtgacctccgaagatggttctgactgtcccgaggcaatggatttaggcacattgtctggcataggtactctggatgggttccgccataggcaccctgatgaagctgccttcttcgacactgcctcaactggaaaaacattcccaggtttcttctcacctatgttaggagagtttgtcagtgagactgagtctaggggctcagaatctggcatcttcacaaatacaaaggaatccagttctcatcaccctgggatagctgaattcccttcccgtggtaaatcttcaagttacagcaaacaatttactagtagcacgagttacaacagaggagactccacatttgaaagcaagagctataaaatggcagatgaggccggaagtgaagccgatcatgaaggaacacatagcaccaagagaggccatgctaaatctcgccctgtcagaggtatccacacttctcctttggggaagccttccctgtccccctagactaagttaaatatttctgcacagtgttcccatggccccttgcatttccttcttaactctctgttacacgtcattgaaactacacttttttggtctgtttttgtgctagactgtaagttccttgggggcagggcctttgtctgtctcatctctgtattcccaaatgcctaacagtacagagccatgactcaataaatacatgttaaatggatgaatg

SEQ ID NO: 1514 - protein, 644 aa, Homo sapiens
MFSMRIVCLVLSVVGTAWTADSGEGDFLAEGGGVRGPRVVERHQSACKDSDWPFCSDEDWNYKCPSGCRMKGLIDEVNQDFTNRINKLKNSLFEYQKNNKDSHSLTTNIMEILRGDFSSANNRDNTYNRVSEDLRSRIEVLKRKVIEKVQHIQLLQKNVRAQLVDMKRLEVDIDIKIRSCRGSCSRALAREVDLKDYEDQQKQLEQVIAKDLLPSRDRQHLPLIKMKPVPDLVPGNFKSQLQKVPPEWKALTDMPQMRMELERPGGNEITRGGSTSYGTGSETESPRNPSSAGSWNSGSSGPGSTGNRNPGSSGTGGTATWKPGSSGPGSTGSWNSGSSGTGSTGNQNPGSPRPGSTGTWNPGSSERGSAGHWTSESSVSGSTGQWHSESGSFRPDSPGSGNARPNNPDWGTFEEVSGNVSPGTRREYHTEKLVTSKGDKELRTGKEKVTSGSTTTTRRSCSKTVTKTVIGPDGHKEVTKEVVTSEDGSDCPEAMDLGTLSGIGTLDGFRHRHPDEAAFFDTASTGKTFPGFFSPMLGEFVSETESRGSESGIFTNTKESSSHHPGIAEFPSRGKSSSYSKQFTSSTSYNRGDSTFESKSYKMADEAGSEADHEGTHSTKRGHAKSRPVRGIHTSPLGKPSLSP

SEQ ID NO: 1515 - DNA, 1559 bp, Homo sapiens
tgctgacactacaaggctcggagctccgggcactcagacatcatgagttggtccttgcacccccggaatttaattctctacttctatgctcttttatttctctcttcaacatgtgtagcatatgttgctaccagagacaactgctgcatcttagatgaaagattcggtagttattgtccaactacctgtggcattgcagatttcctgtctacttatcaaaccaaagtagacaaggatctacagtctttggaagacatcttacatcaagttgaaaacaaaacatcagaagtcaaacagctgataaaagcaatccaactcacttataatcctgatgaatcatcaaaaccaaatatgatagacgctgctactttgaagtccaggataatgttagaagaaattatgaaatatgaagcatcgattttaacacatgactcaagtattcgatatttgcaggaaatatataattcaaataatcaaaagattgttaacctgaaagagaaggtagcccagcttgaagcacagtgccaggaaccttgcaaagacacggtgcaaatccatgatatcactgggaaagattgtcaagacattgccaataagggagctaaacagagcgggctttactttattaaacctctgaaagctaaccagcaattcttagtctactgtgaaatcgatgggtctggaaatggatggactgtgtttcagaagagacttgatggcagtgtagatttcaagaaaaactggattcaatataaagaaggatttggacatctgtctcctactggcacaacagaattttggctgggaaatgagaagattcatttgataagcacacagtctgccatcccatatgcattaagagtggaactggaagactggaatggcagaaccagtactgcagactatgccatgttcaaggtgggacctgaagctgacaagtaccgcctaacatatgcctacttcgctggtggggatgctggagatgcctttgatggctttgattttggcgatgatcctagtgacaagtttttcacatcccataatggcatgcagttcagtacctgggacaatgacaatgataagtttgaaggcaactgtgctgaacaggatggatctggttggtggatgaacaagtgtcacgctggccatctcaatggagtttattaccaaggtggcacttactcaaaagcatctactcctaatggttatgataatggcattatttgggccacttggaaaacccggtggtattccatgaagaaaaccactatgaagataatcccattcaacagactcacaattggagaaggacagcaacaccacctggggggagccaaacaggctggagacgtttaaaagaccgtttcaaaagagatttacttttttaaaggactttatctgaacagagagatataatatttttcctattggacaatggacttgcaaagcttcacttcattttaagagcaaaagaccccatgttgaaaactccataacagttttatgctgatgataatttatctacatgcatttcaataaaccttttgtttcctaagact

SEQ ID NO: 1516 - protein, 437 aa, Homo sapiens
MSWSLHPRNLILYFYALLFLSSTCVAYVATRDNCCILDERFGSYCPTTCGIADFLSTYQTKVDKDLQSLEDILHQVENKTSEVKQLIKAIQLTYNPDESSKPNMIDAATLKSRIMLEEIMKYEASILTHDSSIRYLQEIYNSNNQKIVNLKEKVAQLEAQCQEPCKDTVQIHDITGKDCQDIANKGAKQSGLYFIKPLKANQQFLVYCEIDGSGNGWTVFQKRLDGSVDFKKNWIQYKEGFGHLSPTGTTEFWLGNEKIHLISTQSAIPYALRVELEDWNGRTSTADYAMFKVGPEADKYRLTYAYFAGGDAGDAFDGFDFGDDPSDKFFTSHNGMQFSTWDNDNDKFEGNCAEQDGSGWWMNKCHAGHLNGVYYQGGTYSKASTPNGYDNGIIWATWKTRWYSMKKTTMKIIPFNRLTIGEGQQHHLGGAKQAGDV

SEQ ID NO: 1517 - DNA, 1655 bp, Homo sapiens
tgctgacactacaaggctcggagctccgggcactcagacatcatgagttggtccttgcacccccggaatttaattctctacttctatgctcttttatttctctcttcaacatgtgtagcatatgttgctaccagagacaactgctgcatcttagatgaaagattcggtagttattgtccaactacctgtggcattgcagatttcctgtctacttatcaaaccaaagtagacaaggatctacagtctttggaagacatcttacatcaagttgaaaacaaaacatcagaagtcaaacagctgataaaagcaatccaactcacttataatcctgatgaatcatcaaaaccaaatatgatagacgctgctactttgaagtccaggataatgttagaagaaattatgaaatatgaagcatcgattttaacacatgactcaagtattcgatatttgcaggaaatatataattcaaataatcaaaagattgttaacctgaaagagaaggtagcccagcttgaagcacagtgccaggaaccttgcaaagacacggtgcaaatccatgatatcactgggaaagattgtcaagacattgccaataagggagctaaacagagcgggctttactttattaaacctctgaaagctaaccagcaattcttagtctactgtgaaatcgatgggtctggaaatggatggactgtgtttcagaagagacttgatggcagtgtagatttcaagaaaaactggattcaatataaagaaggatttggacatctgtctcctactggcacaacagaattttggctgggaaatgagaagattcatttgataagcacacagtctgccatcccatatgcattaagagtggaactggaagactggaatggcagaaccagtactgcagactatgccatgttcaaggtgggacctgaagctgacaagtaccgcctaacatatgcctacttcgctggtggggatgctggagatgcctttgatggctttgattttggcgatgatcctagtgacaagtttttcacatcccataatggcatgcagttcagtacctgggacaatgacaatgataagtttgaaggcaactgtgctgaacaggatggatctggttggtggatgaacaagtgtcacgctggccatctcaatggagtttattaccaaggtggcacttactcaaaagcatctactcctaatggttatgataatggcattatttgggccacttggaaaacccggtggtattccatgaagaaaaccactatgaagataatcccattcaacagactcacaattggagaaggacagcaacaccacctggggggagccaaacaggtcagaccagagcaccctgcggaaacagaatatgactcactttaccctgaggatgatttgtagaaaattaactgctaacttctattgacccacaaagtttcagaaattctctgaaagtttcttccctttttctcttactatatttattgatttcaagtcttctattaaggacatttagccttcaatggaaattaaaactcatttaggactgtatttccaaattactgatatcagagttatttaaaaattgtttatttgaggagataacatttcaactttgttcctaaatatataataataaaatgattgacttt

SEQ ID NO: 1518 - protein, 453 aa, Homo sapiens
MSWSLHPRNLILYFYALLFLSSTCVAYVATRDNCCILDERFGSYCPTTCGIADFLSTYQTKVDKDLQSLEDILHQVENKTSEVKQLIKAIQLTYNPDESSKPNMIDAATLKSRIMLEEIMKYEASILTHDSSIRYLQEIYNSNNQKIVNLKEKVAQLEAQCQEPCKDTVQIHDITGKDCQDIANKGAKQSGLYFIKPLKANQQFLVYCEIDGSGNGWTVFQKRLDGSVDFKKNWIQYKEGFGHLSPTGTTEFWLGNEKIHLISTQSAIPYALRVELEDWNGRTSTADYAMFKVGPEADKYRLTYAYFAGGDAGDAFDGFDFGDDPSDKFFTSHNGMQFSTWDNDNDKFEGNCAEQDGSGWWMNKCHAGHLNGVYYQGGTYSKASTPNGYDNGIIWATWKTRWYSMKKTTMKIIPFNRLTIGEGQQHHLGGAKQVRPEHPAETEYDSLYPEDDL

SEQ ID NO: 1519 - DNA, 488 bp, Homo sapiens
agcagccgccgccagacagccgcccgcccacccgttcgcccgtccccctgccgcattcacaatgcagcctgcttttgcaaagtggtacgatcgaagggactgtgtcttcactgaatcttgtgttgaagacaataaggatgttaatgtaaattttgaaaaatccaaacttacattcagttgtcttggaggaagtgataattttaagcatttaaatgaaattggtcttttttactctattgatccaaatgattccaagcataaaagaacggacagatcaattttatgttgtttacgaaaaggagaatctggccagtcatggccaaggttaacaaaagaaagggcaaagatgatgaacaacatgggtggggatgaggatgtagatttaccagaagtagatgaagcaggtgatgattcacaagacagtgatgatgaaaaaatgccagatctggagtaagaaatatttcatcacctggattttgagaaagaaa

SEQ ID NO: 1520 - DNA, 1023 bp, Homo sapiens
atggtaaccaatgtcaaccagaatacaagtggagctctgtctttaaatcaactgccacacactcacatgtcgaagatccaaataccccttgcaaatgcctatcccattgccaacgctgatgcccaaggatgcacacactggctgcgtgggctgccctcagaaagatgtgcccgaggaggaaaattactcctgggcaccagtacaattacagtggatcagaggattgcactgaaagaggtgcaagctacctggttacttcacaaatatctctaccatacatactattatcgactcaacattagggttgtctgtgctcaggacaccagagtaaatactgccccaattccagagatgtactccttctacatgtgcccatgcttcaggcctgagctccgtggctactccatggacacatcacttatcaaacaccagtgcaaccaccactgcaagcaagccaacaggccagattcagtgccaagagagattctggcaatcttagcagaagaactcaacaaaacaaagcccatctggaccagaaatccagatgatattactaatgaggagtacagagaattctacaagagcttgactaatgactgggaagatcacttaaagaaaaagaacaatatcaaattgtatgtatgcagagttttcatcacggataactgtgaggagctaatccctgaatacctgaacttcattagagtgctggtagactcggaggatctccctctaaatatttcccataagatgttacaacaaagcaaaattttgaaagttatcaggaagaatttggtcaaaaaatgcttagaactctttactgaactggcagaagataaagagaactacaagaagttctatgagcagttctctgaaaacataaagcttggaatacatgaagactctcaaaatcagaagaagctttcagagctgttaaggtactacacatctgcctctggtgatgagatggtttctctcaaggactactgcaccagaataaggaaaactagaaatgaatcttaa

SEQ ID NO: 1521 - protein, 340 aa, Homo sapiens
MVTNVNQNTSGALSLNQLPHTHMSKIQIPLANAYPIANADAQGCTHWLRGLPSERCARGGKLLLGTSTITVDQRIALKEVQATWLLHKYLYHTYYYRLNIRVVCAQDTRVNTAPIPEMYSFYMCPCFRPELRGYSMDTSLIKHQCNHHCKQANRPDSVPREILAILAEELNKTKPIWTRNPDDITNEEYREFYKSLTNDWEDHLKKKNNIKLYVCRVFITDNCEELIPEYLNFIRVLVDSEDLPLNISHKMLQQSKILKVIRKNLVKKCLELFTELAEDKENYKKFYEQFSENIKLGIHEDSQNQKKLSELLRYYTSASGDEMVSLKDYCTRIRKTRNES

SEQ ID NO: 1522 - DNA, 1277 bp, Homo sapiens
gatgtggcccgtggcctagctcgtcaagttgccgtggcgcggagaactctgcaaaacaagaggctgaggattgcgttagagataaaccagttcacgccggagccccgtgagggaagcgtctccgttgggtccggccgctctgcgggactctgaggaaaagctcgcaccaggtggacgcggatctgtcaacatgggtaaaggagaccccaacaagccgcggggcaaaatgtcctcgtacgccttcttcgtgcagacctgccgggaagagcacaagaagaaacacccggactcttccgtcaatttcgcggaattctccaagaagtgttcggagagatggaagaccatgtctgcaaaggagaagtcgaagtttgaagatatggcaaaaagtgacaaagctcgctatgacagggagatgaaaaattacgttcctcccaaaggtgataagaaggggaagaaaaaggaccccaatgctcctaaaaggccaccatctgccttcttcctgttttgctctgaacatcgcccaaagatcaaaagtgaacaccctggcctatccattggggatactgcaaagaaattgggtgaaatgtggtctgagcagtcagccaaagataaacaaccatatgaacagaaagcagctaagctaaaggagaaatatgaaaaggatattgctgcatatcgtgccaagggcaaaagtgaagcaggaaagaagggccctggcaggccaacaggctcaaagaagaagaacgaaccagaagatgaggaggaggaggaggaagaagaagatgaagatgaggaggaagaggatgaagatgaagaataaatggctatcctttaatgatgcgtgtggaatgtgtgtgtgtgctcaggcaattattttgctaagaatgtgaattcaagtgcagctcaatactagcttcagtataaaaactgtacagatttttgtatagctgataagattctctgtagagaaaatacttttaaaaaatgcaggttgtagctttttgatgggctactcatacagttagattttacagcttctgatgttgaatgttcctaaatatttaatggtttttttaatttctgtgtgtatggtagcacagcaaacttgtaggaattagtatcaatagtaaattttgggttttttaggatgttgcatttcgtttttttaaaaaaaattttgtaataaaattatgtatattatttctattgtctttgtcttaatatgctaagttaattttcactttaaaaaagccatttgaagaccaaaaaaaaaaaaa

SEQ ID NO: 1523 - protein, 209 aa, Homo sapiens
MGKGDPNKPRGKMSSYAFFVQTCREEHKKKHPDSSVNFAEFSKKCSERWKTMSAKEKSKFEDMAKSDKARYDREMKNYVPPKGDKKGKKKDPNAPKRPPSAFFLFCSEHRPKIKSEHPGLSIGDTAKKLGEMWSEQSAKDKQPYEQKAAKLKEKYEKDIAAYRAKGKSEAGKKGPGRPTGSKKKNEPEDEEEEEEEEDEDEEEEDEDEE

SEQ ID NO: 1524 - DNA, 1237 bp, Homo sapiens
cagccccctctgcggctgccgggcgggcccgggcgcccgggggctggggggtggggggtgggggaggacgccgagcgctgaggcaggggcccgggccgagggcgcggcggggctgcgcgcacgctggggcgcgtggaggggcgcggagggcgaaatgagtctggtaggtggttttccccaccacccggtggtgcaccacgagggctacccgtttgccgccgccgccgccgcagctgccgccgccgccgccagccgctgcagccatgaggagaacccctacttccatggctggctcatcggccaccccgagatgtcgccccccgactacagcatggccctgtcctacagccccgagtatgccagcggcgccgccggcctggaccactcccattacgggggggtgccgccgggcgccgggcccccgggcctgggggggccgcgcccggtgaagcgccgaggcaccgccaaccgcaaggagcggcgcaggactcagagcatcaacagcgccttcgccgaactgcgcgagtgcatccccaacgtacccgccgacaccaaactctccaaaatcaagaccctgcgcctggccaccagctacatcgcctacctcatggacctgctggccaaggacgaccagaatggcgaggcggaggccttcaaggcagagatcaagaagaccgacgtgaaagaggagaagaggaagaaggagctgaacgaaatcttgaaaagcacagtgagcagcaacgacaagaaaaccaaaggccggacgggctggccgcagcacgtctgggccctggagctcaagcagtgaggaggaggagaaggaggaggaggagagcgcgagtgagcaggggccaaggcgccagatgcagacccaggactccggaaaagccgtccgcgctccgctctgaggactccttgcatttggaatcatccggtttatttatgtgcaatttccttcccctctctttgaccccctttgaggcatctgctccccgtctccccctccaaaaaaaaagtggatatttgaagaaaagcattccatattttaatacgaagaggacactcccgtgtgcaggccgaatcagacccggcgtgggcgaattcagaagtgcccagggagagacaagctagaggctctgcggacttctgcgggcggctgacaacgcgagggcgaggggagaaagccatcaggtcctagacgtggaagaaaggagcctaccaaagtgttggagtaaac

SEQ ID NO: 1525 - DNA, 1010 bp, Homo sapiens
ttcactattaaaatattttccccccaagtctcaaatattgaagaatctctaaccagaaggcacagatcattcatggggatgtataaccgaaaccagtcctctccaccgcctggggatcttcactttcgcagtctacgactgcctgtgactccagaaagacaaactgcagattggccaagctgcctgaagacccagcccgacagcgatgcctgtcagcccgcgtcgcccaccagggcagctgctctcccaactcgcatggggggcaccaccccgcctcggtgccctagagctgagcgcagccgcggctccacggggatcgccagggcctcagccctcgcggccggcggcgcgggagtgttgcggggcagggaccagagcgcgatcagagcggccacccccgatttaggtcgccagctttccagtcactgcgatggccactggggcgccccttccatcctggttaaattctcattgtgatccccagccctcttctcggttccccacacccaggaggccggttctccgccgctcaggctgggagaggtcaccgctccgggcagggtggacccccagctccgtctcggaggacctttcgccggaggcgagcaggaaggggttaaccatgagcctcccaccctcacctcccagaccctggtgccgggctaaggcctccgcttccctcctgaggtctcattaggaaaccctcaccgctattttcaacatttcctcaatcaagtgcctttaaatagagctgcacaaacagattggcggcaaaagcgtagatcttgtcacgattgagaccaatccagtatttcagccttgtttgctttgcaattacgggttggcttgtggctacggtgccaccggggcaaatctgcagccgctcgctttctcctctgcgctccgggcgggtggaggaagcgacccgcggagtcactgcagggaggagagggggacgcgcgcggggggaggcggcggagggcggaggagactcgcttgcaccccagggc

SEQ ID NO: 1526 - DNA, 2158 bp, Homo sapiens
ggaggcaaacaacccatctctcttggagaatccacacttcgtttcttctaggtccagcctaaatgttacctcctccagggagcctttccagatactgcttctcctctctcccccaactccctcccacaaatgaagttttctcttctgaattccttgctggtactgtcacttatattcttttgggtagatctctgggcatgcatatgtcacctcctgtgactgtgggtttcttgacaacctaatcaatgcattgaacaaaggagatgtttagacaacccatataaaatgaataagagaaatagggtgaataccgtctaccccaattgcaatcagattagtttcctttattttgaaaacgattagaactagtagaggagttagatgtggcccactagggaacaaattttcatctccaagccgtcctctggctcgatcgggtctgcactgggtctgcatcaacttgcgctggctcagagggaggctcagccccagcctggccttcctggtgcccactcccaacatcctgagcagggccgactctaggcaccccacgattagctgagtgatctagggcaaggacctaggcgtctctaagtcttagtttccccatctgaacaatgtggataatgacacgtacctggggtgggcaggctagagtaaatgggaaaatcaaagcgccagccagagcgggtcgcactgttagttcctgtattttctcctcctgcctctggtttcttccgttccgttctagctgcctgaagacccagcccgacagcgatgcctgtcagcccgcgtcgcccaccagggcagctgctctcccaactcgcatggggggcaccaccccgcctcggtgccctagagctgagcgcagccgcggctccacggggatcgccagggcctcagccctcgcggccggcggcgcgggagtgttgcggggcagggaccagagcgcgatcagagcggccacccccgatttaggtcgccagctttccagtcactgcgatggccactggggcgccccttccatcctggttaaattctcattgtgatccccagccctcttctcggttccccacacccaggaggccggttctccgccgctcaggctgggagaggtcaccgctccgggcagggtggacccccagctccgtctcggaggacctttcgccggaggcgagcaggaaggggttaaccatgagcctcccaccctcacctcccagaccctggtgccgggctaaggcctccgcttccctcctgaggtctcattaggaaaccctcaccgctattttcaacatttcctcaatcaagtgcctttaaatagagctgcacaaacagattggcggcaaaagcgtagatcttgtcacgattgagaccaatccagtatttcagccttgtttgctttgcaattacgggttggcttgtggctacggtgccaccggggcaaatctgcagccgctcgctttctcctctgcgctccgggcgggtggaggaagcgacccgcggagtcactgcagggaggagagggggacgcgcgcggggggaggcggcggagggcggaggagactcgcttgcaccccagggccgcgggcacgcagagctgtgttgaaggacatacttttcaggttcctgacagtcactgagctatacgcaataataaagtgcgtgattcgcgtgtggaaaccagtgtcgtgtccttaccggcttccttttctgtccaccttccctctctcttctacctccgtctcgcttttcttcagtgcatgttagcggtttgctggatttcccttctccctcgctgttcaactgctagcatgatttgttacattttccacagctgtttattcttgtttgactttttgtacaaagtcactttaaatctgctgcagaaagaataaagcacctagccctttggatggactcctgcaggcgtgtggctgtccctggcccacttttaattctttggagatggctcttctgtgtaaatcagctgctgggtgcgttcggtcacctcgtaggccagcctagtttgtatcagcagaacagtagtggactcgactcaggtcgtaagccttatatttcacagacaattaaatcttggctgctgttgaacaaaactgtaatatttactttgttctataccgagaagcacttttaaagt

SEQ ID NO: 1527 - protein, 143 aa, Homo sapiens
MWIMTRTWGGQARVNGKIKAPARAGRTVSSCIFSSCLWFLPFRSSCLKTQPDSDACQPASPTRAAALPTRMGGTTPPRCPRAERSRGSTGIARASALAAGGAGVLRGRDQSAIRAATPDLGRQLSSHCDGHWGAPSILVKFSL

SEQ ID NO: 1528 - DNA, 1656 bp, Homo sapiens
gaaggaggaggtggcaaatcacttataaatggtgctgaagcaggacccgaagcctaaattccaggagggtgagcgagtgctgtggtttcatgggcctctgctttatgatgcaaagtgtgtaaaggttgccataaaggacaaaaagtgaaatactttatacattacagtggttggaataaaaattgggatgagtgggttccggagagcagagtactcaaatatgtggacaccaatttgcagaaacagcgagaacttcaaaaagccaatcaggagcagtatgcagaggggaagatgagatgggctgccccaggaaagaagacatctggtctgcaacagaaaaatattgaagtgaaaacaaaaaagaacaaacagaaaacacctggaaatggagatggtggcagtaccagtgagactccccagcctcctcgaaagaaaagggcccaggtagatcctactgttgaaaatgaggaaacattcatgaacagagttgaagttaaagtaaagattcctgaagagctaaaaccatggcttgttgatgactgggacttaattaccaggcaaaaacagctcttctatcttcctgccgagaagaatgtggattccattcttgaggactatgcaaattacaagaaatctcatggaaacacagataataaggagtatgcagttaatgaagttgtggcagggataaaagaatacttcaacctaatgttgggcacccagctactcaacaaatttgagagaccacagtatgccgaaattcttgcagattgtcccgatgcacccatgtcccaggtgtatggagtgccacatctcctgagattatctgtacaaattggagcaatgttggcctatacacctctgaatgagaagagccttgctttattactcaattatcttcacgatttcctaaagtacctggcaaagaattctgcaactttgtttagtgccagcgattatgaagtggctcttcctgagtaccatcggaaagctgtgtgagaggcactctcactcacttatgtctggatctccataaacacatttttgttcttagtctatctcttgtacaaacgatgtgctttgaagatgttagtgtataacaattgatgtttgttttctgtttgattttaaacagagaaaataaaaggggtaatagctccttttctctttttttttttttttttcatttcaaagttgctgccagtgttttcaatgatggacaacacagggatatgctgtagagtgttttattgcctagttgacaaagctgcttttgaatgctggtggttctattcctttaacactatgcatttttataatacgtgttaatgctacatgacaaaatgctctgattcctagtgccaaaggttcaattcagtgtatataactgaatacactcatccatttgtgctcctttttttttttaatggtgcttaaagtaaagagcccatcctttgcaagtcatccatgttgctacttaggcattttatcttggctcaaattgttgaagaatggcttgtttcacagtttttgtatttgtgtctaatgcacgttttaacatgatagatgcaatgcattgtgtagctacttttctggaaaagtcaatcttttaggaattgtttttcagatcttcattaaattttttccttaaatttc

SEQ ID NO: 1529 - protein, 235 aa, Homo sapiens
MRWAAPGKKTSGLQQKNIEVKTKKNKQKTPGNGDGGSTSETPQPPRKKRAQVDPTVENEETFMNRVEVKVKIPEELKPWLVDDWDLITRQKQLFYLPAEKNVDSILEDYANYKKSHGNTDNKEYAVNEVVAGIKEYFNLMLGTQLLNKFERPQYAEILADCPDAPMSQVYGVPHLLRLSVQIGAMLAYTPLNEKSLALLLNYLHDFLKYLAKNSATLFSASDYEVALPEYHRKAV

SEQ ID NO: 1530 - DNA, 14752 bp, Homo sapiens
ctgggcggccgggcgcggggagagggcgcgggagcggctcgtgcggcaggtaccatgcggacgcgcgagcccggcgagggccccggcaggcccggtccctgctcgggggcgcgctgagacggcgggtgagctccacgagagcgccgtcgccacttcgggccaactttgcgattcccgacagttaagcaatggggagacatttggctttgctcctgcttctgctccttctcttccaacattttggagacagtgatggcagccaacgacttgaacagactcctctgcagtttacacacctcgagtacaacgtcaccgtgcaggagaactctgcagctaagacttatgtggggcatcctgtcaagatgggtgtttacattacacatccagcgtgggaagtaaggtacaaaattgtttccggagacagtgaaaacctgttcaaagctgaagagtacattctcggagacttttgctttctaagaataaggaccaaaggaggaaatacagctattcttaatagagaagtgaaggatcactacacattgatagtgaaagcacttgaaaaaaatactaatgtggaggcgcgaacaaaggtcagggtgcaggtgctggatacaaatgacttgagaccgttattctcacccacctcatacagcgtttctttacctgaaaacacagctataaggaccagtatcgcaagagtcagcgccacggatgcagacataggaaccaacggggaattttactacagttttaaagatcgaacagatatgtttgctattcacccaaccagtggtgtgatagtgttaactggtagacttgattacctagagaccaagctctatgagatggaaatcctcgctgcggaccgtggcatgaagttgtatgggagcagtggcatcagcagcatggccaagctaacggtgcacatcgaacaggccaatgaatgtgctccggtgataacagcagtgacattgtcaccatcagaactggacagggacccagcatatgcaattgtgacagtggatgactgcgatcagggtgccaatggtgacatagcatctttaagcatcgtggcaggtgaccttctccagcagtttagaacagtgaggtcctttccagggagtaaggagtataaagtcaaagccatcggtggcattgattgggacagtcatcctttcggctacaatctcacactacaggctaaagataaaggaactccgccccagttctcttctgttaaagtcattcacgtgacttctccacagttcaaagccgggccagtcaagtttgaaaaggatgtttacagagcagaaataagtgaatttgctcctcccaacacacctgtggtcatggtaaaggccattcctgcttattcccatttgaggtatgtttttaaaagtacacctggaaaagctaaattcagtttaaattacaacactggtctcatttctattttagaaccagttaaaagacagcaggcagcccattttgaacttgaagtaacaacaagtgacagaaaagcgtccaccaaggtcttggtgaaagtcttaggtgcaaatagcaatccccctgaatttacccagacagcgtacaaagctgcttttgatgagaacgtgcccattggtactactgtcatgagcctgagtgccgtagaccctgatgagggtgagaacgggtacgtgacatacagtatcgcaaatttaaatcatgtgccgtttgcgattgaccatttcactggtgccgtgagtacgtcagaaaacctggactacgaactgatgcctcgggtttatactctgaggattcgtgcatcagactggggcttgccgtaccgccgggaagtcgaagtccttgctacaattactctcaataacttgaatgacaacacacctttgtttgagaaaataaattgtgaagggacaattcccagagatctaggcgtgggagagcaaataaccactgtttctgctattgatgcagatgaacttcagttggtacagtatcagattgaagctggaaatgaactggatttctttagtttaaaccccaactcgggggtattgtcattaaagcgatcgctaatggatggcttaggtgcaaaggtgtctttccacagtctgagaatcacagctacagatggagaaaattttgccacaccattatatatcaacataacagtggctgccagtcacaagctggtaaacttgcagtgtgaagagactggtgttgccaaaatgctggcagagaagctcctgcaggcaaataaattacacaaccagggagaggtggaggatattttcttcgattctcactctgtcaatgctcacataccgcagtttagaagcactcttccgactggtattcaggtaaaggaaaaccagcctgtgggttccagtgtaattttcatgaactccactgaccttgacactggcttcaatggaaaactggtctatgctgtttctggaggaaatgaggatagttgcttcatgattgatatggaaacaggaatgctgaaaattttatctcctcttgaccgtgaaacaacagacaaatacaccctgaatattaccgtctatgaccttgggataccccagaaggctgcgtggcgtcttctacatgtcgtggttgtcgatgccaatgataatccacccgagtttttacaggagagctattttgtggaagtgagtgaagacaaggaggtacatagtgaaatcatccaggttgaagccacagataaagacctggggcccaacggacacgtgacgtactcaattgttacagacacagacacattttcaattgacagcgtgacgggtgttgttaacatcgcacgccctctggatcgagagctgcagcatgagcactccttaaagattgaggccagggaccaagccagagaagagcctcagctgttctccactgtcgttgtgaaagtatcactagaagatgttaatgacaacccacctacatttattccacctaattatcgtgtgaaagtccgagaggatcttccagaaggaaccgtcatcatgtggttagaagcccacgatcctgatttaggtcagtctggtcaggtgagatacagccttctggaccacggagaaggaaacttcgatgtggataaactcagtggagcagttaggatcgtccagcagttggactttgagaagaagcaagtgtataatctcactgtgagggccaaagacaagggaaagccagtttctctgtcttctacttgctatgttgaagttgaggtggttgatgtgaatgagaacctgcacccacccgtgttttccagctttgtggaaaaggggacagtgaaagaagatgcacctgttggttcattggtaatgacggtgtcggctcatgatgaggacgccagaagagatggggagatccgatactccattagagatggctctggcgttggtgttttcaaaataggtgaagagacaggtgtcatagagacgtcagatcgactggaccgtgaatcgacctcccattattggctaacagtctttgcaaccgatcagggtgtcgtgcctctttcatcgttcatagagatctacatagaggttgaggatgtcaatgacaatgcaccacagacatcagagcctgtttattacccagaaatcatggaaaattctcctaaagatgtatctgtggtccagatcgaggcatttgatccagattcgagctctaatgacaagctcatgtacaaaattacaagtggaaatccacaaggattcttttcaatacatcctaaaacaggtctcatcacaactacgtcaaggaagctagaccgagaacagcaagatgaacacatattagaggttactgtgacagacaatggtagtccccccaaatcaaccattgcaagagtcattgtgaaaatccttgatgaaaatgacaacaaacctcagtttctgcaaaagttctacaaaatcagactccctgagcgggaaaagccagaccgagaaagaaatgccagacgggagccgctctatcacgtcatagccaccgacaaggatgagggccccaatgcagaaatctcctacagcatcgaagacgggaatgagcatggcaaatttttcatcgaaccgaaaactggagtggtttcgtccaagaggttttcagcagctggagaatatgatattctttcaattaaggcagttgacaatggtcgccctcaaaagtcatcaaccaccagactccatattgaatggatctccaagcccaaaccgtccctggagcccatttcatttgaagaatcattttttacctttactgtgatggaaagtgaccccgttgctcacatgattggagtaatatctgtggagcctcctggcatacccctttggtttgacatcactggtggcaactacgacagtcacttcgatgtggacaagggaactggaaccatcattgttgccaaacctcttgatgcagaacagaagtcaaactacaacctcacagtcgaggctacagatggaaccaccactatcctcactcaggtattcatcaaagtaatagacacaaatgaccatcgtcctcagttttctacatcaaagtatgaagttgttattcctgaagatacagcgccagaaacagaaattttgcaaatcagtgctgtggatcaggatgagaaaaacaaactaatctacactctgcagagcagtagagatccactgagtctcaagaaatttcgtcttgatcctgcaaccggctctctctatacttctgagaaactggatcatgaagctgttcaccagcacaccctcacggtcatggtacgagatcaagatgtgcctgtaaaacgcaactttgcaaggattgtggtcaatgtcagcgacacgaatgaccacgccccgtggttcaccgcttcctcctacaaagggcgggtttatgaatcggcagccgttggctcagttgtgttgcaggtgacggctctggacaaggacaaagggaaaaatgctgaagtgctgtactcgatcgagtcaggaaatattggaaattcttttatgattgatcctgtcttgggctctattaaaactgccaaagaattagatcgaagtaaccaagcggagtatgatttaatggtaaaagctacagataagggcagtccaccaatgagtgaaataacttctgtgcgtatctttgtcacaattgctgacaacgcctctccgaagtttacatcaaaagaatattctgttgaacttagtgaaactgtcagcattgggagtttcgttgggatggttacagcccatagtcaatcatcagtggtgtatgaaataaaagatggaaatacaggtgatgcttttgatattaatccacattctggaactatcatcactcagaaagccctggactttgaaactttgcccatttacacattgataatacaaggaactaacatggctggtttgtccactaatacaacggttctagttcacttgcaggatgagaatgacaacgcgccagtttttatgcaggcagaatatacaggactcattagtgaatcagcctcaattaacagcgtggtcctaacagacaggaatgtcccactggtgattcgagcagctgatgctgataaagactcaaatgctttgcttgtatatcacattgttgaaccatctgtacacacatattttgctattgattctagcactggtgctattcatacagtactaagtctggactatgaagaaacaagtatttttcactttaccgtccaagtgcatgacatgggaaccccacgtttatttgctgagtatgcagcgaatgtaacagtacatgtaattgacattaatgactgcccccctgtgtttgccaagccattatatgaagcatctcttttgttaccaacatacaaaggagtaaaagtcatcacagtaaatgctacagatgctgattcaagtgcattctcacagttgatttactccatcaccgaaggcaacatcggggagaagttttctatggactacaagactggtgctctcactgtccaaaacacaactcagttaagaagccgctacgagctaaccgttagagcttccgatggcagatttgccggccttacctctgtcaaaattaatgtgaaagaaagcaaagaaagtcacctaaagtttacccaggatgtctactctgcggtagtgaaagagaattccaccgaggccgaaacattagctgtcattactgctattgggaatccaatcaatgagcctttgttttatcacatcctcaacccagatcgcagatttaaaataagccgcacttcaggagttctgtcaaccactggcacgcccttcgatcgtgagcagcaggaggcgtttgatgtggttgtagaagtgacagaggaacataagccttctgcagtggcccacgttgtcgtgaaggtcattgtagaagaccaaaatgataatgcgccggtgtttgtcaaccttccctactacgccgttgttaaagtggacactgaggtgggccatgtcattcgctatgtcactgctgtagacagagacagtggcagaaacggggaagtgcattactacctcaaggaacatcatgaacactttcaaattggacccttgggtgaaatttcactgaaaaagcaatttgagcttgacaccttaaataaagaatatcttgttacagtggttgcaaaagatggagggaacccggccttttcagcggaagttatcgttccgatcactgtcatgaataaagccatgcctgtgtttgaaaaacctttctacagtgcagagattgcagagagcatccaggtgcacagccctgtggtccacgtgcaggctaacagcccggaaggcctgaaagtgttctacagcatcacagacggagaccctttcagccagttcactattaacttcaatactggagttatcaatgtcatagctcctctggactttgaggcccacccggcatataagctgagcatacgcgcaactgactccttgacgggcgctcatgctgaagtatttgtggacatcatagtagacgacatcaatgataaccctcctgtgtttgctcagcagtcttatgcggtgaccctgtctgaggcatctgtaattggaacgtctgttgttcaagttagagccaccgattctgattcagaaccaaatagaggaatctcataccagatgtttgggaatcacagcaagagtcatgatcattttcatgtagacagcagcactggcctcatctcactactcagaaccctggattacgagcagtcccggcagcacacgatttttgtgagggcagttgatggtggtatgcccacgctgagcagtgatgtgattgtcacggtggacgttaccgacctcaatgataatccaccactctttgaacaacagatttatgaagccagaattagcgagcacgcccctcatgggcatttcgtgacctgtgtaaaagcctatgatgcagacagttcagacatagacaagttgcagtattccattctgtctggcaatgatcataaacattttgtcattgacagtgcaacagggattatcaccctctcaaacctgcaccggcacgccctgaagccattttacagtcttaacctgtcagtgtctgatggagtttttagaagttccacccaggttcatgtaactgtaattggaggcaatttgcacagtcctgctttccttcagaacgaatatgaagtggaactagctgaaaacgctcccctacataccctggtgatggaggtgaaaactacggatggggattctggtatttatggtcacgttacttaccatattgtaaatgactttgccaaagacagattttacataaatgagagaggacagatatttactttggaaaaacttgatcgagaaaccccggcggagaaagtgatctcagtccgtttaatggctaaggatgctggaggaaaagttgctttctgcaccgtgaatgtcatccttacagatgacaatgacaatgcaccacaatttcgagcaaccaaatacgaagtgaatatcgggtccagtgctgctaaagggacttcagtcgttaaagttcttgcaagtgatgccgatgagggctccaatgccgacatcacctatgccattgaagcagactctgaaagtgtaaaagagaatttggaaattaacaaactgtccggcgtaatcactacaaaggagagcctcattggcttggaaaatgaattcttcactttctttgttagagctgtggataatgggtctccatcaaaagaatctgttgttcttgtctatgttaaaatccttccaccggaaatgcagcttccaaaattttcagaacctttctatacctttacagtgtcagaggacgtgcctattggaacagagatagatctcatccgagcagaacatagtgggactgttctttacagcctggtcaaagggaatactccagaaagcaatagggatgagtcctttgtgattgacagacagagcgggagactgaagttggagaagagtcttgatcatgagacaactaagtggtatcagttttccatactggccaggtgcactcaagatgaccatgagatggtggcttctgtagatgttagtatccaagtgaaagatgcaaatgacaacagcccggtctttgaatctagtccatatgaggcattcattgttgaaaacctgccagggggaagtagagtaattcagatcagggcatctgatgctgactcaggaaccaacggccaagttatgtatagcctggatcagtcacaaagtgtggaagtcattgaatcctttgccattaacatggaaacaggctggattacaactttaaaggaacttgaccatgaaaagagagacacttaccagattaaagtggttgcatcagatcatggtgaaaagatccagctatcctccacagccattgtggatgttaccgtcaccgatgtcaacgatagtccaccacgattcacggccgagatctataaagggactgtgagtgaggatgaccccctaggtggggtgattgccatcttaagtaccacggatgctgattctgaagagatcaacagacaagttacatatttcataacaggaggggatcctttaggacagtttgctgttgaaactatacagaatgaatggaaggtatatgtgaagaaacctctagacagggaaaaaagggacaattaccttcttactatcacggcaactgatggcaccttctcatcaaaagcgatagttgaagtgaaagttctggatgcaaatgacaacagtccagtttgtgaaaagactttatattcagacactattcctgaagacgtccttcctggaaaattgatcatgcagatctctgctacagacgcagacatccgctctaacgctgaaattacttacacgttattgggttcaggtgcagaaaaattcaaactaaatccagacacaggtgaactgaaaacgtcaaccccccttgatcgtgaggagcaagctgtttatcatcttctcgtcagggccacagatggaggaggaagattctgccaagccagtattgtgctcacgctagaagatgtgaacgataacgcccccgaattctctgccgatccttatgccatcaccgtgtttgaaaacacagagccgggaacgctgctgacaagagtgcaggccacagatgccgacgcaggattaaatcggaagattttatactcactgattgactctgctgatgggcagttctccattaacgaattatctggaattattcagttagaaaaacctttggacagagaactccaggcagtatacaccctctctttgaaagctgtggatcaaggcttgccaaggaggctgactgccactggcactgtgattgtatcagttcttgacataaatgacaacccccctgtgtttgagtaccgtgaatatggtgccaccgtgtctgaggacattcttgttggaactgaagttcttcaagtgtatgcagcaagtcgggatattgaagcaaatgcagaaatcacctactcaataataagtggaaatgaacatgggaaattcagcatagattctaaaacaggggccgtatttatcattgagaatctggattatgagagctctcatgagtattacctaacagtagaggccactgatggaggcacgccttcactgagcgacgttgccactgtgaacgttaatgtaacagatatcaacgataatacccctgtgttcagccaagacacctacacgacagtcatcagtgaagatgccgttcttgagcagtctgtcatcacggttatggccgatgatgccgatggaccttccaacagccacatccactactcaattatagatggcaaccaaggaagctcgttcacaattgaccccgtcaggggagaagtcaaagtgaccaaacttctcgaccgagaaacgatttcaggttacacgctcacggttcaagcttctgataatggcagtccacccagagtcaacacgacgaccgtgaacatcgatgtgtccgatgtcaatgacaacgcgcccgtcttctccaggggaaactacagtgtcattatccaggaaaataagccagtgggcttcagcgtgctgcagctggtagtaacagatgaggattcttcccataacggtccacccttcttctttactattgtaactggaaatgatgagaaggcttttgaagttaacccgcaaggagtcctcctgacatcatctgccatcaagaggaaggagaaagatcattacttactgcaggtgaaggtggcagataatggaaagcctcagttgtcatctttgacatacattgacattagggtaattgaggagagcatctatccgcctgcgattttgcccctggagattttcatcacctcttctggagaagaatactcaggtggcgtcattgggaagatccatgccacagaccaggacgtgtatgatactctaacctacagtctcgaccctcagatggacaacctgttctctgtttccagcacagggggcaagctgatagcacacaaaaagctagacatagggcaataccttctcaatgtcagcgtaacagatgggaagttcacgacggtggccgacatcacagtgcatatcagacaagtcacacaggagatgttgaaccacaccatcgcgatccgctttgccaacctcactccggaagaattcgttggtgactactggcgcaacttccagcgagctttacggaacatcctgggtgtgaggaggaacgacatacagattgttagtttgcagtcctctgaacctcacccacatctggacgtcttactttttgtagagaaaccaggtagtgctcagatctcaacaaaacaacttctgcacaagattaactcttccgtgactgacattgaggaaatcattggagttaggatactgaatgtattccagaaactctgcgcgggactggactgcccctggaagttctgcgatgaaaaggtgtctgtggatgaaagtgtgatgtcaacacacagcacagccagactgagttttgtgactccccgccaccacagggcagcggtgtgtctctgcaaagagggaaggtgcccacctgtccaccatggctgtgaagatgatccgtgccctgagggatccgaatgtgtgtctgatccctgggaggagaaacacacctgtgtctgtcccagcggcaggtttggtcagtgcccagggagttcatctatgacactgactggaaacagctacgtgaaataccgtctgacggaaaatgaaaacaaattagagatgaaactgaccatgaggctcagaacatattccacgcatgcggttgtcatgtatgctcgaggaactgactatagcatcttggagattcatcatggaaggctgcagtacaagtttgactgtggaagtggccctggaattgtctctgttcagagcattcaggtcaatgatgggcagtggcacgcagtggccctggaagtgaatggaaactatgctcgcttggttctagaccaagttcatactgcatcgggcacagccccagggactctgaaaaccctgaacctggataactatgtgttttttggtggccacatccgtcagcagggaacaaggcatggaagaagtcctcaagttggtaatggtttcaggggttgtatggactccatttatttgaatgggcaggagctccctttaaacagcaaacccagaagctatgcacacatcgaagagtcggtggatgtatctccaggctgcttcctgacggccacggaagactgcgccagcaacccttgccagaatggaggcgtttgcaatccgtcacctgctggaggttattactgcaaatgcagtgccttgtacatagggacccactgtgagataagcgtcaatccgtgttcctccaagccatgcctctatgggggcacgtgtgttgtcgacaacggaggctttgtttgccagtgtagaggattatatactggtcagaggtgtcagcttagtccatactgcaaagatgaaccctgtaagaatggcggaacatgctttgacagtttggatggcgccgtttgtcagtgtgattcgggttttaggggagaaaggtgtcagagtgatatcgacgagtgctctggaaacccttgcctgcacggggccctctgtgagaacacgcacggctcctatcactgcaactgcagccacgagtacaggggacgtcactgcgaggatgctgcgcccaaccagtatgtgtccacgccgtggaacattgggttggcggaaggaattggaatcgttgtgtttgttgcagggatatttttactggtggtggtgtttgttctctgccgtaagatgattagtcggaaaaagaagcatcaggctgaacctaaagacaagcacctgggacccgctacggctttcttgcaaagaccgtattttgattccaagctaaataagaacatttactcagacataccaccccaggtgcctgtccggcctatttcctacaccccgagtattccaagtgactcaagaaacaatctggaccgaaattccttcgaaggatctgctatcccagagcatcccgaattcagcacttttaaccccgagtctgtgcacgggcaccgaaaagcagtggcggtctgcagcgtggcgccaaacctgcctcccccacccccttcaaactccccttctgacagcgactccatccagaagcctagctgggactttgactatgacacaaaagtggtggatcttgatccctgtctttccaagaagcctctagaggaaaagccttcccagccatacagtgcccgggaaagcctgtctgaagtgcagtctctgagctccttccagtccgaatcgtgcgatgacaatgggtatcactgggatacatcagattggatgccaagcgttcctctgccggacatacaagagttccccaactatgaggtgattgatgagcagacacccctgtactcagcagatccaaacgccatcgatacggactattaccctggaggctacgacatcgaaagtgattttcctccacccccagaagacttccccgcagctgatgagctaccaccgttaccgcccgaattcagcaatcagtttgaatccatccaccctcctagagacatgcctgccgcgggtagcttgggttcttcatcaagaaaccggcagaggttcaacttgaatcagtatttgcccaatttttatcccctcgatatgtctgaacctcaaacaaaaggcactggtgagaatagtacttgtagagaaccccatgccccttacccgccagggtatcaaagacacttcgaggcgcccgctgtcgagagcatgcccatgtctgtgtacgcctccaccgcctcctgctctgacgtgtcagcctgctgcgaagtggagtccgaggtcatgatgagtgactatgagagcggggacgacggccacttcgaagaggtgacgatcccgcccctggattcccagcagcacacggaagtctgactctcaactccccccaaagtgcctgactttagtgaacctagaggtgatgtgagtaatccgcgctgttctttgcagcagtgcttccaagctttttttggtgagccgaatgggcatggctgcgctggatcctgcgcctctggacgtgctagccatttccagtgtcccaactactgtcatcgtgaggttttcatcggctgtgccatttcccaacgtcttttgggatttacatctgtctgtgttaaaataatcaaacgaaaaatcagtcctgtgttgtcagcatgattcatgtatttatatagatttgattattttaattttcctgtctcttttttttgtaaattttatgtacagatttgatttttcatagttttaactagatttccaagatattttgtgcatttgtttcaactgaattttggtggtgtcagtgccattatctagcaccctgatttttttttttttactataaccagggtttcattctgtctttttccactgaagtgtgacattttgttagtacatttcagtgtagtcattcatttctagctgtacataggatgaaggagagatcagatacatgaacatgtcttacatgggttgctgtatttagaattataaacatttttcattattggaaagtgtaacggggaccttctgcatacctgtttagaaccaaaaccaccatgacacagtttttatagtgtctgtatatttgtgatgcaatggtcttgtaaaggtttttaatgaaaactaccattagccagtctttcttactgacaataaattattaataaaat

SEQ ID NO: 1531 - DNA, 1124 bp, Homo sapiens
ggggcgctgcccggtggctctggccccgccgggccgttggcccagcccgccggcccctgagctccggtagcccgccgctggagaagctgttcgcccggggcgggcccttgcggaccttcctcgagcgccaggcggggtctgaagcccatttgaaggtcaggaggcccgagttgctggcggtgatcaaactgctgaacgagaaggagcaggagctgcgggagactgagcacttgctgcacgatgagaatgaaggtttaaggaaacttgcagagaatgaaatcactttgtgtcaaaaagaaataactcagctgaagcatcagattatcttacttttggttccctcagaagaaacagatgaaaatgatttgatcctggaagtaactgcaggagttggaggtcaggaggcaatgttgtttacatcagagatatttgatatgtatcagcaatatgctgcatttaaaagatggcattttgaaaccctggaatattttccaagtgaagtaggtggccttagacatgcatctgccagcattgggggttcagaagcctataggcacatgaaatttgaaggaggtgttcacagagtacaaagagtgccaaagacagaaaagcaaggctgcgtccatactagcaccatgactgtagcaatattaccccagcctactgagattaatctggtgattaatccgaaagatttgagaattgacactaagcgagccagtggagctggggagcagcatgtaaataccacggacagtgctgtccggatagttcatcttccaacaggtgttgtttctgaatgtcaacaagagagatctcagctgaaaaataaagagctggctatgacaaagttacgtgcaaaactgtacagcatgcatgtagaagaagaaataaataaaagacagaatgctagaaaaattcagattggaagtaaaggaagatcagagaaaataagaacatataattttccacagaaccgggtcacagatcacagaataaacaagacgctgcatgatcttgaaacttttatgcaaggagattatctactggatgaacttgtacagtcattgaaggaatacgccaattatgaatctttagtagaaattatttcccaaaaagtttaa

SEQ ID NO: 1532 - DNA, 1437 bp, Homo sapiens
atgccgctgcgggtttttgcggctttctgcccccgccgccgcggctttctgaccctggcctcgccgaatttagcccctgccgtcacggctttttggggctctttgccctcgccgccgcggctttttgccgccgcagctttttgcatctttctccccctgcctccgtggctttttgcccctgaagccacagctttttgccctcgccgccgcggctttttgcgaccttttcccccctgctgccgcagctttttgcccccaccaccgcgaatttttctgccgcggctttttgtcaccgccgccgtggctttttatggcttttggcccccggtttttcccgccgcggcttcctgccccgcagccccggctttttgcggctttttgccgccgtggcttttggcccccgccactgtggctttttacgccttttcgcccccgccgccgcaggtttttccagccgcggcttcttgcccccactgcccgggctttttgtgtcgttttgcccccgccgccgcggctttttgctgctatttgtccctgccaccacagctttttgcccccgccgccgcggctccttgccccctacgtggcttcctgtccccgcctccgcggctttttatcaccccagccgctttttgcccccgccgccacgggtttttgctcctgccgccgagggtttttgcgccttcatgtccccaccgtcgtggctttttgccgcccctgctttttgccccctctgacgcggctttttgcggctttttaccacctccaccgtggctttttgcggcttttggcaccggacgccatggctttttcaggctttttgccccgccgccacggctttttgctgccgccacaccgtttagcccccaccgcgcctttttgcacccgcagccgcatctttttgccgccgcgacttcttaccccgccaccgcggtttttaccgctgaggctttttcaccccgccgtcgcgggtttttgcccccaccgccgtggctttttgcccccaccgccgcgggtctgagggcgggattggcagactcggctgctagatctaccggcgtcctggctaaggcagcgccgacggtcactcctggtccagctctcctggttcgggggctgcatagagcagcgccaagctcggccccgatgggagagaagaaggagagcggtggagggggtgacgcggctattgcggagggaggcgcaggggccgcagccagccgggtgctgcagcagtgcgggcagctccagaagctcattggcatctcctttggcagcctgcgttggctgcgcaccaagtgcgctgagtccaaagacctcacccagcaggagatacggaccgtgcaggatgagtccgaggggctcctaggcacagaggggcccctggaggaagaagaggatggagaggagctcattggagatggcatggaaaggtaa

SEQ ID NO: 1533 - DNA, 1584 bp, Homo sapiens
atggatgaggacagctgtgtcaatgcccaggccacgggaactccacttgctaaacagaatgttatcccggaaatctgtgcccttctctgtatgcctcttgtccttttttcactgccctattcagtaacttcacaaatatataatgagcacctgccaagaaccatgtcaggcctggggcaacaaacagcccctgctgtcaaggaacccgcaggcttgtggggccgtcatgctatcaaaaggcagctccaagagagacagtgggatgagtgtcaaacagatgtttcagccaagtatggcaggagctcagaggaggcctcatcacttgttgcctgggacagacgtctggctggtctgcccacctcccaccccagccctccctgtgcgctgctgccagaatgtcttcctgaacacagctatgactgggcctactggccttggctgtttgatctaagcagaggcctaactgagactgaactaagcatttttcctctcccaggaattggaattttggaaccacgaatgagcacctctgcagccaaggcccatgagcaatggcaccctggaggagaagcccaagaagcagacctggttccagcccctttcaccgcccggggtgccacggccctttcaacgtgtatggcaggaggtgtgcagggcattcaggaggcctcctggctggcactcgacccaattagtcattcaacgccaggtctggggctgctgtctgttgtctcaaagcccatctgtgaacacatggtagagtctccaacctgttcccagatgtccaacctggtctgcggcactgatgggctcacatatacgaatgaatgccagctctgcttggcccggatcctgtttgaattcttcggccaagtgaggtacagaccagggccctatgaacacctgcaagcaagacagccacgcagttgtgggtcaccttggaagaatattggagaatgcaagagagaacagggcagcagtgaaccagttgtccaagacctggcccaggttgttgaagaggtcataggggttccacagtcttttcagaaactcatatttaaggttttactatgcccaaacagaaatcctgatgggaaaggaaaatgccttgctatatctgtaatttatcaacatgaaaacattacggttttaatcataaaattcaagagatttaacttgtttgccatcagttctccaccaaggaaagataagttgatattgccagcctttcatgagcttcctcctaacagtaggcttatcgcctttgcacattcctatagcagagaacatagatctgactgccttaagggataccaatttcctctctcttcaaattctatcatcctcagtgggcaaacagaagccagaaaatcctgccaaaaacctttcatctggtcagggagtggaggccgtgctgtgcgcgccctcttgcgggagccaccaggcaagcatcttaagaggggcaagcggaaaagggtgtctgtggatctgccctgttctggtggtttcaggcagccctgctttcttcccgcctggcagtcagcagggggggagagtcactcagagcaagatggagagccttag

SEQ ID NO: 1534 - DNA, 1585 bp, Homo sapiens
cagaagaagccctttgaggagcactggaggaagcacaccctgtcctatgtggacgttggcactgggaagtgcacagccagagaacaacacatcacacacaggaaacagttgtgctcatgtgatgggggcctcagcactaggaaggagtggactattggcacacgcagcagcttgaataaatctgaaagtcactatgctgtgtaagagaagccaaatttaaaaagtgcatgctgtgtacagagggtgtcaagaatgcctcctacgtgacggaaagcagatccgtggttgcctgcagactggcaggagcagattccaaaggcacaggaagaagcttgtgggtagaatgtgttcattaccttctgtgcattataccataaaaaagctggtcacaaaaatgcaaaccaaaaacaaaggtgaaactaggataagatttctcacctgtgtgattggtaaacgtgcagatgtgccgtcatgctttgtttatgaagctgtgggatacaaggactctcatacgtcactgtggaatgcagaatattgcagcctcatggaagaggatttggcagcgtctaacaaaactacatggcatttgccctttgactcagcaattctagaatctgcctcaaaaaaactccagcaaagaaatgaaaggactttaggcacagagttcttttcacagcctgcatgtgtttgcaacaaagttcttcactgtggcgtttgtaaatgtggggaaaagagagatcaggctggtactgtgtctgtgtagaaaaggaggacgtaagaaactccattttgatctgtaccccgagcgattgttttgccctgagatgctgttaatctgtaactttagccccagccttgagctcacagaaacctgtgttgtatggaatcaaggtttcagggatctagggctgtgcaggacgtgccttgttaagaaaatgcttacaggcagtacgcttggtaaaagttatcgccattctccattctcgataaaccaggggcacaatgcactgcggaaagccgcagggacctctgcccaggaaagccgggtaccatccaaggtttctccccactgagatatggccttgtgggatgggaaagacctgaccatccaccagcccgacacccgtgaaggatctgtgctgagtaggattagtaaaagaggaaggcctctgtctcctgccttcccctgggaacggaatgtctcagtataaaactgatcgtacatttgttcaattctgagataggagaaaaaccaccctgtggtgggaggcgagacatgttggccgcaatgctgctgttactctttactccactgaaatgtttgggtggagagaagcataaatctggcctacgtgcacatctagacatagtaccttcccttgaacttacttgtgacacagattcctttgctcacatgttttcttgctgaccttctccccactgtcaccctgttctcctgccacattcctcttgctgagatagtgaaaatagtaatcaataaatactgagggaactcagagaccggtgccagtgcgggtcctctgtatgctgagcgccagtcccctgggcccacttttctttctct

SEQ ID NO: 1535 - DNA, 2283 bp, Homo sapiens
aataaagaaatagtgctttaagtcaatgaattcctccttgggacccactatcgagaaactatcagtggtaacgttttaaaaaatgacaaattcaatctgctcttgacttgtgtgtcctaagatttccactaagtgtcttcaaacctccccctccccggcttcctggataatagaagttcccgaaggccgccgattccagaagatactgtctggcgtgaaattagtctcagtagaaacataagtcccgcgcgtcttgtgctgcgcgtgcgcaagcttttgggccctcccgagaaagggaagtgcattctcgcttccgtagcggtctccgccggttggggggaagtaattccggttgttgcaccatggcgtccatggggaccctcgccttcgatgaatatgggcgccctttcctcatcatcaaggatcaggaccgcaagtcccgtcttatgggacttgaggccctcaagtctcatataatggcagcaaaggctgtagcaaatacaatgagaacatcacttggaccaaatgggcttgataagatgatggtggataaggatggagatgtgactgtaactaatgatggggccaccatcttaagcatgatggatgttgatcatcagattgccaagctgatggtggaactgtccaagtctcaggatgatgaaattggagatggaaccacaggagtggttgtcctggctggtgccttgttagaagaagcggagcaattgctagaccgaggcattcacccaatcagaatagccgatggctatgagcaggctgctcgtgttgctattgaacacctggacaagatcagcgatagcgtccttgttgacataaaggacaccgaacccctgattcagacagcaaaaaccacgctgggctccaaagtggtcaacagttgtcaccgacagatggctgagattgctgtgaatgccgtcctcactgtagcagatatggagcggagagacgttgactttgagcttatcaaagtagaaggcaaagtgggcggcaggctggaggacactaaactgattaagggcgtgattgtggacaaggatttcagtcacccacagatgccaaaaaaagtggaagatgcgaagattgcaattctcacatgtccatttgaaccacccaaaccaaaaacaaagcataagctggatgtgacctctgtcgaagattataaagcccttcagaaatacgaaaaggagaaatttgaagagatgattcaacaaattaaagagactggtgctaacctagcaatttgtcagtggggctttgatgatgaagcaaatcacttacttcttcagaacaacttgcctgcggttcgctgggtaggaggacctgaaattgagctgattgccatcgcaacaggagggcggatcgtccccaggttctcagagctcacagccgagaagctgggctttgctggtcttgtacaggagatctcatttgggacaactaaggataaaatgctggtcatcgagcagtgtaagaactccagagctgtaaccatttttattagaggaggaaataagatgatcattgaggaggcgaaacgatcccttcacgatgctttgtgtgtcatccggaacctcatccgcgataatcgtgtggtgtatggaggaggggctgctgagatatcctgtgccctggcagttagccaagaggcggataagtgccccaccttagaacagtatgccatgagagcgtttgccgacgcactggaggtcatccccatggccctctctgaaaacagtggcatgaatcccatccagactatgaccgaagtccgagccagacaggtgaaggagatgaaccctgctcttggcatcgactgtttgcacaaggggacaaatgatatgaagcaacagcatgtcatagaaaccttgattggcaaaaagcaacagatatctcttgcaacacaaatggttagaatgattttgaagattgatgacattcgtaagcctggagaatctgaagaatgaagacattgagaaaactatgtagcaagatccacttctgtgattaagtaaatggatgtctcgtgatgcatctacagttatttattgttacatccttttccagacactgtagatgctataataaaaatagctgtttggtaaccatagtttcacttgttcaaagctgtgtaatcgtgggggtaccatctcaactgcttttgtattcattgtattaaaagaatctgtttaaacaacctttatcttctcttcgggtttaagaaacgtttattgtaacagtaattaaatgctgccttaattg

SEQ ID NO: 1536 - protein, 541 aa, Homo sapiens
MASMGTLAFDEYGRPFLIIKDQDRKSRLMGLEALKSHIMAAKAVANTMRTSLGPNGLDKMMVDKDGDVTVTNDGATILSMMDVDHQIAKLMVELSKSQDDEIGDGTTGVVVLAGALLEEAEQLLDRGIHPIRIADGYEQAARVAIEHLDKISDSVLVDIKDTEPLIQTAKTTLGSKVVNSCHRQMAEIAVNAVLTVADMERRDVDFELIKVEGKVGGRLEDTKLIKGVIVDKDFSHPQMPKKVEDAKIAILTCPFEPPKPKTKHKLDVTSVEDYKALQKYEKEKFEEMIQQIKETGANLAICQWGFDDEANHLLLQNNLPAVRWVGGPEIELIAIATGGRIVPRFSELTAEKLGFAGLVQEISFGTTKDKMLVIEQCKNSRAVTIFIRGGNKMIIEEAKRSLHDALCVIRNLIRDNRVVYGGGAAEISCALAVSQEADKCPTLEQYAMRAFADALEVIPMALSENSGMNPIQTMTEVRARQVKEMNPALGIDCLHKGTNDMKQQHVIETLIGKKQQISLATQMVRMILKIDDIRKPGESEE

SEQ ID NO: 1537 - DNA, 1121 bp, Homo sapiens
gtatctgtccggacggaagcaggaagcgggagcgtagggccacgcctgcggcgctgctggttgaggctgtgtgggtcggggacgggccgaggcgatggcggagaagtttgaccacctagaggagcacctggagaagttcgtggagaacattcggcagctcggcatcatcgtcagtgacttccagcccagcagccaggccgggctcaaccaaaagctgaattttattgttactggcttacaggatattgacaagtgcagacagcagcttcatgatattactgtaccgttagaagtttttgaatatatagatcaaggtcgaaatccccagctctacaccaaagagtgcctggagagggctctagctaaaaatgagcaagttaaaggcaagatcgacaccatgaagaaatttaaaagcctgttgattcaagaactttctaaagtatttccggaagacatggctaagtatcgaagcatccggggggaggatcacccgccttcttaaccagctcaccctccctgtgtgaagatcccccgggactgcgatgcggcgtgaggctgggactgcgagtgctgacgccaccttcctgctgaggtgggactgggccctggacacacccctcagcccctctgtcctcattgtttggcctcatgggaccgaggggctggaggagaggcggagctgtgccccagctgttccagcagcttgtctggcgtcaactggctttcagagtgctgacccctcatcactgtggggatcattctctctgagggcagatgaggcgcaggaaaatagtcttggaaatgttaaatatgatgggtaaattaaaagttttacaacattctacctaatatttttcttttaacatactttttctgttctattgtattatggtgtccgaaagctaaataacgactaggaaaaatttttttaaaaaaagaaaaatcagtttaatgtgggaagtacttaagtggtattatattttacattttcaagtatagtgcataaagaatgttttaaatgtaactgttttcatggatttcaattagacatgcctataataaactaagtatgtggcttattccatgtaattatttttgtaatataatacaatgtgtcttgt

SEQ ID NO: 1538 - protein, 135 aa, Homo sapiens
MAEKFDHLEEHLEKFVENIRQLGIIVSDFQPSSQAGLNQKLNFIVTGLQDIDKCRQQLHDITVPLEVFEYIDQGRNPQLYTKECLERALAKNEQVKGKIDTMKKFKSLLIQELSKVFPEDMAKYRSIRGEDHPPS

SEQ ID NO: 1539 - DNA, 2367 bp, Homo sapiens
gggatttgttattgcgaatgatgtggacaacaagcgctgctacctgctcgtccatcaagccaagaggctgagcagcccctgcatcatggtggtcaaccatgatgcctccagcatacccaggctccagatagatgtggacggcaggaaagagatcctcttctatgatcgaattttatgtgatgtcccttgcagtggagacggcactatgagaaaaaacattgatgtttggaaaaagtggaccaccttaaatagcttgcagctacatggcttacagctgcggattgcaacacgcggggctgaacagctggctgaaggtggaaggatggtgtattccacgtgttcactaaaccctattgaggatgaagcagtcatagcatctttactggaaaaaagtgaaggtgctttggagcttgctgatgtgtctaatgaactgccagggctgaagtggatgcctggaatcacacagtggaaggtaatgacgaaagatgggcagtggtttacagactgggacgctgttcctcacagcagacacacccagatccgacctaccatgttccctccgaaggacccagaaaagctgcaggccatgcacctggagcgatgccttaggatattaccccatcatcagaatactggagggttttttgtggcagtattggtgaaaaaatcttcaatgccgtggaataaacgtcagccaaagcttcagggtaaatctgcagagaccagagaaagcacacagctgagccctgcagatctcacagaagggaaacccacagatccctctaagctggaaagtccgtcattcacaggaactggtgacacagaaatagctcatgcaactgaggatttagagaataatggcagtaagaaagatggcgtgtgtggtcctcctccatcaaagaaaatgaagttatttggatttaaagaagatccatttgtatttattcctgaagatgacccattatttccacctattgagaaattttatgctttggatccttcattcccaaggatgaatttgttaactcggactacagaagggaagaaaaggcagctctacatggtttctaaggagttgcggaatgtgctgctgaataacagtgagaagatgaaggttattaacacggggatcaaagtctggtgtagaaataacagcggtgaagagtttgactgtgctttccggctggcacaggagggaatatatacattgtatccatttattaactcaagaattattactgtatcaatggaagatgttaagatactgttgacccaggaaaatcccttttttagaaaactcagcagtgagacctacagtcaagcaaaggacctggcaaagggaagcatcgtgctgaagtatgaaccagattctgcgaatccagacgctctgcagtgtcccatcgtcttatgcggatggcggggaaaggcctccattcgaacttttgtgcccaagaatgaacggcttcattatctcaggatgatggggctggaggtattgggagaaaagaagaaggaaggggttatcctcacaaatgagagtgcagccagcaccggacagccagacaatgacgtgactgagggacagagagcaggagagcccaacagcccagatgcagaagaggccaacagtccagacgtgacagcaggctgtgacccggcgggggtccatccaccccggtgagcaggcccaaggcagcgggggcccacacccctcacacgcaaaactggcttcttctggtcactggtgtctgaaaccaaatccagagcagcctgtggcctgtaaagcatatatttctaatgactgcagactggtgggatcataggagccttctgaatgaccaggactgctttctttggagctgatgaaaatgtactcttttagcgtgttagaaatcacttgttttattttgtttctttggccaagctgggtctagtgtttcttttgctgggaatagactttcaaaagttgtacttctatcaagaaacaaaactgcccttgcagaaatttcaggtcttttgttaagcctgtattggtcttaaggtgcagtattttttaaattattatttatagaaagaatctataaattcttggggaagtgtgttataagctttaataattacattgagctgcacctcagtggtgtgtcattaacatgcagtggggttaatatctgaggcctcagatgactttgtgccttttggaataaagggtaaaataaactctcccagagtaagagctgtatcgtgaattgtcatactaattattgagggggacttatgtgcttttattgaatggagtgctttacaatttttatttttaaatggggttgggatccttggaatatttcaataaaattgataaaatat

SEQ ID NO: 1540 - DNA, 2213 bp, Homo sapiens
tcctgcttcgccctcccagcgcctagaagcctgcagctccggagcagtggccgcgccacgccggccccagcgcgcagaaccctgcaggccccgcccgtccgccccgggccgcgcccgccatgtcctacccgcagtttggatacccctactcctcggctccccagttcttgatggccaccaactccctgagcacgtgctgcgagtccggaggccgcacgctggcggactccgggcccgccgcctcggcccaggcgccggtctactgcccggtctacgagagccggctgctggccaccgcgcgccacgagctcaactcggccgcggcgctgggcgtctatgggggtccctatggcggatcgcagggctatggcaactacgtgacctacggctcggaggcgtccgccttctactcgctgaacagctttgattccaaggatggttcgggatctgcgcatgggggcctggcaccagccgctgccgcctactacccttacgagccagctctgggccagtacccctatgacaggtatggaaccatggacagcggcacgcggcgcaagaacgccacgcgcgagaccaccagcacgctcaaggcctggctgcaggagcaccgcaagaacccctaccccaccaagggcgagaagatcatgctggccatcatcaccaagatgaccctcacacaggtctccacctggttcgccaacgcgcgccggcgcctcaagaaggagaacaagatgacgtggccgccgcggaacaagtgcgcagacgagaagcggccctacgcggagggcgaggaggaggaggggggcgaggaggaggcgcgggaggagcccctcaagagctccaagaacgcagagcccgtgggcaaagaggagaaggagctggagcttagtgacttggacgacttcgacccgctggaagcagagccgccggcgtgcgagctgaagccgcccttccactccctggacggcggtctggagcgcgtccccgccgcgcccgacggcccggtcaaggaggcctcaggcgcgctccggatgtctctggccgcgggtggcggagctgctctggacgaggacctggagagggcccggagctgtctccgcagcgcggcggccgggccggagccactgccgggcgcagagggcggccctcaggtctgcgaggccaagctggggtttgtgccggcgggggcgtcggcaggcctggaggctaagccgcgcatctggtccctggcccacacagccaccgccgccgccgccgccgccacctccctgagccagactgagtttccgtcgtgcatgctcaagcgccaaggtcccgcggcccctgcggctgtgtcctccgcgcccgccacgtccccgtctgtggcccttccccactctggcgccctggacaggcaccaggactccccggtaaccagtctcagaaactgggtggacggggtcttccacgaccccatcctcaggcacagcactttgaaccaggcctgggccaccgccaagggcgccctcctggaccccgggcctctgggacgctcgctgggggcgggcgcgaacgtgctgactgcacccctggcccgcgcctttccgcctgccgtgccccaggacgccccagctgcaggcgccgccagggagctgctcgccctgcccaaggccggcggcaaacccttctgcgcctgaggcgggcgggtcccgagcccaggagggaacccgcgctcaggcggacggcgccgactcttttcactgagtttccagaggaagactagcgcggccaccgcgaagccgccaacccaccggagagggggcttctgaacttggactcctgggaacatggacaagcccggcgctgccacgccggggcctccaccgcctgggcctgagcctgaccgggccattcccaaatttgggacgcggaaggagaggctctcggagcagaagaggccagataccctgaagcataaagtttacgtcaaaagtttacatggagaaggcggttccgttctgaagcgtggtctgctgtcccctgggcgtgaggcctcctgggcctgtcgggcctccgatttcatcctcagcacgtaatgctcaccaacagcacttgcactgagttgactcttgcacactcttgactccataatatgatgctttttaagatgtatgttcacaccaataattgcctgcttcagaggctaatataacaaaaccaataaaaccgag

SEQ ID NO: 1541 - DNA, 2276 bp, Homo sapiens
gactgcgcggcggcaacagcagacatgtcgggggtccggggcctgtcgcggctgctgagcgctcggcgcctggcgctggccaaggcgtggccaacagtgttgcaaacaggaacccgaggttttcacttcactgttgatgggaacaagagggcatctgctaaagtttcagattccatttctgctcagtatccagtagtggatcatgaatttgatgcagtggtggtaggcgctggaggggcaggcttgcgagctgcatttggcctttctgaggcagggtttaatacagcatgtgttaccaagctgtttcctaccaggtcacacactgttgcagcacagggaggaatcaatgctgctctggggaacatggaggaggacaactggaggtggcatttctacgacaccgtgaagggctccgactggctgggggaccaggatgccatccactacatgacggagcaggcccccgccgccgtggtcgagctagaaaattatggcatgccgtttagcagaactgaagatgggaagatttatcagcgtgcatttggtggacagagcctcaagtttggaaagggcgggcaggcccatcggtgctgctgtgtggctgatcggactggccactcgctattgcacaccttatatggaaggtctctgcgatatgataccagctattttgtggagtattttgccttggatctcctgatggagaatggggagtgccgtggtgtcatcgcactgtgcatagaggacgggtccatccatcgcataagagcaaagaacactgttgttgccacaggaggctacgggcgcacctacttcagctgcacgtctgcccacaccagcactggcgacggcacggccatgatcaccagggcaggccttccttgccaggacctagagtttgttcagttccaccctacaggcatatatggtgctggttgtctcattacggaaggatgtcgtggagagggaggcattctcattaacagtcaaggcgaaaggtttatggagcgatacgcccctgtcgcgaaggacctggcgtctagagatgtggtgtctcggtccatgactctggagatccgagaaggaagaggctgtggccctgagaaagatcacgtctacctgcagctgcaccacctacctccagagcagctggccacgcgcctgcctggcatttcagagacagccatgatcttcgctggcgtggacgtcacgaaggagccgatccctgtcctccccaccgtgcattataacatgggcggcattcccaccaactacaaggggcaggtcctgaggcacgtgaatggccaggatcagattgtgcccggcctgtacgcctgtggggaggccgcctgtgcctcggtacatggtgccaaccgcctcggggcaaactcgctcttggacctggttgtctttggtcgggcatgtgccctgagcatcgaagagtcatgcaggcctggagataaagtccctccaattaaaccaaacgctggggaagaatctgtcatgaatcttgacaaattgagatttgctgatggaagcataagaacatcggaactgcgactcagcatgcagaagtcaatgcaaaatcatgctgccgtgttccgtgtgggaagcgtgttgcaagaaggttgtgggaaaatcagcaagctctatggagacctaaagcacctgaagacgttcgaccggggaatggtctggaacacggacctggtggagaccctggagctgcagaacctgatgctgtgtgcgctgcagaccatctacggagcagaggcacggaaggagtcacggggcgcgcatgccagggaagactacaaggtgcggattgatgagtacgattactccaagcccatccaggggcaacagaagaagccctttgaggagcactggaggaagcacaccctgtcctatgtggacgttggcactgggaaggtcactctggaatatagacccgtgatcgacaaaactttgaacgaggctgactgtgccaccgtcccgccagccattcgctcctactgatgagacaagatgtggtgatgacagaatcagcttttgtaattatgtataatagctcatgcatgtgtccatgtcataactgtcttcatacgcttctgcactctggggaagaaggagtacattgaagggagattggcacctagtggctgggagcttgccaggaacccagtggccagggagcgtggcacttacctttgtcccttgcttcattcttgtgagatgataaaactgggcacagctcttaaataaaatataaatga

SEQ ID NO: 1542 - protein, 664 aa, Homo sapiens
MSGVRGLSRLLSARRLALAKAWPTVLQTGTRGFHFTVDGNKRASAKVSDSISAQYPVVDHEFDAVVVGAGGAGLRAAFGLSEAGFNTACVTKLFPTRSHTVAAQGGINAALGNMEEDNWRWHFYDTVKGSDWLGDQDAIHYMTEQAPAAVVELENYGMPFSRTEDGKIYQRAFGGQSLKFGKGGQAHRCCCVADRTGHSLLHTLYGRSLRYDTSYFVEYFALDLLMENGECRGVIALCIEDGSIHRIRAKNTVVATGGYGRTYFSCTSAHTSTGDGTAMITRAGLPCQDLEFVQFHPTGIYGAGCLITEGCRGEGGILINSQGERFMERYAPVAKDLASRDVVSRSMTLEIREGRGCGPEKDHVYLQLHHLPPEQLATRLPGISETAMIFAGVDVTKEPIPVLPTVHYNMGGIPTNYKGQVLRHVNGQDQIVPGLYACGEAACASVHGANRLGANSLLDLVVFGRACALSIEESCRPGDKVPPIKPNAGEESVMNLDKLRFADGSIRTSELRLSMQKSMQNHAAVFRVGSVLQEGCGKISKLYGDLKHLKTFDRGMVWNTDLVETLELQNLMLCALQTIYGAEARKESRGAHAREDYKVRIDEYDYSKPIQGQQKKPFEEHWRKHTLSYVDVGTGKVTLEYRPVIDKTLNEADCATVPPAIRSY

SEQ ID NO: 1543 - DNA, 601 bp, Homo sapiens
ctggagctgcagaacctgatgctgtgtgcgctgcagaccatctacggagcagaggcacggaaggagtcacggggcgcgcatgccagggaagactacaaggtgggccttctcaccacgcccacctgcacctgccttttcctgccacctggtgggactcagccccacccctgcattttctctgcattttctttcgttgccccaaaagtaaatccaaaaaatgcctttttcccccctggtaactttgatccctgggttctcgccatcttctggatcactgtgaccttttccttgctttgggtcggcatccactgatgccagcagtggcatctccaagccaatgtgctttgctgttagaaggccaaggttagaagtgcagctagagtggcaagaccaggaaataaatgccagtttattaaataacgagtaagccaccgtttcaaacctgccctgtggaggaaatgccagtttattaaataacgagtaagccaccgtttcaaacctgccctgtggaggaaatgccagtttattaaataacgagtaagccaccgtttcaagcctgccctgtggaggaaatgccagtttattaaataacgagtaagcc

SEQ ID NO: 1544 - DNA, 3123 bp, Homo sapiens
tttacgatatccaaataaactggacaccatcacatggacgtggcaaggacctggagcgctggaaatcctgtggctcacgctgtgtcagtttcacaaccaagtggaaatcgagttccttcctgtgtacagcccttctgaggaggagaagaggaaccccgcgctgtatgccagcaacgtgcggcgagtcatggccgaggccttgggtgtctccgtgactgactacacgttcgaggactgccagctggccctggcggaaggacagctccgtctccccgctgacacttgccttttagaatttgccaggctcgtgcggggcctcgggctaaaaccagaaaagcttgaaaaagatctggacagatactcagaaagagccaggatgaagggaggagagaagataggtattgcggagtttgccgcctccctggaagtccccgtttctgacttgctggaagacatgttttcactgttcgacgagagcggcagcggcgaggtggacctgcgagagtgtgtggttgccctgtctgtcgtctgccggccggcccggaccctggacaccatccagctggctttcaagatgtacggagcgcaagaggacggcagcgtcggcgaaggtgacctgtcctgcatcctcaagacggccctgggggtggcagagctcaccgtgaccgacctattccgagccattgaccaagaggagaaggggaagatcacattcgctgacttccacaggtttgcagaaatgtaccctgccttcgcagaggaatacctgtacccggatcagacacatttcgaaagctgtgcagagacctcacctgcgccaatcccaaacggcttctgtgccgatttcagcccggaaaactcagacgctgggcggaagcctgttcgcaagaagctggattaggacccagggttgcggagagacgcggcccctcccgcgtggacatcaccgccatgagcctctttgcgagtgacctctgggctccgctcctcactcctgctgtacaggcactgtcttcagcccgagttccaggggcctcgggggctgtttgtatcttgttcctttgtgaagtgtgttgcagaaccgacgcttactgtgcgagaatcggagggcgcgcacgcggatcccccgcctggcctggaccccgtggggtcaggttccctgccgggcggggggcaccggtgccgccccgtgttctcccacggggccctggtttcgagtctctgtcacagcctcttccggcggcagcgtgcaccgggcgggcctccgtgcacactcagcacacgcctgccacacagcgtgcgcttgcgtgtcactctggcacgaaacctgtctgcctctgtggatccacagcctggcagagccgagccgtcacctgatttttcagtgtttctacctgtgtgctggagctcatgagtattttataaactccatttaggtacttcaggaaacatgcagcattttttaaaaaatgaaaattgtttttctacttcatttttccttttagagtcaaaggatatttatttataggcctttttttttttaatatagaatctgaggctgtttgggctttgacttaaatttccatcaggcctctctccagcaggtaatccctctccttccgctgggtcccctggggaggtgtgaactcaagggcctagccccaaaacactttttctgcttttcttaatccttttccagtcccctctttttttataaacgttggcagtttgatgtttctgtttcggcataacgtaatccatttcactgtagcctaaactccagtccgaggttggatattgttcaaatgagcagggcccgagctggaagcgcaaggcagccgccgccgtgccgctcctcccttgccctcaggccaggtccctgctggaagcggctgcatcttcctgtcagccctggtttccatggtgactggcgtcacgctgccacccgagtatggctgaccttcctgcagagagaggagccgcagtcttttgcttgtggaaggagacgctgggctgtgcggtgcggagggtgatgaggatgtctggtgacagccgtgcggacaccactcctctctgcagcactgcctcccagcgccagggtcgcgggcacatcccactgagagcgggggtcctgccccatcttagagtcaaaggcagaggggcttccaggccctggatggggtattttggtgtcacctgaagtccctctgacatcaccttgtttcatcattttttatgacagaattagaaacccatccttcaagcacaataatcatcacagacttgagtttgcttcctaaagcaaaggctccgggtttgtttggaaaatttttttgatttctgaaatgaattgatttttatatttggggcatctctatagaaagtgaccaccaaggccagtaagtacgggaaaaaatgtttactaacttcctcagagattcgtgatacgcgtttctccactgacagacatttaaaaacaaccttcagctccgtttcaatcaatcacctcgacttgttttttagcatggacactgccagcaggacagacagggatggagtaaaccgaagtcaatttcagggctcttggcgtgttggacacagaagaaatcctagtgcagcctttggtagctaacagtcactgattttataattggagaatgcgtaaagattcatttttcaaggagaagagcctgcaaatggccaatgaaggaggtaaataaactaagatattccgagggaagggacccaggccacctcccttccgcaggtctgcagatgaagggttttttgaatgaaatgccactgtgcattttcagaaaaaaaaatctctgataaacagactttgaatggatgtttgttcctcctgattctcttttctcttcgtggcgacttagagttggcggatattcggaactgtgaatgtacatagcgttgagttaaaccccttgtgtgtgagacaggacgcagcgggcccctggtggcctgggggccagacccgtgggcaggtggggcatgggccctggcctgcggggacctgctggggtgtgagggcagagggagggttgccatgaaggaacttgggattttcaatggaataagtaaaacataaagtctatacttggg

SEQ ID NO: 1545 - DNA, 2165 bp, Homo sapiens
ggcggctgagaggcgggcgggccgggggcgccgggcgcggggccgccatgtggagcggccgcagctccttcaccagcttggtggtgggcgtgttcgtggtctacgtggtgcacacctgctgggtcatgtacggcatcgtctacacccgcccgtgctccggcgacgccaactgcatccagccctacctggcgcggcggcccaagctgcagctgagcgtgtacaccacgacgaggtcccacctgggtgctgagaacaacatcgacctggtcttgaatgtggaagactttgatgtggagtccaaatttgaaaggacagttaatgtttctgtaccaaagaaaacgagaaacaatgggacgctgtatgcctacatcttcctccatcacgctggggtcctgccgtggcacgacgggaagcaggtgcacctggtcagtcctctgaccacctacatggtccccaagccagaagaaatcaacctgctcaccggggagtctgatacacagcagatcgaggcggagaagaagccgacgagtgccctggatgagccagtgtcccactggcgaccgcggctggcgctgaacgtgatggcggacaactttgtctttgacgggtcctccctgcctgccgatgtgcatcggtacatgaagatgatccagctggggaaaaccgtgcattacctgcccatcctgttcatcgaccagctcagcaaccgcgtgaaggacctgatggtcataaaccgctccaccaccgagctgcccctcaccgtgtcctacgacaaggtctcactggggcggctgcgcttctggatccacatgcaggacgccgtgtactccctgcagcagttcgggttttcagagaaagatgctgatgaggtgaaaggaatttttgtagataccaacttatacttcctggcgctgaccttctttgtcgcagcgttccatcttctctttgatttcctggcctttaaaaatgacatcagtttctggaagaagaagaagagcatgatcggcatgtccaccaaggcagtgctctggcgctgcttcagcaccgtggtcatctttctgttcctgctggacgagcagacgagcctgctggtgctggtcccggcgggtgttggagccgccattgagctgtggaaagtgaagaaggcattgaagatgactattttttggagaggcctgatgcccgaatttcagtttggcacttacagcgaatctgagaggaaaaccgaggagtacgatactcaggccatgaagtacttgtcatacctgctgtaccctctctgtgtcgggggtgctgtctattcactcctgaatatcaaatataagagctggtactcctggttaatcaacagcttcgtcaacggggtctatgcctttggtttcctcttcatgctgccccagctctttgtgaactacaagttgaagtcagtggcacatctgccctggaaggccttcacctacaaggctttcaacaccttcattgatgacgtctttgccttcatcatcaccatgcccacgtctcaccggctggcctgcttccgggacgacgtggtgtttctggtctacctgtaccagcggtggctttatcctgtggataaacgcagagtgaacgagtttggggagtcctacgaggagaaggccacgcgggcgccccacacggactgaaggccgcccgggctgccgccagccaagtgcaacttgaattgtcaatgagtatttttggaagcatttggaggaattcctagacattgcgttttctgtgttgccaaaatcccttcggacatttctcagacatctcccaagttcccatcacgtcagatttggagctggtagcgcttacgatgcccccacgtgtgaacatctgtcttggtcacagagctgggtgctgccggtcaccttgagctgtggtggctcccggcacacgagtgtccggggttcggccatgtcctcacgcgggcaggggtgggagccctcacaggcaagggggctgttggatttccatttcaggtggttttctaagtgctccttatgtgaatttcaaacacgtatggaattcattccgcatggactctgggatcaaaggctctttcctcttttgtttgagagttggttgttttaaagcttaatgtatgtttctattttaaaataaaaaaaaaaaaaaaaaaa

SEQ ID NO: 1546 - protein, 538 aa, Homo sapiens
MWSGRSSFTSLVVGVFVVYVVHTCWVMYGIVYTRPCSGDANCIQPYLARRPKLQLSVYTTTRSHLGAENNIDLVLNVEDFDVESKFERTVNVSVPKKTRNNGTLYAYIFLHHAGVLPWHDGKQVHLVSPLTTYMVPKPEEINLLTGESDTQQIEAEKKPTSALDEPVSHWRPRLALNVMADNFVFDGSSLPADVHRYMKMIQLGKTVHYLPILFIDQLSNRVKDLMVINRSTTELPLTVSYDKVSLGRLRFWIHMQDAVYSLQQFGFSEKDADEVKGIFVDTNLYFLALTFFVAAFHLLFDFLAFKNDISFWKKKKSMIGMSTKAVLWRCFSTVVIFLFLLDEQTSLLVLVPAGVGAAIELWKVKKALKMTIFWRGLMPEFQFGTYSESERKTEEYDTQAMKYLSYLLYPLCVGGAVYSLLNIKYKSWYSWLINSFVNGVYAFGFLFMLPQLFVNYKLKSVAHLPWKAFTYKAFNTFIDDVFAFIITMPTSHRLACFRDDVVFLVYLYQRWLYPVDKRRVNEFGESYEEKATRAPHTD

SEQ ID NO: 1547 - DNA, 525 bp, Homo sapiens
cttcccttttgcggctatcaccgaagcaggagtggccaaaatgaagtttaatccctttgtgacttccgaccgaagcaagaatcgcaaaaggcatttcaatgcaccttcccacattcgaaggaagactatgtcttcccctctttccaaagagctgagacagaagtacaacgtgtgatccatgcccatccgaaaggatgatgaagttcaggttgtacgtggacactataaaggtcagcaaattggcaaagtagtccaggtttacaggaagaaatatgttatctacattgaacgggtgcagcgggaaaaggctaatggcacaactgtccacgtaggcattcaccccagcaaggtggttatcactaggctaaaactggacaaagactgtgaaaagatccttgaacggaaagccaaatcttgccaagtaggaaaggaaaagggcaaatacaaggaagaaacaattgagaagatgcaggaataaagtaatcttatatacaagcttcgattaaaacttgaaacaaagaaaaa

SEQ ID NO: 1548 - DNA, 751 bp, Homo sapiens
ccagaacacaggtgtcatgaaaactacccctaaaagccaaaatgggaaaggaaaagactcatatcaacattgtcgtcattggacacgtagattcggcaggatgtctacaaaattggtggtattggtagtgttcctgttggccgagtggagactggtattctcaaacccggtatggtggtcacctttgctccagtcaacgttacaacagaagtaaaatctgtcgaaatgcaccatgaagctttgggtgaagctcttcctggggacagtgtgggcttccatgtcaagaatgtgtctgtcaaggatgttcgtcgtggcaacgttgctggtgacagcaaaaatgacccaccaatggaagcagctggcttcactgctcaggtgattatcctgaaccatccaggccaaataagcgctggctatgcccctgtattggattgccacacggctcatattgcatgcaagtttgctgagctgaaggaaaagattgatcgccgttctggtaaaaagctggaagatggccctaaattcttgaagtccggtgatgctgccattgttgatatggttcctggcaagcccatgtgtgctgagagcttctcagactatccacctttgggtcgctttgctgttcgtgatatgagacacacagttgcggtgggtgtcatcaaagcagtggacaagaaggctgctggagctggcaaggtcaccaactctgcccagaaagctcagatggctaaatgaatattatccctaatac

SEQ ID NO: 1549 - DNA, 711 bp, Homo sapiens
cgacacagtagcatttgtgccaatttctggttggaatggtaacaacatgctggagccaagtgctaacatgccttggttcaagggatggaaagtcacccgtaaggatggcaatgccagtggaaccatgctgcttgaggctctggactgcatcctaccaccaactcgtccaactgacaagcccttgcgcctgcctctccaggatgtctacaaaattggtggtattggtagtgttcctgttggccgagtggagactggtattctcaaacccggtatggtggtcacctttgctccagtcaacgttacaacagaagtaaaatctgtcgaaatgcaccatgaagctttgggtgaagctcttcctggggacagtgtgggcttccatgtcaagaatgtgtctgtcaaggatgttcgtcgtggcaacgttgctggtgacagcaaaaatgacccaccaatggaagcagctggcttcactgctcaggtgattatcctgaaccatccaggccaaataagcgctggctatgcccctgtattggattgccacacggctcatattgcatgcaagtttgctgagctgaaggaaaagattgatcgccgttctggtaatatggttcctggcaagcccatgtgtgctgagagcttctcagactatccacctttgggtcgctttgctgttcgtgatatgagacacacagttgcggtgggtgtcatcaaagc

SEQ ID NO: 1550 - DNA, 719 bp, Homo sapiens
gccaaaatgggaaaggaaaagactcatatcaacattgtcgtcattggacacgtagattcgggcaagtccaccactactggccatctgatctataaatgcagtagcatcgacaaaagaaccattgaaaaatttgagaaggagactgctgagatgggaaagggctctttcaagtatggctgggtcttggataaactgaaagctgagcgtgaacgtggtatcaccattgatatctccttgtggaaatttgagaccagcaagtactatgtgactatcactgatgctccaggacacagagacttcatcaaaaacatgattacagggacatctcaggctgactgtgctgtcccgattgttgctgctggtgttggtgaatttgaagctggtatctctaagaatgggcagacccgagagcatgcccttctggcttacacactgggtgtgaaacaactaattgttggtgttaacaaaatggattccactgagccaccctacagccagaagagatatgaggaaattgttaaggaagtcagcacttacattaagaaaattggctacaaccccgacacagtagcatttgtgccaaattcttgaagtccggtgatgctgccattgttgatatggttcctggcaagcccatgtgtgctgagagcttctcagactatccacctttgggtcgctttgctgttcgtgatatgagacacacagttgcggtgggtgtc

SEQ ID NO: 1551 - DNA, 723 bp, Homo sapiens
aaattgttaaggaagtcagcacttacattaagaaaattggctacaaccccgacacagtagcatttgtgccaatttctggttggaatggtaacaacatgctggagccaagtgctaacatgccttggttcaagggatggaaagtcacccgtaaggatggcaatgccagtggaaccatgctgcttgaggctctggactgcatcctaccaccaactcgtccaactgacaagcccttgcgcctgcctctccaggatgtctacaaaattggtggtattggtagtgttcctgttggccgagtggagactggtattctcaaacccggtatggtggtcacctttgctccagtcaacgttacaacagaagtaaaatctgtcgaaatgcaccatgaagctttgggtgaagctcttcctggggacagtgtgggcttccatgtcaagaatgtgtctgtcaaggatgttcgtcgtggcaacgttgctggtgacagcaaaaatgacccaccaatggaagcagctggcttcactgctcaggtgattatcctgaaccatccaggccaaataagcgctggctatgcccctgtattggattgccacacggctcatattgcatgcaagtttgctgagctgaaggaaaagattgatcgccgttctggtaaaaagctggaagatggccctaaccacctttgggtcgctttgctgttcgtgatatgagacacacagttgcggtggg

SEQ ID NO: 1552 - DNA, 825 bp, Homo sapiens
ctttttcacaacgggtttgccgccagaacacaggtgtcatgaaaactacccctaaaagccaaaatgggaaaggaaaagactcatatcaacattgtcgtcattggacacgtagattcgggcaagtccaccactactggccatctgatctataaatgcagtagcatcgacaaaagaaccattgaaaaatttgagaaggagactgctgagatgggaaagggctctttcaagtatggctgggtcttggataaactgaaagctgagcgtgaacgtggtatcaccattgatatctccttgtggaaatttgagaccagcaagtactatgtgactatcactgatgctccagggatgtctacaaaattggtggtattggtagtgttcctgttggccgagtggagactggtattctcaaacccggtatggtggtcacctttgctccagtcaacgttacaacagaagtaaaatctgtcgaaatgcaccatgaagctttgggtgaagctcttcctggggacagtgtgggcttccatgtcaagaatgtgtctgtcaaggatgttcgtcgtggcaacgttgctggtgacagcaaaaatgacccaccaatggaagcagctggcttcactgctcaggtgattatcctgaaccatccaggccaaataagcgctggctatgcccctgtattggattgccacacggctcatattgcatgcaagtttgctgagctgaaggaaaagattgatcgccgttctggtaaaaagctggaagatggccctaaattcttgaagtccggtgatgctgccattgttgatatggttcctggcaagcccatgtgtg

SEQ ID NO: 1553 - DNA, 839 bp, Homo sapiens
ctttttcacaacgggtttgccgccagaacacaggtgtcatgaaaactacccctaaaagccaaaatgggaaaggaaaagactcatatcaacattgtcgtcattggacacgtagattcgggcaagtccaccactactggccatctgatctataaatgcagtagcatcgacaaaagaaccattgaaaaatttgagaaggagactgctgagatgggaaagggctctttcaagtatggctgggtcttggataaactgaaagctgagcgtgaacgtggtatcaccattgatatctccttgtggaaatttgagaccagcaagtactatgtgactatcactgatgctccaggacacagagacttcatcaaaaacatgattacagggacatctcaggctgactgtgctgtcccgattgttgctgctggtgttttctcaaacccggtatggtggtcacctttgctccagtcaacgttacaacagaagtaaaatctgtcgaaatgcaccatgaagctttgggtgaagctcttcctggggacagtgtgggcttccatgtcaagaatgtgtctgtcaaggatgttcgtcgtggcaacgttgctggtgacagcaaaaatgacccaccaatggaagcagctggcttcactgctcaggtgattatcctgaaccatccaggccaaataagcgctggctatgcccctgtattggattgccacacggctcatattgcatgcaagtttgctgagctgaaggaaaagattgatcgccgttctggtaaaaagctggaagatggccctaaattcttgaagtccggtgatgctgccattgttgatatggttcctggcaagccc

SEQ ID NO: 1554 - DNA, 967 bp, Homo sapiens
ctttttcacaacgggtttgccgccagaacacaggtgtcatgaaaactacccctaaaagccaaaatgggaaaggaaaagactcatatcaacattgtcgtcattggacacgtagattcgggcaagtccaccactactggccatctgatctataaatgcagtagcatcgacaaaagaaccattgatatctccttgtggaaatttgagaccagcaagtactatgtgactatcactgatgctccaggacacagagacttcatcaaaaacatgattacagggacatctcaggctgactgtgctgtcccgattgttgctgctggtgttggtgaatttgaagctggtatctctaagaatgggcagacccgagagcatgcccttctggcttacacactgggtgtgaaacaactaattgttggtgttaacaaaatggattccactgagccaccctacagccagaagagatatgaggaaattgttaaggaagtcagcacttacattaagaaaattggctacaaccccgacacagtagcatttgtgccaatttctggttggaatggtaacaacatgctggagccaagtgctaacatgccttggttcaagggatggaaagtcacccgtaaggatggcaatgccagtggaaccatgctgcttgaggctctggactgcatcctaccaccaactcgtccaactgacaagcccttgcgcctgcctctccaggatgtctacaaaattggtggtattggtagtgttcctgttggccgagtggagactggtattctcaaacccggtatggtggtcacctttgctccagtcaacgttacaacagaagttgtgggcttccatgtcaagaatgtgtctgtcaaggatgttcgtcgtggcaacgttgctggtgacagcaaaaatgacccaccaatggaagcagctggcttcactgctcaggtgattatcctgaaccatccaggccaaataa

SEQ ID NO: 1555 - DNA, 797 bp, Homo sapiens
tataaatgcagtagcatcgacaaaagaaccattgaaaaatttgagaaggagactgctgagatgggaaagggctctttcaagtatggctgggtcttggataaactgaaagctgagcgtgaacgtggtatcaccattgatatctccttgtggaaatttgagaccagcaagtactatgtgactatcactgatgctccaggacacagagacttcatcaaaaacatgattacagggacatctcaggctgactgtgctgtcccgattgttgctgctggtgttggtgaatttgaagctggtatctctaagaatgggcagacccgagagcatgcccttctggcttacacactgggtgtgaaacaactaattgttggtgttaacaaaatggattccactgagccaccctacagccagaagagatatgaggaaattgttaaggaagtcagcacttacattaagaaaattggctacaaccccgacacagtagcatttgtgccaatttctggttggaatggtaacaacatgctggagccaagtgctaacatgccttggttcaagggatggaaagtcacccgtaaggatggcaatgccagtggaaccatgctgcttgagggctccagtcaacgttacaacagaagtaaaatctgtcgaaatgcaccatgaagctttgggtgaagctcttcctggggacagtgtgggcttccatgtcaagaatgtgtctgtcaaggatgttcgtcgtggcaacgttgctggtgacagcaaaaatgacccaccaatggaagcagctggcttcactgctcagg

SEQ ID NO: 1556 - DNA, 1691 bp, Homo sapiens; identical to SEQ ID NO: 1202

SEQ ID NO: 1557 - DNA, 1427 bp, Homo sapiens
gaactccaagatgggaggcaagctcagcaagaagaagaagggctacaatgtgaacgacgagaaagccaaggagaaagacaagaaggccgagggcgcggcgacggaagaggaggggaccccgaaggagagtgagccccaggcggccgcagagcccgccgaggccaaggagggcaaggagaagcccgaccaggacgccgagggcaaggccgaggagaaggagggcgagaaggacgcggcggctgccaaggaggaggccccgaaggcggagcccgagaagacggagggcgcggcagaggccaaggctgagcccccgaaggcgcccgagcaggagcaggcggcccccggccccgctgcgggcggcgaggcccccaaagctgctgaggccgccgcggccccggccgagagcgcggcccctgccgccggggaggagcccagcaaggaggaaggggaacccaaaaagactgaggcgcccgcagctcctgccgcccaggagaccaaaagtgacggggccccagcttcagactcaaaacccggcagctcggaggctgccccctcttccaaggagacccccgcagccacggaagcgcctagttccacacccaaggcccagggccccgcagcctctgcagaagagcccaagccggtggaggccccggcagctaattccgaccaaaccgtaaccgtgaaagagtgacaaggacagcctataggaaaaacaataccacttaaaacaatctcctctctctctctctctctctctctctatctctctctctatctcctctctctctctcctctcctatctctcctctctctctctcctatactaacttgtttcaaattggaagtaatgatatgtattgcccaaggaaaaatacaggatgttgtcccatcaagggagggagggggtgggagaatccaaatagtatttttgtggggaaatatctaatataccttcagtcaactttaccaagaagtcctggatttccaagatccgcgtctgaaagtgcagtacatcgtttgtacctgaaactgccgccacatgcactcctccaccgctgagagttgaatagcttttcttctgcaatgggagttgggagtgatgcgtttgattctgcccacagggcctgtgccaaggcaatcagatctttatgagagcagtattttctgtgttttctttttaatttacagcctttcttattttgatatttttttaatgttgtggatgaatgccagctttcagacagagcccacttagcttgtccacatggatctcaatgccaatcctccattcttcctctccagatatttttgggagtgacaaacattctctcatcctacttagcctacctagatttctcatgacgagttaatgcatgtccgtggttgggtgcacctgtagttctgtttattggtcagtggaaatg

SEQ ID NO: 1558 - protein, 227 aa, Homo sapiens
MGGKLSKKKKGYNVNDEKAKEKDKKAEGAATEEEGTPKESEPQAAAEPAEAKEGKEKPDQDAEGKAEEKEGEKDAAAAKEEAPKAEPEKTEGAAEAKAEPPKAPEQEQAAPGPAAGGEAPKAAEAAAAPAESAAPAAGEEPSKEEGEPKKTEAPAAPAAQETKSDGAPASDSKPGSSEAAPSSKETPAATEAPSSTPKAQGPAASAEEPKPVEAPAANSDQTVTVKE

SEQ ID NO: 1559 - DNA, 736 bp, Homo sapiens
cgagagtcgtcggggtttcctgcttcaacagtgcttggacagaacctggcgctcgtcccccacaccggccggctgcccatagccagccctccgtcacctcctcacccgcagccgcctctccttagtcgccgccatgacgaccgcgtccacctcacaggtgcgccaggactaccaccaggactaaaggccgccatcaaccgccagatcaacctggagctctacgcctcctgcgtttacctgtccatgtcttactactttgaccgcgatgatgtggctttgaagaactttgccaaatactttcttcaccaatctcatgaggagagggaacatgctgagaaactgatgaagctgcagaaccaaggaggtggccgaatcttccttcaggatatcaagaaaccggactgtgatgactgggagagcgggctgaatgcgatggagtgtgcattacatttggaaaaaaatgtgaatcagtcactactggaactgcacaaactggccactgacaaaaatgacccccatttgtgtgacttcattgagacacattacctgaatgagcaggtcaaagccatcaaagaattgggtgaccacatgaccaacttgtgcaagatgggagcacccgaatctagcttggcggaatatctctttgaccagcacaccctgggagacagtgataatgaaagctaagcctcaggctaatttccccatagccgtggggtgacttccctggtcaccaagg

SEQ ID NO: 1560 - protein, 146 aa, Homo sapiens
MSYYFDRDDVALKNFAKYFLHQSHEEREHAEKLMKLQNQGGGRIFLQDIKKPDCDDWESGLNAMECALHLEKNVNQSLLELHKLATDKNDPHLCDFIETHYLNEQVKAIKELGDHMTNLCKMGAPESSLAEYLFDQHTLGDSDNES

SEQ ID NO: 1561 - DNA, 1449 bp, Homo sapiens
atgcccaaaacgatcagtgtgcgtgtgaccaccatggacgcagagctggagtttaccatccagcccaacaccaccgggaagcagctatttgaccagaaggtgactgcccaggaagtgcggaaggaaagccccctgctctttaagttcagtgccaagttctaccctgaggatgtgtccgaccgaggaattgattcaggacaccactcagcgtctgttccttctgcaatgaaagagggcattctcagtgatgatatttactgccggcctgagactgctgtgctgctggcctcccatgctgtccagtctaagtatgggaacttcagtaaggaggtgcataagtctggctacctggccggagacgagttgctcccacagagagtcctggaacagcacaaactcagcaaggaccagtgggaggagcggatccaggtgtggcatgaggaacaccgtggcatgctcagggaggatgctgtcctggagtatctgaagattgctcaagatctggagatgtatggtgtaaactacttcagcatcaagaaaaagaaaggctcagagctgtggctgggggtggatgcactgggtctcaacatctatgagcagcatgacagactaactcccaagataggctttccttggagtgaaatcaggagcatttctttcaatgataagaactttgtcatcaagcccattgacaaaagagccccggactttgtcttctatgctccctggctgcagattaacaagcggatcttggccttgtgcatggggaaccgtgaactatacatgcgccgtcgcaagcctgacaccattgaggtgcagcagatgaaggcacgggcccgggaggagaagcaccagaagcagatggagcgtgctatgctggaaaatgagaagaagcgtgaaatggcagaaaagcagaaagagaagattgaacgggagaaggagctgatggggaggctgaagcagatcgaggaacagactaagaaggctcagcaagaactggaagaacagacccgtagggctctggaacttgggaaggaacggaagcatgcccagagcgaggctgaaaagctggccaaggagcttcaagaagctgaagaggccaaggaaaagaaagagagtgaggctatggagtggcagcagaaggcccagatggtacaggaagacttggagaagacccgtgctgagctgaagactgccatgagtacatctcatgtggcagagcctgctgagaatgagcaggatgagcaggatgagaatggggcagaggctagtgctgacctacgggctgatgctatggccaaggaccgcagtgaggaggaatgtaccactgaggcagagaagaatgagcgtgtgcagaagcacctgaaggccctcacttcggagctggccagtgcccgagatgagtccaagaagactgccaatgacatgatccatgctgagaacatgtga

SEQ ID NO: 1562 - DNA, 276 bp, Homo sapiens
atgccgccctcgcctgcgtcctgcggccgtcccgaggtgtcacgctgtcaacaacacaaagtcgtagttgacgtcgaccatgagcacttagcaggagggcacgcacagggacttgtgcccggcggggtccagctcctgcaccttcagctgccactccatcctctgcacagcgttcagggccgcagcctcgtgctgctgccgcatgaggaggaagaactagatgaacttatgagtgaagaagcctatgagaaatacataaaatctattgaggagtga

SEQ ID NO: 1563 - protein, 91 aa, Homo sapiens
MPPSPASCGRPEVSRCQQHKVVVDVDHEHLAGGHAQGLVPGGVQLLHLQLPLHPLHSVQGRSLVLLPHEEEELDELMSEEAYEKYIKSIEE

SEQ ID NO: 1564 - DNA, 629 bp, Homo sapiens
gccgagcgatgggcatctctcgggacaactggcaccagcgccgcaaaaccgggggcaagagaaagccctaccacaagaagcggaagtatgagttggagcgcccagctgccaacaccaagattggcccccgccgcatccacacagtccgtgtgcagggaatgttgtactcgtaaaacaaggatcatcgatgttgtctacaatgcatctaataatgagctggttcgtaccaagaccctggtgaagaattgcatcgtgctcatcgacagcacaccgtgccgacagtggtaagatgtcccactacgtgctgcccctgggccgcaagaagggagccaagctgactcctgaggaagaagagattttaaacaaaaaacgatttaaacaaattcagaagaaatatgatgaaaggaaaaagaatgccaaaatcagcagtctcctggaagagcagttccagcagggcaagcttcttgcatgcatcgcttcaaggccgggacagtgtggccgagcagatggctatgtgctagagggcaaagggttggagttctatcttaggaaaatcaaggcccggaaaggcaaataaatccttgttttgtcttcacccatgtaataaaggtgtttattgttttgttccc

SEQ ID NO: 1565 - DNA, 2630 bp, Homo sapiens
ccgaggccaagtcccgggcgctagcccacctcccacccgcctcttggctcctctcctctaggccgtcgctttcgggttctctcatcgcttcgtcgttcgccaatgtttgaggagaaggccagcagtccttcagggaagatgggaggcgaggagaagccgattggtgctggtgaagagaagcaaaaggaaggaggcaaaaagaagaacaaagaaggatctggagatggaggtcgagctgagttgaatccttggcctgaatatatttacacacgtcttgagatgtataatatactaaaagcagaacatgattccattctggcagaaaaggcagaaaaagatagcaagccaattaaagtcactttgcctgatggtaaacaggttgatgcggaatcttggaaaactacaccatatcaaattgcctgtggaattagtcaaggcctggccgacaacaccgttattgctaaagtaaataatgttgtgtgggacctggaccgccctctggaagaagattgtaccttggagcttctcaagtttgaggatgaggaagctcaggcagtgtattggcactctagtgctcacataatgggtgaagccatggaaagagtctatggtggatgtttatgctacggtccgccaatagaaaatggattctattatgacatgtacctcgaagaagggggtgtgtctagcaatgatttctcttctctggaggctttgtgtaagaaaatcattaaagaaaaacaagcttttgaaagactggaagttaagaaagaaactttactggcaatgtttaagtacaacaagttcaaatgccggatattgaatgaaaaggtgaatactccaactaccacagtctatagatgtggccctttgatagatctctgccggggtcctcatgttagacacacgggcaaaattaaggctttaaaaatacacaaaaattcctccacgtactgggaaggcaaagcagatatggagactctccagagaatttatggcatttcattcccagatcctaaaatgttgaaagagtgggagaagttccaagaggaagctaaaaaccgagatcataggaaaattggcagggaccaagaactatatttctttcatgaactcagccctggaagttgcttttttctgccaaaaggagcctacatttataatgcacttattgaattcattaggagcgaatataggaaaagaggattccaggaggtagtcaccccaaacatcttcaacagccgactctggatgacctcgggccactggcagcactacagcgagaacatgttctcctttgaggtggagaaggagctgtttgccctgaaacccatgaactgcccaggacactgccttatgtttgatcatcggccaaggtcctggcgagaactgcctctgcggctagctgattttggggtacttcataggaacgagctgtctggagcactcacaggactcacccgggtacgaagattccaacaggatgatgctcacatattctgtgccatggagcagattgaagatgaaataaaaggttgtttggattttctacgtacggtatatagcgtatttggattttcttttaaactaaacctttctactcgcccggaaaaattccttggagatatcgaagtatgggatcaagctgagaaacaacttgaaaacagtctgaatgaatttggtgaaaagtgggagttaaactctggagatggagctttctatggcccaaagattgacatacagattaaagatgcgattgggcggtaccaccagtgtgcaaccatccagctggatttccagttgcccatcagatttaatcttacttatgtaagccatgatggtgatgataagaaaaggccagtgattgttcatcgagccatcttgggatcagtggaaagaatgattgctatcctcacagaaaactatgggggcaaatggcccttttggctgtcccctcgccaggtaatggtagttccagtgggaccaacctgtgatgaatatgcccaaaaggtacgacaacaattccacgatgccaaattcatggcagacattgatctggatccaggctgtacattgaataaaaagattcgaaatgcacagttagcacagtataacttcattttagttgttggtgaaaaagagaaaatcagtggcactgttaatatccgcacaagagacaataaggtccacggggaacgcaccatttctgaaactatcgagcggctacagcagctcaaagagttccgcagcaaacaggcagaagaagaattttaatgaaaaaattacccagattggctccatggaaaaggaggaacagcgtttccgtaaaattgactttgtactctgaaaacgtcaatttatattgaacttggaggagtttggcaaagtctgaataggtcaacctgcaggcgtaactatttttgacctagtcagtttttaaacaatgtgcatttgaaggagttaattaaaagagagccaataaaatgattttactcattcagtatctgagtactggaagtgaaacatgaggaatgctttagtgtaatgtgggagaacttttttgtaaatttaatgcaattgaaaaagttttcaaattcaattaagataactagaattggattatggtgtaa

SEQ ID NO: 1566 - protein, 723 aa, Homo sapiens
MFEEKASSPSGKMGGEEKPIGAGEEKQKEGGKKKNKEGSGDGGRAELNPWPEYIYTRLEMYNILKAEHDSILAEKAEKDSKPIKVTLPDGKQVDAESWKTTPYQIACGISQGLADNTVIAKVNNVVWDLDRPLEEDCTLELLKFEDEEAQAVYWHSSAHIMGEAMERVYGGCLCYGPPIENGFYYDMYLEEGGVSSNDFSSLEALCKKIIKEKQAFERLEVKKETLLAMFKYNKFKCRILNEKVNTPTTTVYRCGPLIDLCRGPHVRHTGKIKALKIHKNSSTYWEGKADMETLQRIYGISFPDPKMLKEWEKFQEEAKNRDHRKIGRDQELYFFHELSPGSCFFLPKGAYIYNALIEFIRSEYRKRGFQEVVTPNIFNSRLWMTSGHWQHYSENMFSFEVEKELFALKPMNCPGHCLMFDHRPRSWRELPLRLADFGVLHRNELSGALTGLTRVRRFQQDDAHIFCAMEQIEDEIKGCLDFLRTVYSVFGFSFKLNLSTRPEKFLGDIEVWDQAEKQLENSLNEFGEKWELNSGDGAFYGPKIDIQIKDAIGRYHQCATIQLDFQLPIRFNLTYVSHDGDDKKRPVIVHRAILGSVERMIAILTENYGGKWPFWLSPRQVMVVPVGPTCDEYAQKVRQQFHDAKFMADIDLDPGCTLNKKIRNAQLAQYNFILVVGEKEKISGTVNIRTRDNKVHGERTISETIERLQQLKEFRSKQAEEEF

SEQ ID NO: 1567 - DNA, 927 bp, Homo sapiens
gagcatggatgattggccagaaatgaagaagaagtttgcagatgtatttgcaaagaagacgaaggcagagtggtgtcaaatctttgacggcacagatgcctgtgtgactccggttctgacttttgaggaggttgttcatcatgatcacaacaaggaacggggctcgtttatcaccagtgaggagcaggacgtgagcccccgccctgcacctctgctgttaaacaccccagccatcccttctttcaaaagggatcctttcataggagaacacactgaggagatacttgaagaatttggattcagccgcgaagagatttatcagcttaactcagataaaatcattgaaagtaataaggctggtagcaagttctggatcttatacccaacacacagcaacatccagaaataaagatctcaggaccccccagcaagtcgttttgtgtctccttggactgagttaagttacaagcctttcttatacctgtctttgacaaagaagacgggattgtctttacataaaaccagcctgctcctggagcttccctggactcaacttcctaaaggcatgtgaggaaggggtagattccacaatctaatccgggtgccatcagagtagagggagtagagaatggatgttgggtaggccatcaataaggtccattctgcgcagtatctcaactgccgttcaacaatcgcaagaggaaggtggagcaggtttcttcatcttacagttgagaaaacagagactcagaagggcttcttagttcgtgtttcccttagcgcctcagtgattttttcatggtggcttaggccaaaagaaatatctaaccattcaatttataaataattaggtccccaacgaattaaatattatgtcctaccaacttattagctgcttgaaaaatataatacacataaataaaaaaa

SEQ ID NO: 1568 - DNA, 2040 bp, Homo sapiens
ggcgccggggattgggagggcttcttgcaggctgctgggctggggctaagggctgctcagtttccttcagcggggcactgggaagcgccatggcactgcagggcatctcggtcgtggagctgtccggcctggccccgggcccgttctgtgctatggtcctggctgacttcggggcgcgtgtggtacgcgtggaccggcccggctcccgctacgacgtgagccgcttgggccggggcaagcgctcgctagtgctggacctgaagcagccgcggggagccgccgtgctgcggcgtctgtgcaagcggtcggatgtgctgctggagcccttccgccgcggtgtcatggagaaactccagctgggcccagagattctgcagcgggaaaatccaaggcttatttatgccaggctgagtggatttggccagtcaggaagcttctgccggttagctggccacgatatcaactatttggctttgtcaggtgttctctcaaaaattggcagaagtggtgagaatccgtatgccccgctgaatctcctggctgactttgctggtggtggccttatgtgtgcactgggcattataatggctctttttgaccgcacacgcactggcaagggtcaggtcattgatgcaaatatggtggaaggaacagcatatttaagttcttttctgtggaaaactcagaaatcgagtctgtgggaagcacctcgaggacagaacatgttggatggtggagcacctttctatacgacttacaggacagcagatggggaattcatggctgttggagcaatagaaccccagttctacgagctgctgatcaaaggacttggactaaagtctgatgaacttcccaatcagatgagcatggatgattggccagaaatgaagaagaagtttgcagatgtatttgcaaagaagacgaaggcagagtggtgtcaaatctttgacggcacagatgcctgtgtgactccggttctgacttttgaggaggttgttcatcatgatcacaacaaggaacggggctcgtttatcaccagtgaggagcaggacgtgagcccccgccctgcacctctgctgttaaacaccccagccatcccttctttcaaaagggatcctttcataggagaacacactgaggagatacttgaagaatttggattcagccgcgaagagatttatcagcttaactcagataaaatcattgaaagtaataaggtaaaagctagtctctaacttccaggcccacggctcaagtgaatttgaatactgcatttacagtgtagagtaacacataacattgtatgcatggaaacatggaggaacagtattacagtgtcctaccactctaatcaagaaaagaattacagactctgattctacagtgatgattgaattctaaaaatggttatcattagggcttttgatttataaaactttgggtacttatactaaattatggtagttattctgccttccagtttgcttgatatatttgttgatattaagattcttgacttatattttgaatgggttctagtgaaaaaggaatgatatattcttgaagacatcgatatacatttatttacactcttgattctacaatgtagaaaatgaggaaatgccacaaattgtatggtgataaaagtcacgtgaaacagagtgattggttgcatccaggccttttgtcttggtgttcatgatctccctctaagcacattccaaactttagcaacagttatcacactttgtaatttgcaaagaaaagtttcacctgtattgaatcagaatgccttcaactgaaaaaaacatatccaaaataatgaggaaatgtgttggctcactacgtagagtccagagggacagtcagttttagggttgcctgtatccagtaactcggggcctgtttccccgtgggtctctgggctgtcagctttcctttctccatgtgtttgatttctcctcaggctggtagcaagttctggatcttatacccaacacacagcaacatccagaaataaagatctcaggacccccc

SEQ ID NO: 1569 - protein, 382 aa, Homo sapiens
MALQGISVVELSGLAPGPFCAMVLADFGARVVRVDRPGSRYDVSRLGRGKRSLVLDLKQPRGAAVLRRLCKRSDVLLEPFRRGVMEKLQLGPEILQRENPRLIYARLSGFGQSGSFCRLAGHDINYLALSGVLSKIGRSGENPYAPLNLLADFAGGGLMCALGIIMALFDRTRTGKGQVIDANMVEGTAYLSSFLWKTQKSSLWEAPRGQNMLDGGAPFYTTYRTADGEFMAVGAIEPQFYELLIKGLGLKSDELPNQMSMDDWPEMKKKFADVFAKKTKAEWCQIFDGTDACVTPVLTFEEVVHHDHNKERGSFITSEEQDVSPRPAPLLLNTPAIPSFKRDPFIGEHTEEILEEFGFSREEIYQLNSDKIIESNKVKASL

SEQ ID NO: 1570 - DNA, 371 bp, Rattus norvegicus
tctttctggtctcggccgcagaagcgagatgacgaagggaacgtcatcgtttggaaagcgtcgcaataagacgcacacgttgtgccgccgctgtggctctaaggcctaccaccttcagaagtcgacctgtggcaaatgtggctaccctgccaagcgcaagagaaagtataactggagtgccaaggctaaaagacgaaataccaccggaactggtcgaatgaggcacctaaaaattgtataccgcagattcaggcatggattccgtgaaggaacaacacctaaacccaagagggcagctgttgcagcatccagttcatcttaagaatgtcaacgattagtcatgcaataaatgttctggttttaaaaaatac

SEQ ID NO: 1571 - protein, 97 aa, Rattus norvegicus [sequence omitted]

SEQ ID NO: 1572 - DNA, 3202 bp, Homo sapiens
gtgtctgtgggaggttatgtttatttgagacttctccatcgggatcgcctggtgtcaccaagtgtccactggtactgaggtttgctgcctgccttcttgccatgtctaacgaagtagaaacaagtgcaaccaatggtcagcccgaccaacaggccgcaccaaaagcaccctcaaagaaggaaaaaaagaaaggccctgaaaagacagatgaatatctcttagcaaggttcaaaggcgatggtgtaaaatataaggccaagctgattggcattgatgatgtgccagatgcaagaggggataaaatgagccaagactctatgatgaaactaaagggaatggcggcagctggtcggtctcagggacaacacaaacaaaggatctgggtcaacatttccctttctgggataaaaataattgatgagaaaactggggtaatagagcatgaacatccagtaaataagatttctttcattgcccgtgatgtgacagacaaccgggcatttggttacgtgtgtggaggagaaggccagcatcagttttttgccataaaaaccgggcaacaggctgaaccattagttgttgatcttaaagacctttttcaagttatctataatgtaaagaaaaaggaagaagaaaagaaaaagatagaggaagccagcaaagcagttgagaatgggagtgaggccctaatgattctagatgaccaaactaacaaactgaaatcgggtgttgaccagatggatttgtttggggacatgtctacacctcctgacctaaatagtccaacagaaagcaaagatatcctgttagtggatctaaactctgaaatcgacaccaatcagaattctttaagagaaaatccattcttaacaaacggcatcacctcctgttctcttcctcgaccaacgcctcaggcatccttcttgcctgaaaatgccttttctgccaatctcaacttctttcccacccctaatcctgatcctttccgtgacgatcctttcacacagccagaccaatcgacaccttcttcgtttgattctctcaaatctccagatcagaagaaagagaattcgagtagctcgtctactccgctgagtaatgggcccctgaatggtgatgttgactactttggtcagcaatttgaccagatctctaaccggactggcaaacaggaagctcaggcaggcccatggcccttttcaagttcgcaaacccagccagcagtgagaactcaaaatggggtatctgaaagagaacagaacggcttctctgtcaaatcctccccgaacccttttgtgggaagccctcccaaaggactgtccatacagaatggcgtaaagcaggacttggaaagctctgtccagtcctcaccacatgactccatagccattatcccacctccacaaagtaccaaaccaggaagaggcagaaggactgctaagtcttcagccaatgacttgcttgcatcagacatctttgctcctcccgtctcagaaccttcaggccaggcgtcacccacaggacaacctacagccctgcagcccaaccctctggatctcttcaaaacaagtgctcctgccccagtggggcccctggtgggtctaggtaggtgtaactgtcacactccctcaggcaggaccatggaacacagcatctttggtcttcaatcagtccccttcaatggctccgggagccatgatgggtggtcaaccttcaggttttagtcagcccgtcatttttggtacaagtccagctgtttcaggttggaaccagccttcaccctttgcagcctcaactccccctccagtgcctgttgtctggggcccttctgcatctgtggcacccaatgcttggtcaacaacaagccctttggggaatccttttcagagcaatatttttccagctcctgctgtgtccactcagcccccatccatgcactcctctctcctggtcactcctcctcagccacctcccagagctggccctcccaaggacatctccagtgatgccttcactgccttagacccacttggggataaagagatcaaggatgtgaaagaaatgtttaaggatttccaactgcggcagccacctgctgtgcccgcgcggaagggagagcagacttcttctgggactttgagtgcctttgccagttatttcaacagcaaggttggcattcctcaggagaatgcagaccatgatgactttgatgctaatcaactattgaacaagatcaatgaaccaccaaagccagctcccagacaagtttccctgccagttaccaaatctactgacaatgcatttgagaaccctttctttaaagattcttttggttcatcacaagcctctgtggcttcttctcaacctgtatcttctgagatgtatagggatccatttggaaatccttttgcctaaattctgaacttggtctgcagaccatccagaggaataaaaaggttggccttagtagtcaaaaacaaagctgatagccagacacgttctgatttctgcccttgttccagctttgacgtattatctgttgccttatttctcattgcctcttctacttgtaaaatgcttttcactttctgtctaggttaaagctaaactgaatctatggctttaaataaattaagatcctaaactctctagcttaagtgtaaatgaagtacagtagtttccctactgaaccctgcctcttgtgtccctggaaccttctagaacacctgccttctaccctctggttgggagatgcagccaccacatcccttcatatcatactgttttgaataaattttcaaatccttattgttcagagttgtttgggggttctgtttcagagcataaaacctaaaggttatagtagaacaaggcaccttcttaaaagaaatcttgcttcagaccatcagttacagagaatttctaaagtaaaattgaagcaactacaacttctccttagacactttggaatctaaccacttaaggacctttttaaagagatagcttctcttctttctgaagatcaatttctcccaaggccaagattgtccttttctcccatttcttgctagctattgcaaatgagggaagaacattattcatctctcctccccttttttttctgattcttttttcagtcagttttgctcctgggttcaagtagtattaccaccctttcacaagcaacagactctcacagggc

SEQ ID NO: 1573 - DNA, 2400 bp, Homo sapiens
taggatggaaaggcagatgtaaagtccctcatggcgaaatataacacggggggcaacccgacagaggatgtctcagtcaatagccgacccttcagagtcacagggccaaactcatcttcaggaatacaagcaagaaagaacttattcaacaaccaaggaaatgccagccctcctgcaggacccagcaatgtacctaagtttgggtccccaaagccacctgtggcagtcaaaccttcttctgaggaaaagcctgacaaggaacccaagcccccgtttctaaagcccactggagcaggccaaagattcggaacaccagccagcttgaccaccagagaccccgaggcgaaagtgggatttctgaaacctgtaggccccaagcccatcaacttgcccaaagaagattccaaacctacatttccctggcctcctggaaacaagccatctcttcacagtgtaaaccaagaccatgacttaaagccactaggcccgaaatctgggcctactcctccaacctcagaaaatgaacagaagcaagcgtttcccaaattgactggggttaaagggaaatttatgtcagcatcacaagatcttgaacccaagcccctcttccccaaacccgcctttggccagaagccgcccctaagtaccgagaactcccatgaagacgaaagccccatgaagaatgtgtcttcatcaaaagggtccccagctcccctgggagtcaggtccaaaagcggccctttaaaaccagcaagggaagactcagaaaataaagaccatgcaggggagatttcaagtttgccctttcctggagtggttttgaaacctgctgcgagcaggggaggcctaggtctctccaaaaatggtgaagaaaaaaaggaagataggaagatagatgctgctaagaacaccttccagagcaaaataaatcaggaagagttggcctcagggactcctcctgccaggttccctaaggccccttctaagctgacagtgggggggccatggggccaaagtcaggaaaaggaaaagggagacaagaattcagccaccccgaaacagaagccattgcctcccttgtttaccttgggtccacctccaccaaaacccaacagaccaccaaatgttgacctgacgaaattccacaaaacctcttctggaaacagtactagcaaaggccagacgtcttactcaacaacttccctgccaccacctccaccatcccatccggccagccaaccaccattgccagcatctcacccatcacaaccaccagtcccaagcctacctcccagaaacattaaacctccgtttgacctaaaaagccctgtcaatgaagacaatcaagatggtgtcacgcactctgatggtgctggaaatctagatgaggaacaagacagtgaaggagaaacatatgaagacatagaagcatccaaagaaagagagaagaaaagggaaaaggaagaaaagaagaggttagagctggagaaaaaggaacagaaagagaaagaaaagaaagaacaagaaataaagaagaaatttaaactaacaggccctattcaagtcatccatcttgcaaaagcttgttgtgatgtcaaaggaggaaagaatgaactgagcttcaagcaaggagagcaaattgaaatcatccgcatcacagacaacccagaaggaaaatggttgggcagaacagcaaggggttcatatggctatattaaaacaactgctgtagagattgactatgattctttgaaactgaaaaaagactctcttggtgccccttcaagacctattgaagatgaccaagaagtatatgatgatgttgcagagcaggatgatattagcagccacagtcagagtggaagtggagggatattccctccaccaccagatgatgacatttatgatgggattgaagaggaagatgctgatgatggtttccctgctcctcctaaacaattggacatgggagatgaagtttacgatgatgtggatacctctgatttccctgtttcatcagcagagatgagtcaaggaactaattttggaaaagctaagacagaagaaaaggaccttaagaagctaaaaaagcaggaaaaagaagaaaaagacttcaggaaaaaatttaaatatgatggtgaaattagagtcctatattcaactaaagttacaacttccataacttctaaaaagtggggaaccagagatctacaggtaaaacctggtgaatctctagaagttatacaaaccacagatgacacaaaagttctctgcagaaatgaagaagggaaatatggttatgtccttcggagttacctagcggacaatgatggagagatctatgatgatattgctgatggctgcatctatgacaatgactagcactcaactttggtcatt

SEQ ID NO: 1574 - protein, 783 aa, Homo sapiens
MAKYNTGGNPTEDVSVNSRPFRVTGPNSSSGIQARKNLFNNQGNASPPAGPSNVPKFGSPKPPVAVKPSSEEKPDKEPKPPFLKPTGAGQRFGTPASLTTRDPEAKVGFLKPVGPKPINLPKEDSKPTFPWPPGNKPSLHSVNQDHDLKPLGPKSGPTPPTSENEQKQAFPKLTGVKGKFMSASQDLEPKPLFPKPAFGQKPPLSTENSHEDESPMKNVSSSKGSPAPLGVRSKSGPLKPAREDSENKDHAGEISSLPFPGVVLKPAASRGGLGLSKNGEEKKEDRKIDAAKNTFQSKINQEELASGTPPARFPKAPSKLTVGGPWGQSQEKEKGDKNSATPKQKPLPPLFTLGPPPPKPNRPPNVDLTKFHKTSSGNSTSKGQTSYSTTSLPPPPPSHPASQPPLPASHPSQPPVPSLPPRNIKPPFDLKSPVNEDNQDGVTHSDGAGNLDEEQDSEGETYEDIEASKEREKKREKEEKKRLELEKKEQKEKEKKEQEIKKKFKLTGPIQVIHLAKACCDVKGGKNELSFKQGEQIEIIRITDNPEGKWLGRTARGSYGYIKTTAVEIDYDSLKLKKDSLGAPSRPIEDDQEVYDDVAEQDDISSHSQSGSGGIFPPPPDDDIYDGIEEEDADDGFPAPPKQLDMGDEVYDDVDTSDFPVSSAEMSQGTNFGKAKTEEKDLKKLKKQEKEEKDFRKKFKYDGEIRVLYSTKVTTSITSKKWGTRDLQVKPGESLEVIQTTDDTKVLCRNEEGKYGYVLRSYLADNDGEIYDDIADGCIYDND

SEQ ID NO: 1575 - DNA, 2247 bp, Homo sapiens
gttcccctgcagttgtttgggctgtccctgtggctggttctggggtgtgcggccagccatggagcgctctgggcccagcgaagtgacaggctcagacgcgtcgggaccggacccgcagcttgcggtcaccatgggcttcacggggttcggtaaaaaagctcgcacatttgacttggaagcaatgtttgaacaaactcgaaggacagctgtggaaagaagtcgcaaaacactggaagcaagagaaaaagaggaagaaatgaacagagagaaagaattaagaagacaaaatgaagatattgagccaacatcctcaagatcaaatgtggtcagagattgctccaaatcatcttccagggatacgagcagcagtgaaagtgaacagagttctgactcttctgatgatgagttaattggccctcctttaccccctaaaatggtaggaaaaccagttaattttatggaggaagatatcctcggtcctttacctccacctcttaatgaagaagaagaagaagcagaggaagaagaagaggaagaggaggaagaggaaaatcctgttcacaagattcctgactcgcatgagataacgctgaagcatggcactaaaacagtgtctgctttgggtctggatccctcaggtgcccgtttggtgacaggaggatatgactatgatgttaagttttgggattttgctggaatggatgcttcttttaaggcatttcgatcccttcagccctgtgagtgccatcagatcaagtcattacagtatagtaacacaggagacatgattcttgttgtatctggaagctctcaggccaaggtgattgacagagatggttttgaagtaatggaatgtataaaaggagaccagtatattgtggacatggccaacaccaagggtcatacagcaatgcttcatactggctcatggcatcccaaaataaagggagaatttatgacttgctcaaatgatgcgactgtgaggacgtgggaagttgaaaatccaaagaagcaaaaaagtgtgtttaaaccacggacgatgcaaggcaaaaaagtcattcccactacgtgcacatatagtagagatggaaacctcatagcagctgcctgccagaatggaagcatacagatctgggaccgaaatttgactgttcatcctaagttccactataaacaggctcatgactcgggcacagacacttcttgcgtgactttttcctatgatggtaatgtccttgcctctcgtggaggtgacgattcattaaaattatgggacatccgacaatttaataaaccacttttttcagcctcgggtcttcccaccatgttcccaatgactgactgctgtttcagtccagatgataagctcatagtcactggtacatctattcaaagaggatgtggcagcggcaaacttgttttctttgagcgtaggactttccaaagggtgtatgaaatagacatcacagatgcgagtgttgttcgctgcctgtggcatccaaagctgaaccagatcatggttggaactggaaatggattggctaaagtctattacgaccccaacaagagtcagaggggagcaaaattatgtgtggttaaaacccagcggaaggcaaaacaagctgagactctaactcaggactacatcatcacccctcatgccttgcctatgttccgtgagccccgccaacggagtacaaggaaacagctggagaaggacagactggatcccctgaagtcgcataaacctgaacctcctgtagcaggcccaggtcgtggtggccgagttggaacccacgggggcactctctcttcctatattgtgaagaacattgctttggacaagaccgatgacagtaatcctcgggaagccattttgcgtcatgccaaagcagcagaagacagcccatattgggtttctccagcatattccaagactcagcccaaaaccatgtttgcccaagttgaatctgatgatgaggaagcaaagaatgagccagaatggaaaaaacgtaaaatttgaagaatctcatttgagagctgtttgcatgagtgggaggggtatgggacaggtttgggttttttttttatgctcatgaaattaaaaattcatttttatgaaaaaaaaaaaaaaaaaaaaaaaaaaaaaaaaaaaaaaaaaaaaaaaaaaaaaaaaaaaaaaaaaaaaaaaaaaaaaaaaaaaaaaaaaaaaaaaaaaaaaaaaaaaaaaaaaaaaaaaaaaaaaaa

SEQ ID NO: 1576 - protein, 654 aa, Homo sapiens
MERSGPSEVTGSDASGPDPQLAVTMGFTGFGKKARTFDLEAMFEQTRRTAVERSRKTLEAREKEEEMNREKELRRQNEDIEPTSSRSNVVRDCSKSSSRDTSSSESEQSSDSSDDELIGPPLPPKMVGKPVNFMEEDILGPLPPPLNEEEEEAEEEEEEEEEEENPVHKIPDSHEITLKHGTKTVSALGLDPSGARLVTGGYDYDVKFWDFAGMDASFKAFRSLQPCECHQIKSLQYSNTGDMILVVSGSSQAKVIDRDGFEVMECIKGDQYIVDMANTKGHTAMLHTGSWHPKIKGEFMTCSNDATVRTWEVENPKKQKSVFKPRTMQGKKVIPTTCTYSRDGNLIAAACQNGSIQIWDRNLTVHPKFHYKQAHDSGTDTSCVTFSYDGNVLASRGGDDSLKLWDIRQFNKPLFSASGLPTMFPMTDCCFSPDDKLIVTGTSIQRGCGSGKLVFFERRTFQRVYEIDITDASVVRCLWHPKLNQIMVGTGNGLAKVYYDPNKSQRGAKLCVVKTQRKAKQAETLTQDYIITPHALPMFREPRQRSTRKQLEKDRLDPLKSHKPEPPVAGPGRGGRVGTHGGTLSSYIVKNIALDKTDDSNPREAILRHAKAAEDSPYWVSPAYSKTQPKTMFAQVESDDEEAKNEPEWKKRKI

SEQ ID NO: 1577 - DNA, 1462 bp, Homo sapiens
cgggctgtagagccttgcgcgcgcagtggggatggaacgttgctaggcttagcgggtctggctgctgggggcccgagcagcacgctcggagccgccgcgcgccaaagcgggaatctgggaggcgagcagctctgcagttaatgcacgtattttaaactcccgggcctgcggacgctatgcacaggaagcacctccaggagattccagacctgagtagcaacgttgccaccagcttcacgtggggatgggattccagcaagacttctgaactgctgtcaggcatgggggtctccgccctggagaaagaggagcccgacagtgagaacatcccccaggaactgctctcaaacctgggccacccggagagccccccacggaaacggctgaagagcaaagggagtgacaaagactttgtgattgtccgcaggcctaagctaaatcgagagaactttccaggtgtttcatgggactcccttccggatgagctgctcttgggaatcttttcctgtctgtgcctccctgagctgctaaaggtctctggtgtttgtaagaggtggtatcgcctagcgtctgatgagtctctatggcagaccttagacctcacaggtaaaaatctgcacccggatgtgactggtcggttgctgtctcaaggggtgattgccttccgctgcccacgatcatttatggaccaaccattggctgaacatttcagcccttttcgtgtacagcacatggacctatcgaactcagttatagaagtgtccaccctccacggcatactgtctcagtgttccaagttgcagaatctaagcctggaaggcctgcggctttcggatcccattgtcaatactctcgcaaaaaactcaaatttagtgcgacttaacctttctgggtgttctggattctctgaatttgccctgcagactttgctaagcagctgttccagactggatgagctgaacctctcctggtgttttgatttcactgaaaagcatgtacaggtggctgttgcgcatgtgtcagagaccatcacccagctgaatcttagcggctacagaaagaatctccagaaatcagatctctctactttagttagaagatgccccaatcttgtccatctagacttaagtgatagtgtcatgctaaagaatgactgctttcaggaatttttccagctcaactacctccaacacctatcactcagtcggtgctatgatataatacctgaaactttactattagtgacaagagctggggttaggatccggttggactctgacatcggatgccctcaaacatacagaacttccaaactcaagtccagccataagctattttgccaacatgtcagagtaatctgtatttttgtatgtgatttctacttttatagacttgttttaaaacaataaaacacatttttataaaaatgagtgcttaaactaaaaaaaaaaaaaaaaaaaaa

SEQ ID NO: 1578 - protein, 410 aa, Homo sapiens
MHRKHLQEIPDLSSNVATSFTWGWDSSKTSELLSGMGVSALEKEEPDSENIPQELLSNLGHPESPPRKRLKSKGSDKDFVIVRRPKLNRENFPGVSWDSLPDELLLGIFSCLCLPELLKVSGVCKRWYRLASDESLWQTLDLTGKNLHPDVTGRLLSQGVIAFRCPRSFMDQPLAEHFSPFRVQHMDLSNSVIEVSTLHGILSQCSKLQNLSLEGLRLSDPIVNTLAKNSNLVRLNLSGCSGFSEFALQTLLSSCSRLDELNLSWCFDFTEKHVQVAVAHVSETITQLNLSGYRKNLQKSDLSTLVRRCPNLVHLDLSDSVMLKNDCFQEFFQLNYLQHLSLSRCYDIIPETLLLVTRAGVRIRLDSDIGCPQTYRTSKLKSSHKLFCQHVRVICIFVCDFYFYRLVLKQ

SEQ ID NO: 1579 - DNA, 1600 bp, Homo sapiens
gaattccgggctgtagagccttgcgcgcgcagtggggatggaacgttgctaggcttagcgggtctggctgctgggggcccgagcagcacgctcggagccgccgcgcgccaaagcgggaatctgggaggcgagcagctctgcagttaatgcacgtattttaaactcccgggcctgcggacgctatgcacaggaagcacctccaggagattccagacctgagtagcaacgttgccaccagcttcacgtggggatgggattccagcaagacttctgaactgctgtcaggcatgggggtctccgccctggagaaagaggagcccgacagtgagaacatcccccaggaactgctctcaaacctgggccacccggagagccccccacggaaacggctgaagagcaaagggagtgacaaagactttgtgattgtccgcaggcctaagctaaatcgagagaactttccaggtgtttcatgggactcccttccggatgagctgctcttgggaatcttttcctgtctgtgcctccctgagctgctaaaggtctctggtgtttgtaagaggtggtatcgcctagcgtctgatgagtctctatggcagaccttagacctcacaggtaaaaatctgcacccggatgtgactggtcggttgctgtctcaaggggtgattgccttccgctgcccacgatcatttatggaccaaccattggctgaacatttcagcccttttcgtgtacagcacatggacctatcgaactcagttatagaagtgtccaccctccacggcatactgtctcagtgttccaagttgcagaatctaagcctggaaggcctgcggctttcggatcccattgtcaatactctcgcaaaaaactcaaatttagtgcgacttaacctttctgggtgttctggattctctgaatttgccctgcagactttgctaagcagctgttccagactggatgagctgaacctctcctggtgttttgatttcactgaaaagcatgtacaggtggctgttgcgcatgtgtcagagaccatcacccagctgaatcttagcggctacagaaagaatctccagaaatcagatctctctactttagttagaagatgccccaatcttgtccatctagacttaagtgatagtgtcatgctaaagaatgactgctttcaggaatttttccagctcaactacctccaacacctatcactcagtcggtgctatgatataatacctgaaactttacttgaacttggagaaattcccacactaaaaacactacaagtttttggaatcgtgccagatggtacccttcaactgttaaaggaagcccttcctcatctacagattaattgctcccatttcaccaccattgccaggccaactattggcaacaaaaagaaccaggagatatggggcatcaaatgccgactgacactgcaaaagcccagttgtctatgaagtatttattgcaggatggtgtctcttctttagaacagggaaaataggcaggaagcccaattgctggagtacttagctagttttattcttggttttccctttgccttcattctgcaagtatactagggagccatttgagaggg

SEQ ID NO: 1580 - protein, 424 aa, Homo sapiens
MHRKHLQEIPDLSSNVATSFTWGWDSSKTSELLSGMGVSALEKEEPDSENIPQELLSNLGHPESPPRKRLKSKGSDKDFVIVRRPKLNRENFPGVSWDSLPDELLLGIFSCLCLPELLKVSGVCKRWYRLASDESLWQTLDLTGKNLHPDVTGRLLSQGVIAFRCPRSFMDQPLAEHFSPFRVQHMDLSNSVIEVSTLHGILSQCSKLQNLSLEGLRLSDPIVNTLAKNSNLVRLNLSGCSGFSEFALQTLLSSCSRLDELNLSWCFDFTEKHVQVAVAHVSETITQLNLSGYRKNLQKSDLSTLVRRCPNLVHLDLSDSVMLKNDCFQEFFQLNYLQHLSLSRCYDIIPETLLELGEIPTLKTLQVFGIVPDGTLQLLKEALPHLQINCSHFTTIARPTIGNKKNQEIWGIKCRLTLQKPSCL

SEQ ID NO: 1581 - DNA, 4232 bp, Homo sapiens
attcttctaaggagcctaaattcaccaagtgccgttcacctgagcgagagactttttcatgccactggacagatgaggttcatcatggtacaaagaacctaggacccatacagctgttctataccagaaggaacactcaagaatggactcaagaatggaaagaatgccctgattatgtttctgctggggaaaacagctgttactttaattcatcgtttacctccatctggataccttattgtatcaagctaactagcaatggtggtacagtggatgaaaagtgtttctctgttgatgaaatagtgcaaccagatccacccattgccctcaactggactttactgaacgtcagtttaactgggattcatgcagatatccaagtgagatgggaagcaccacgcaatgcagatattcagaaaggatggatggttctggagtatgaacttcaatacaaagaagtaaatgaaactaaatggaaaatgatggaccctatattgacaacatcagttccagtgtactcattgaaagtggataaggaatatgaagtgcgtgtgagatccaaacaacgaaactctggaaattatggcgagttcagtgaggtgctctatgtaacacttcctcagatgagccaatttacatgtgaagaagatttctactttccatggctcttaattattatctttggaatatttgggctaacagtgatgctatttgtattcttattttctaaacagcaaaggattaaaatgctgattctgcccccagttccagttccaaagattaaaggaatcgatccagatctcctcaaggaaggaaaattagaggaggtgaacacaatcttagccattcatgatagctataaacccgaattccacagtgatgactcttgggttgaatttattgagctagatattgatgagccagatgaaaagactgaggaatcagacacagacagacttctaagcagtgaccatgagaaatcacatagtaacctaggggtgaaggatggcgactctggacgtaccagctgttgtgaacctgacattctggagactgatttcaatgccaatgacatacatgagggtacctcagaggttgctcagccacagaggttaaaaggggaagcagatctcttatgccttgaccagaagaatcaaaataactcaccttatcatgatgcttgccctgctactcagcagcccagtgttatccaagcagagaaaaacaaaccacaaccacttcctactgaaggagctgagtcaactcaccaagctgcccatattcagctaagcaatccaagttcactgtcaaacatcgacttttatgcccaggtgagcgacattacaccagcaggtagtgtggtcctttccccgggccaaaagaataaggcagggatgtcccaatgtgacatgcacccggaaatggtctcactctgccaagaaaacttccttatggacaatgcctacttctgtgaggcagatgccaaaaagtgcctccctgtggctcctcacatcaaggttgaatcacacatacagccaagcttaaaccaagaggacatttacatcaccacagaaagccttaccactgctgctgggaggcctgggacaggagaacatgttccaggttctgagatgcctgtcccagactatacctccattcatatagtacagtccccacagggcctcatactcaatgcgactgccttgcccttgcctgacaaagagtttctctcatcatgtggctatgtgagcacagaccaactgaacaaaatcatgccttagcctttctttggtttcccaagagctacgtatttaatagcaaagaattgactggggcaataacgtttaagccaaaacaatgtttaaaccttttttgggggagtgacaggatggggtatggattctaaaatgccttttcccaaaatgttgaaatatgatgttaaaaaaataagaagaatgcttaatcagatagatattcctattgtgcaatgtaaatattttaaagaattgtgtcagactgtttagtagcagtgattgtcttaatattgtgggtgttaatttttgatactaagcattgaatgactatgtttttaatgtatagtaaatcacgctttttgaaaaagcgaaaaaatcaggtggcttttgcggttcaggaaaattgaatgcaaaccatagcacaggctaattttttgttgtttcttaaataagaaacttttttatttaaaaaactaaaaactagaggtgagaaatttaaactataagcaagaaggcaaaaatagtttggatatgtaaaacatttattttgacataaagttgataaagatatttttaataatttagacttcaagcatggctattttatattacactacacactgtgtactgcagttggtatgacccctctaaggagtgtagcaactacagtctaaagctggtttaatgttttggccaatgcacctaaagaaaaacaaactcgttttttacaaagcccttttatacctccccagactccttcaacaattctaaaatgattgtagtaatctgcattattggaatataattgttttatctgaatttttaaacaagtatttgttaatttagaaaactttaaagcgtttgcacagatcaacttaccaggcaccaaaagaagtaaaagcaaaaaagaaaacctttcttcaccaaatcttggttgatgccaaaaaaaaatacatgctaagagaagtagaaatcatagctggttcacactgaccaagatacttaagtgctgcaattgcacgcggagtgagttttttagtgcgtgcagatggtgagagataagatctatagcctctgcagcggaatctgttcacacccaacttggttttgctacataattatccaggaagggaataaggtacaagaagcattttgtaagttgaagcaaatcgaatgaaattaactgggtaatgaaacaaagagttcaagaaataagtttttgtttcacagcctataaccagacacatactcatttttcatgataatgaacagaacatagacagaagaaacaaggttttcagtccccacagataactgaaaattatttaaaccgctaaaagaaactttctttctcactaaatcttttataggatttatttaaaatagcaaaagaagaagtttcatcattttttacttcctctctgagtggactggcctcaaagcaagcattcagaagaaaaagaagcaacctcagtaatttagaaatcattttgcaatcccttaatatcctaaacatcattcatttttgttgttgttgttgttgagacagagtctcgctctgtcgccaggctagagtgcagtggcgcgatcttgactcactgcaatctccacctcccacaggttcaggcgattcccgtgcctcagcctcctgagtagctgggactacaggcacgcaccaccatgccaggctaatttttttgtattttagcagagacggggtttcaccatgttggccaggatggtctcgatctcctgacctcgtgatccacccgactcggcctcccaaagtgctgggattacaggtgtaagccaccgtgcccagccctaaacatcattcttgagagcattgggatatctcctgaaaaggtttatgaaaaagaagaatctcatctcagtgaagaatacttctcattttttaaaaaagcttaaaactttgaagttagctttaacttaaatagtatttcccatttatcgcagaccttttttaggaagcaagcttaatggctgataattttaaattctctctcttgcaggaaggactatgaaaagctagaattgagtgtttaaagttcaacatgttatttgtaatagatgtttgatagattttctgctactttgctgctatggttttctccaagagctacataatttagtttcatataaagtatcatcagtgtagaacctaattcaattcaaagctgtgtgtttggaagactatcttactatttcacaacagcctgacaacatttctatagccaaaaatagctaaatacctcaatcagtctcagaatgtcattttggtactttggtggccacataagccattattcactagtatgactagttgtgtctggcagtttatatttaactctctttatgtctgtggattttttccttcaaagtttaataaatttattttcttggattcctgatagtgtgcttctgttatcaaacaccaacataaaaatgatctaaacc

SEQ ID NO: 1582 - DNA, 1650 bp, Homo sapiens
ccttcacacagctctttcaccatgcctggatcacttcctttgaatgcagaagcttgctggccaaaagatgttgggattgttgcccttgagatctattttccttctcaatatgttgatcaagcagagttggaaaaatatgatggtgtagatgctgggaagtataccattggcttgggccaggccaagatgggcttctgcacagatagagaagatattaactctctttgcatgactgtggttcagaatcttatggagagaaataacctttcctatgattgcattgggcggctggaagttggaacagagacaatcatcgacaaatcaaagtctgtgaagactaatttgatgcagctgtttgaagagtctgggaatacagatatagaaggaatcgacacaactaatgcatgctatggaggcacagctgctgtcttcaatgctgttaactggattgagtccagctcttgggatggacggtatgccctggtagttgcaggagatattgctgtatatgccacaggaaatgctagacctacaggtggagttggagcagtagctctgctaattgggccaaatgctcctttaatttttgaacgagggcttcgtgggacacatatgcaacatgcctatgatttttacaagcctgatatgctatctgaatatcctatagtagatgggaaactctccatacagtgctacctcagtgcattagaccgctgctattctgtctactgcaaaaagatccatgcccagtggcagaaagagggaaatgataaagattttaccttgaatgattttggcttcatgatctttcactcaccatattgtaaactggttcagaaatctctagctcggatgttgctgaatgacttccttaatgaccagaatagagataaaaatagtatctatagtggcctggaagcctttggggatgttaaattagaagacacctactttgatagagatgtggagaaggcatttatgaaggctagctctgaactcttcagtcagaaaacaaaggcatctttacttgtatcaaatcaaaatggaaatatgtacacatcttcagtatatggttcccttgcatctgttctagcacagtactcacctcagcaattagcagggaagagaattggagtgttttcttatggttctggtttggctgccactctgtactctcttaaagtcacacaagatgctacaccggggtctgctcttgataaaataacagcaagtttatgtgatcttaaatcaaggcttgattcaagaactggtgtggcaccagatgtcttcgctgaaaacatgaagctcagagaggacacccatcatttggtcaactatattccccagggttcaatagattcactctttgaaggaacgtggtacttagttagggtggatgaaaagcacagaagaacttacgctcggcgtcccactccaaatgatgacactttggatgaaggagtaggacttgtgcattcaaacatagcaactgagcatattccaagccctgccaagaaagtaccaagactccctgccacagcagcagaacctgaagcagctgtcattagtaatggggaacattaagatactctgtgaggtgcaagacttcagggtggggtgggcatggggtgggggtatgggaacagttgg

SEQ ID NO: 1583 - protein, 520 aa, Homo sapiens
MPGSLPLNAEACWPKDVGIVALEIYFPSQYVDQAELEKYDGVDAGKYTIGLGQAKMGFCTDREDINSLCMTVVQNLMERNNLSYDCIGRLEVGTETIIDKSKSVKTNLMQLFEESGNTDIEGIDTTNACYGGTAAVFNAVNWIESSSWDGRYALVVAGDIAVYATGNARPTGGVGAVALLIGPNAPLIFERGLRGTHMQHAYDFYKPDMLSEYPIVDGKLSIQCYLSALDRCYSVYCKKIHAQWQKEGNDKDFTLNDFGFMIFHSPYCKLVQKSLARMLLNDFLNDQNRDKNSIYSGLEAFGDVKLEDTYFDRDVEKAFMKASSELFSQKTKASLLVSNQNGNMYTSSVYGSLASVLAQYSPQQLAGKRIGVFSYGSGLAATLYSLKVTQDATPGSALDKITASLCDLKSRLDSRTGVAPDVFAENMKLREDTHHLVNYIPQGSIDSLFEGTWYLVRVDEKHRRTYARRPTPNDDTLDEGVGLVHSNIATEHIPSPAKKVPRLPATAAEPEAAVISNGEH

SEQ ID NO: 1584 - DNA, 1709 bp, Homo sapiens
caatgggtttgccaccagaacacaggtgttgtgaaaactacccctaaaagccaaaatgggaaaggaaaagactcatatcaacattgtcgtcattggacacgtaaattcgggcaagtccaccactactggccatctgacctacaaatgtggtggcatcgacaaaagaaccattgaaaaatttgagaaggaggctgctgagatgggaaaggactccttcaagtatgcctgggtcttgcataaactgaaagctgagcgtgaacgtggtatcaccattgatatctccttgtggaaatttgagaccagcaagtactatgtgactatcattgatgccccaggactcagagacttcatcaaaaacatgattacagggacatctcaggctgtgctgtcctgatggttgctgctggtgttggcgaatttgaaactggtatctccaagaatgggcagacctgagagcatgcccttctggcttacacactgggtgtgaaacaactaattgttggtgttaacaaaatggattccactgagccaccctacagccagaagagagaagaggaaattgttaaggaagtcagcacttacattaagaaaattggttacaaccctgacacagtagcatttgtgccaatttctggttggaatggtgacaacatgctggagccgagtgctaacatgccttggctcaagggatggaaagccacccgtaaggatggcagtgccagcggcaccatgctgcttgaggctctggactgcatcctaccaccaactcatccaactgacaagcccttgcgcctgcctctccaggatgtctacaaaattggtggtattggtactgttcctgttggccgagtggagactggtgttctcaaacctggtgtggtggtcacctttgctccagtcaacattacaacagaagtaaaatctgtcgaaatgcaccatgaagctttgagtgaagctcttcctggggacaatgtgggcttcaatgtcaagaatgtgtctgtcaaggatgttcgtcgtggcaacgttgctggtgacagcaaaaatgacccaccaatggaaacagctgacttcattgctcaggtaattatcctgaaccatccaggccaaataagcgctggctatgcccctatattggattgccacgcggctcacattgcatgcaagtttgctgagctgaaggaaaagattgatcgcggttctggtaaaaagctggaagatggccctaaattcttgaagtctggtgatgctgccattgttgatatggttcctggcaagcccattgttgagagcttctcagactatccacctttgggtcattttgctgttcgtgatatgagacagacagttgcggtgggtgtcatcaaagcagtggacaagaaggctgctggaggtggcaaggtcacgaagtctgcccagacagctcagaaggctaaatgaatattatccctaatacctgccacccaactcttaatcagtggtggaagaatggtctcagaactgtttgtttcaattggccatttaagtttagtagtgaaagactggttaatgataacaatgcatcgtaaaaccttcagaaggaaaggagaatgttttgtggaccactttggttttcttttttgcatgtggtagttttaagttattagtttttaaaatcagtactttttaatggaaacaacttgaccaaaaatttgtcacagaattttgagacc

SEQ ID NO: 1585 - protein, 307 aa, Homo sapiens
MDSTEPPYSQKREEEIVKEVSTYIKKIGYNPDTVAFVPISGWNGDNMLEPSANMPWLKGWKATRKDGSASGTMLLEALDCILPPTHPTDKPLRLPLQDVYKIGGIGTVPVGRVETGVLKPGVVVTFAPVNITTEVKSVEMHHEALSEALPGDNVGFNVKNVSVKDVRRGNVAGDSKNDPPMETADFIAQVIILNHPGQISAGYAPILDCHAAHIACKFAELKEKIDRGSGKKLEDGPKFLKSGDAAIVDMVPGKPIVESFSDYPPLGHFAVRDMRQTVAVGVIKAVDKKAAGGGKVTKSAQTAQKAK

SEQ ID NO: 1586 - DNA, 889 bp, Homo sapiens
cacaggtgttgtgaaaactacccctaaaagccaaaatgggaaaggaaaagactcatatcaacattgtcgtcattggacacgtaaattcgggcaagtccaccactactggccatctgacctacaaatgtggtggcatcgacaaaagaaccattgaaaaatttgagaaggaggctgctgagatgggaaaggactccttcaagtatgcctgggtcttgcataaactgaaagctgagcgtgaacgtggtatcaccattgatatctccttgtggaaatttgagaccagcaagtactatgtgactatcattatgcccttctggcttacacactgggtgtgaaacaactaattgttggtgttaacaaaatggattccactgagccaccctacagccagaagagagaagaggaaattgttaaggaagtcagcacttacattaagggtgacaacatgctggagccgagtgctaacatgccttggctcaagggatggaaagccacccgtaaggatggcagtgccagcggcaccatgctgcttgaggctctggactgcatcctaccaccaactcatccaactgacaagcccttgcgcctgcctctccaggatgtctacaaaattggtggtattggtactgttcctgttggccgagtggagactggtgttctcaaacctggtgtggtggtcacctttgctccagtcaacattacaacagaagtaaaatctgtcgaaatgcaccatgaagctttgagtgaagctcttcctggggacaatgtgggcttcaatgtcaagaatgtgtctgtcaaggatgttcgtcgtggcaacgttgctggtgacaaccatccaggccaaataagcgctggctatgcccctatattggattgccacgcggctcac

SEQ ID NO: 1587 - DNA, 982 bp, Homo sapiens
aaattgttaaggaagtcagcacttacattaagaaaattggttacaaccctgacacagtagcatttgtgccaatttctggttggaatggtgacaacatgctggagccgagtgctaacatgccttggctcaagggatggaaagccacccgtaaggatggcagtgccagcggcaccatgctgcttgaggctctggactgcatcctaccaccaactcatccaactgacaagcccttgcgcctgcctctccaggatgtctacaaaattggtggtattggtactgttcctgttggccgagtggagactggtgttctcaaacctggtgtggtggtcacctttgctccagtcaacattacaacagaagtaaaatctgtcgaaatgcaccatgaagctttgagtgaagctcttcctggggacaatgtgggcttcaatgtcaagaatgtgtctgtcaaggatgttcgtcgtggcaacgttgctggtgacagcaaaaatgacccaccaatggaaacagctgacttcattgctcaggtaattatcctgaaccatccaggccaaataagcgctggctatgcccctatattggattgccacgcggctcacattgcatgcaagtttgctgagctgaaggaaaagattgatcgcggttctggtaaaaagctggaagatggccctaccacctttgggtcattttgctgttcgtgatatgagacagacagttgcggtgggtgtcatcaaagcagtggacaagaaggctgctggaggtggcaaggtcacgaagtctgcccagacagctcagaaggctaaatgaatattatccctaatacctgccacccaactcttaatcagtggtggaagaatggtctcagaactgtttgtttcaattggccatttaagtttagtagtgaaagactggtactttttaatggaaacaacttgaccaaaaatttgtcacagaattttgagacctgttaaaaaagtttaatgag

SEQ ID NO: 1588 - DNA, 6408 bp, Homo sapiens
tttgtccatgtctcggacagagcctgggaagctgccagtgagatttcagagaccaagagcgcgaaggggcgggcgatgtggcaatccgtctgggatgtgaaaagcgtggagcgcatttagaggaattcgacgaaaacacaggaaatcactcctctcccgctcctgggcgccgctgccactggggcagaggactgggaaccgcggcagcgggataagtggcccagccagagagcgcagctcccgcgcccggtcctgccctgcgaaccagcgcggccccctggcgctgaggctgctccggccatggcccctcggccccgcgcccgcccaggggtcgctgtcgcctgctgctggctcctcactgttgttctacgctgctgcgtatcattcaatgttgatgtgaaaaattcaatgactttcagcggcccggtggaagacatgtttggatatactgttcaacaatatgaaaatgaagaaggaaaatgggtgcttattggttctccgttagttggccaacccaaaaacagaactggagatgtctataagtgtccagttgggagaggtgaatcattaccttgtgtaaagttggatctaccagttaatacatcaattcccaatgtcacagaagtaaaggagaacatgacatttggatcaactttagtcaccaacccaaatggaggatttctggcttgtgggcccttatatgcctatagatgtggacatttgcattacacaactggaatctgttctgacgtcagccccacatttcaagtcgtgaattccattgcccctgtacaagaatgcagcactcaactggacatagtcatagtgctggatggttccaacagtatttacccatgggacagtgttacagcttttttaaatgaccttcttgaaagaatggatattggtcctaaacagacacaggttggaattgtacagtatggagaaaacgtgacccatgagttcaacctcaataagtattcttccaccgaagaggtacttgttgcagcaaagaaaatagtccagagaggtggccgccagactatgacagctcttggaatagacacagcaagaaaggaggcattcacggaagcccggggtgcccgaagaggagttaaaaaagtcatggttattgtgacagatggagagtctcatgacaatcatcgactgaagaaggtcatccaagactgtgaagatgaaaacattcaacggttttccatagctattcttggcagctataaccgaggaaatttaagcactgaaaaatttgtggaggaaataaaatcaattgcaagtgaacccactgaaaagcatttcttcaatgtctctgatgaattggctctagtcaccattgttaaaactctgggagaaagaatatttgccctggaagccacagctgaccagtcagcagcttcatttgaaatggaaatgtctcagactggcttcagtgctcattattcacaggactgggtcatgcttggagcagtaggagcctatgattggaatggaacagttgtcatgcagaaggctagtcaaatcataatccctcgaaacacaacctttaatgttgagtctaccaaaaagaatgaaccgcttgcttcttatttaggttacactgtaaactctgctactgcttcttctggagatgtgctctatattgctggacagcctcggtacaatcatacaggccaggtcattatctacaggatggaagatggaaacatcaaaattctccagacgctcagtggagaacagattggttcctactttggcagtattttaacaacaactgacattgacaaggattctaatactgacattcttctagtcggagcccctatgtacatgggaacagagaaggaggagcaaggaaaagtgtatgtgtatgctctcaatcagacaaggtttgaatatcaaatgagcctggaacctattaagcagacgtgctgttcatctcggcagcacaattcatgcacaacagaaaacaaaaatgagccatgcggggctcgttttggaactgcaattgctgctgtaaaagacctcaatcttgatggatttaatgacatcgtgataggagctccgctggaagatgatcacgggggagctgtgtacatttatcatggaagtggcaagactataaggaaagagtatgcacaacgtattccatcaggtggggatggtaagacactgaaattttttggccagtctatccacggagaaatggatttaaatggtgacggtctgacagatgtgactattgggggccttggtggtgctgccctcttctggtcccgagatgtggccgtagttaaagtgaccatgaattttgagccaaataaagtgaatattcaaaagaaaaactgccatatggagggaaaggaaacagtatgcataaatgctacagtgtgttttgatgtgaaattaaagtctaaagaagacacgatttatgaagctgatttgcagtaccgtgtcaccctagattcactaagacaaatatcacgaagttttttctctggaactcaagagagaaaggttcaaaggaacatcacagttcgaaaatcagaatgcactaagcactccttctacatgttgacaagcatgactttcaggactctgtgagaataacgttggactttaatcttaccgatccagaaaatgggcctgttcttgatgattctctaccaaactcagtacatgaatatattccctttgccaaagattgtggaaataaggaaaaatgtatctcagacctcagcctgcatgtcgccaccactgaaaaggacctgctgattgtccgatcccagaatgataagttcaacgttagcctcacagtcaaaaatacaaaggacagtgcctataacaccaggacaatagtgcattattctccaaatctagttttttcaggaattgaggctatccaaaaagacagttgtgaatctaatcataatatcacatgtaaagttggatatcccttcctgagaagaggagagatggtaactttcaaaatattgtttcagtttaacacatcctatctcatggaaaatgtgaccatttatttaagtgcaacaagtgacagcgaagaacctcctgaaaccctttctgataatgtagtaaacatttctatcccggtaaaatatgaagttggactacagttttacagctctgcaagtgaataccacatttcaattgctgccaatgagacagtccctgaagttattaattctactgaggacattggaaatgaaattaatatcttctacttgattagaaaaagtggatcttttccaatgccagagcttaagctgtcaatttcattccccaatatgacatcaaatggttaccctgtgctgtacccaactggattgtcatcttctgagaatgcaaactgcagaccccatatctttgaggatcctttcagtatcaactctggaaagaaaatgactacatcaactgaccatctcaaacgaggcacaattctggactgcaatacatgtaaatttgctaccatcacatgtaatctcacttcttctgacatcagccaagtcaatgtttcgcttatcttgtggaaaccaacttttataaaatcatatttttccagcttaaatcttactataaggggagaacttcggagtgaaaatgcatctctggttttaagtagcagcaatcaaaaaagagagcttgctattcaaatatccaaagatgggctaccgggcagagtgccattatgggtcatcctgctgagtgcttttgccggattgttgctgttaatgctgctcattttagcactgtggaagattggattcttcaaaagaccactgaaaaagaaaatggagaaatgaaatattttatgaaagaaaataataacaattattcaataatctatcctcaggtttgcctcaaatatgtgacaagaaatgtataattcatgacatagtcatgtaactatgtaatccatcagggattcattacttggaaaatgacaggtcatgcattatccaaaaacaataccaaaaagacatattttataaaatgacaaaaaatattttacataattactcatttttgttgagtaagcaaaattacaaagtgtttttaaaaaaacctgtacaaatatgtttatgtattaaatcaccatccaaaatatttaaggaatatataaaaagatttttatgatcatagaaacatctattttcaaaacaatataaattaagcttttccccttgattcctgttggatatccatgttcagcatgacagtcagcactcgtaaatgccaagaaaagaattacctgaaaaagatcatttctccctattcaaatgagaatattttcccttggtagaatccatatacaatatggattgaaaattaagtcaccaagaatacatttagcatctttgtgttgggttctatacctaaaaattttccctccctgcccaaggtgattggaaagtactgcaattgagctaaaattttatctaggatggaaaatcaggatagactcgtttaaaaacaagtatattaaatgggttaaattaagcttttacagaacatgcttaattttgatattgagctctaaatgcaaaactcttttatactgaaaaaacacttaaagtagttttgtgtggcatcacagtgatttgtcatgaaaagccatatatgggggacatgctaaaatggcttctgaatgaaatacgacagcagagaaagatgccactgaaatgctgaaattatctttgctgagcagcttttgaatgctaagggttccagtatgtgacccaaagaaagagttgtctcaactccttggtacagggttcattcaaacccccaagctgtgagagtgtgtttatttttaattttttaaaaggtatttaatttccaaccacacttcttatttttttgaaaagacaattttccatttcagtattacattttaccaagaagtcactgctttttaggtgtgttgcatcaatatttaaataaaatcccagaaatgtattttaaagaatttcaggtttgaaaactcaaaccaacaggaagatatcacacctttgtatgtgcttctttgttcttgaagtagtcattatggttcattggaatctactgtagcataagctcctaggttgctccatttcttaggaaaatagcaatgaatgaatgtatagtagctgcatgtgtgaactactgctgtaaagtttgctgacatttctgcaacaacatttctccatctgatttaccagaacctgtaacaagaccagaacatgtattcatccagaaactcctgggctctgctttgttcaaagaggagcaaatccacatagaaattaaatgttataaatttatttttttaaactaatttccaaagaatttagctgaagactcagagtcagcctacctcttgactctccacatccgcatctaagatcctgaaggccaaaggaatgcgcctgtgggatgccaaagccatcagtagctggaagaaagaatacctctttctagaggtttggtgtcctcttgctggcctgtcattatttggaaatacgcgcttttggaatttccttcattttcgctatttccaggttcagaaatcatacctaccacttgttctttctttgcccagtaaaactcagggtttctcttattcagagttaccatgttgcacacccccagtgctcagcctgcccagaagcccttctctgatctcagcaagatcttagtagtaaagctaacggatccattgaaattcatactcagcatctgtgactactagacaaagcccatttactgaaccataagtgtgcacttttaaactaaattgttaactgaaagggaaaaaatagaaatgagggcattttgaagtttttagaaaagagaggaagagctgttggccagatcaaagagatacttataagcccggcacaatttttaacataagtcattcctggctattaagtaaaatatttcatgaaccagaagtcctgtttctctaatattataatttgttgaggtttgtgtgtgtgtgtgtgtgcatgtgcagacacatgtacacatataaattgaatacaaaaatagctctataacaccaaaaaacagagtttacagaaaataaacacaaaagctatatctgcaagacaagtttgattcatctagtttcatatagtttcatatagtttcatttttattaatatttaggtttaacttatagttctgcaattatttaaaaaacaagtacagagcgtttgattaaaaaaagtcaacaaatgtttcaaaacagctttgtacaaatgttataaaacatatttaatgattaagaaatgtactagactctatcatttacttttaaaacatttaattagaaaaacaggtgatatttaagactatttataaacttattggccaaattgccaaaaa

SEQ ID NO: 1589 - protein, 772 aa, Homo sapiens
MAPRPRARPGVAVACCWLLTVVLRCCVSFNVDVKNSMTFSGPVEDMFGYTVQQYENEEGKWVLIGSPLVGQPKNRTGDVYKCPVGRGESLPCVKLDLPVNTSIPNVTEVKENMTFGSTLVTNPNGGFLACGPLYAYRCGHLHYTTGICSDVSPTFQVVNSIAPVQECSTQLDIVIVLDGSNSIYPWDSVTAFLNDLLERMDIGPKQTQVGIVQYGENVTHEFNLNKYSSTEEVLVAAKKIVQRGGRQTMTALGIDTARKEAFTEARGARRGVKKVMVIVTDGESHDNHRLKKVIQDCEDENIQRFSIAILGSYNRGNLSTEKFVEEIKSIASEPTEKHFFNVSDELALVTIVKTLGERIFALEATADQSAASFEMEMSQTGFSAHYSQDWVMLGAVGAYDWNGTVVMQKASQIIIPRNTTFNVESTKKNEPLASYLGYTVNSATASSGDVLYIAGQPRYNHTGQVIIYRMEDGNIKILQTLSGEQIGSYFGSILTTTDIDKDSNTDILLVGAPMYMGTEKEEQGKVYVYALNQTRFEYQMSLEPIKQTCCSSRQHNSCTTENKNEPCGARFGTAIAAVKDLNLDGFNDIVIGAPLEDDHGGAVYIYHGSGKTIRKEYAQRIPSGGDGKTLKFFGQSIHGEMDLNGDGLTDVTIGGLGGAALFWSRDVAVVKVTMNFEPNKVNIQKKNCHMEGKETVCINATVCFDVKLKSKEDTIYEADLQYRVTLDSLRQISRSFFSGTQERKVQRNITVRKSECTKHSFYMLTSMTFRTL

SEQ ID NO: 1590 - DNA, 1599 bp, Homo sapiens
gtgtaggggtagattttcgctgcagtgttccccgagcctgttagacgcagcgcgccgggagactgagagaggaaaggatagaggaagtgctgccctaggctgcatgagtcgaagcaagcgtgtttccttcccgccaggcaagtgcccttagaaaccgggccccgcccccttcctggcctgcattcccatcccctctcccggggcggaggtgaggacctccttggttcctttggttctgtcagtgagccccttccttggccatgaagctcgtgaggaagaacatcgagaaggacaatgcgggccaggtgaccctggtccccgaggagcctgaggacatgtggcacacttacaacctcgtgcaggtgggcgacagcctgcgcgcctccaccatccgcaaggtacagacagagtcctccacgggcagcgtgggcagcaaccgggtccgcactaccctcactctctgcgtggaggccatcgacttcgactctcaagcctgccagctgcgggttaaggggaccaacatccaagagaatgagtatgtcaagatgggggcttaccacaccatcgagctggagcccaaccgccagttcaccctggccaagaagcagtgggatagtgtggtactggagcgcatcgagcaggcctgtgacccagcctggagcgctgatgtggcggctgtggtcatgcaggaaggcctcgcccatatctgcttagtcactcccagcatgaccctcactcgggccaaggtggaggtgaacatccctaggaaaaggaaaggcaattgctctcagcatgaccgggccttggagcggttctatgaacaggtggtccaggctatccagcgccacatacactttgatgttgtaaagtgcatcctggtggccagcccaggatttgtgagggagcagttctgcgactacctgtttcaacaagcagtgaagaccgacaacaaactgctcctggaaaaccggtccaaatttcttcaggtacatgcctcctccggacacaagtactccctgaaagaggccctttgtgaccctactgtggctagccgcctttcagacactaaagctgctggggaagtcaaagccttggatgacttctataaaatgttacagcatgaaccggatcgagctttctatggactcaagcaggtggagaaggccaatgaagccatggcaattgacacattgctcatcagcgatgagctcttcaggcatcaggatgtagccacacggagccggtatgtgaggctggtggacagtgtgaaagagaatgcaggcaccgttaggatattctctagtcttcacgtttctggggaacagctcagccagttgactggggtagctgccattctccgcttccctgttcccgaactttctgaccaagagggtgattccagttctgaagaggattaatgattgaaacttaaaattgagacaatcttgtgtttcctaaactgttacagtacatttctcagcatccttgtgacagaaagctgcaagaatggcactttttgattcatacagggatttcttatgtctttggctacactagatattttgtgattggcaagacatgtatttaaacaataaacta

SEQ ID NO: 1591 - DNA, 525 bp, Homo sapiens
cttcccttttgcggctatcaccgaagcaggagtggccaaaatgaagtttaatccctttgtgacttccgaccgaagcaagaatcgcaaaaggcatttcaatgcaccttcccacattcgaaggaagactatgtcttcccctctttccaaagagctgagacagaagtacaacgtgtgatccatgcccatccgaaaggatgatgaagttcaggttgtacatggacactataaaggtcagcaaattggcaaagtagtccaggtttacaggaagaaatatgttatctacattgaacgggtgcagcgggaaaaggctaatggcacaactgtccacgtaggcattcaccccagcaaggtggttatcactaggctaaaactggacaaagactgtgaaaagatccttgaacggaaagccaaatcttgccaagtaggaaaggaaaagggcaaatacaaggaagaaacaattgagaagatgcaggaataaagtaatcttatatacaagcttcgattaaaacttgaaacaaagaaaaa

SEQ ID NO: 1592 - DNA, 2955 bp, Homo sapiens
gcgcgcggctccgctgggaagcgagacccgggtggcgggacaagacttgcttcccggccacgcgcgctcggccggccgtggggcggggcataggccgtgacgtgatgtcgcgtatcgagtctccgcccccttcccgcctccccgtatataagacttcgccgagcgctctcactcgcacaagtggaccggggtgttgggtgctagtcggcaccagaggcaagggtgcgaggaccacggccggctcggacgtgtgaccgcgcctagggggtggcagcgggcagtgcggggcggcaaggcgaccatggagcttttgcggactatcacctaccagccagccgccagcaccaaaatgtgcgagcaggcgctgggcaagggttgcggagcggactcgaagaagaagcggccgccgcagccccccgaggaatcgcagccacctcagtcccaggcgcaagtgcccccggcggcccctcaccaccatcaccaccattcgcactcggggccggagatctcgcggattatcgtcgaccccacgactgggaagcgctactgccggggcaaagtgctgggaaagggtggctttgcaaaatgttacgagatgacagatttgacaaataacaaagtctacgccgcaaaaattattcctcacagcagagtagctaaacctcatcaaagggaaaagattgacaaagaaatagagcttcacagaattcttcatcataagcatgtagtgcagttttaccactacttcgaggacaaagaaaacatttacattctcttggaatactgcagtagaaggtcaatggctcatattttgaaagcaagaaaggtgttgacagagccagaagttcgatactacctcaggcagattgtgtctggactgaaataccttcatgaacaagaaatcttgcacagagatctcaaactagggaacttttttattaatgaagccatggaactaaaagttggggacttcggtctggcagccaggctagaacccttggaacacagaaggagaacgatatgtggtaccccaaattatctctctcctgaagtcctcaacaaacaaggacatggctgtgaatcagacatttgggccctgggctgtgtaatgtatacaatgttactagggaggcccccatttgaaactacaaatctcaaagaaacttataggtgcataagggaagcaaggtatacaatgccgtcctcattgctggctcctgccaagcacttaattgctagtatgttgtccaaaaacccagaggatcgtcccagtttggatgacatcattcgacatgacttttttttgcagggcttcactccggacagactgtcttctagctgttgtcatacagttccagatttccacttatcaagcccagctaagaatttctttaagaaagcagctgctgctctttttggtggcaaaaaagacaaagcaagatatattgacacacataatagagtgtctaaagaagatgaagacatctacaagcttaggcatgatttgaaaaagacttcaataactcagcaacccagcaaacacaggacagatgaggagctccagccacctaccaccacagttgccaggtctggaacacccgcagtagaaaacaagcagcagattggggatgctattcggatgatagtcagagggactcttggcagctgtagcagcagcagtgaatgccttgaagacagtaccatgggaagtgttgcagacacagtggcaagggttcttcggggatgtctggaaaacatgccggaagctgattgcattcccaaagagcagctgagcacatcatttcagtgggtcaccaaatgggttgattactctaacaaatatggctttgggtaccagctctcagaccacaccgtcggtgtccttttcaacaatggtgctcacatgagcctccttccagacaaaaaaacagttcactattacgcagagcttggccaatgctcagttttcccagcaacagatgctcctgagcaatttattagtcaagtgacggtgctgaaatacttttctcattacatggaggagaacctcatggatggtggagatctgcctagtgttactgatattcgaagacctcggctctacctccttcagtggctaaaatctgataaggccctaatgatgctctttaatgatggcacctttcaggtgaatttctaccatgatcatacaaaaatcatcatctgtagccaaaatgaagaataccttctcacctacatcaatgaggataggatatctacaactttcaggctgacaactctgctgatgtctggctgttcatcagaattaaaaaatcgaatggaatatgccctgaacatgctcttacaaagatgtaactgaaagacttttcgaatggaccctatgggactcctcttttccactgtgagatctacagggaacccaaaagaatgatctagagtatgttgaagaagatggacatgtggtggtacgaaaacaattcccctgtggcctgctggactgggtggaaccagaacaggctaaggcatacagttcttgactttggacaatccaagagtgaaccagaatgcagttttccttgagatacctgttttaaaaggtttttcagacaattttgcagaaaggtgcattgattcttaaattctctctgttgagagcatttcagccagaggactttggaactgtgaatatacttcctgaaggggagggagaagggaggaagctcccatgttgtttaaaggctgtaattggagcagcttttggctgcgtaactgtgaactatggccatatataattttttttcattaatttttgaagatacttgtggctggaaaagtgcattccttgttaataaactttttatttattacagcccaaagagcagtatttattatcaaaatgtctttttttttatgttgaccattttaaaccgttggcaataaagagtatgaaaacgc

SEQ ID NO: 1593 - DNA, 849 bp, Homo sapiens
atggaaggcatcaccgctgtcacggtcaaccagagcctgctgaactcccttaactggagatggactccagcatccaggagaccacacccaggagaagaaccagatcaagacactcaacaacaagtttgcctccttcatagacaaggtacagttcctggagcagcagaacaagatgctggagaccaactggagcctcctgcagcaggagaagatggctcggagcaacatggacaacatgagaagctgaagctggaggcggaacttggcaacatgcaggggctgctggaggacttcaagaacaagtatgaggatgagatcaataagcgtacagggatggagaatgaatttttcctcatcaagaaggatgtggataaagcttacatgacaaggcagctgtatgaagaggagatccaggagctgcagtcccagatctcggacacgtctgtggtgctgtccatggacaacagccgctccctggacatacgtggggagctggccgataaggatgccaacgccaagctgtctgagctggaggccgccctgcagtggaccaagcaggacatgggcggcagctgcctgctggagggcgaggagagccggctggagtctgggatgcagaacatgagtatccgtacgaagaccaccagcggctatgcaggtggtctgagctcgacctatgggggcctcacaagccccggcctcagctacggcctgggctccagttttggctctggtgcgggctcctgcgctttcagccgcacctgctccatcagggccatgattgtgaagaagattgagacccacgatgggaagctggtgtccgagtcctctgacgtcctgctcaagtga

SEQ ID NO: 1594 - protein, 282 aa, Homo sapiens
MEGITAVTVNQSLLNSLNWRWTPASRRPHPGEEPDQDTQQQVCLLHRQGTVPGAAEQDAGDQLEPPAAGEDGSEQHGQHEKLKLEAELGNMQGLLEDFKNKYEDEINKRTGMENEFFLIKKDVDKAYMTRQLYEEEIQELQSQISDTSVVLSMDNSRSLDIRGELADKDANAKLSELEAALQWTKQDMGGSCLLEGEESRLESGMQNMSIRTKTTSGYAGGLSSTYGGLTSPGLSYGLGSSFGSGAGSCAFSRTCSIRAMIVKKIETHDGKLVSESSDVLLK

SEQ ID NO: 1595 - DNA, 656 bp, Homo sapiens
gttgaaggaggcattgttttgggagggggttttgccctccttcgatgcattccagccttggactcattgactccagctaatgaagatcaaaaaattggtatggaaattgttaaaagaacactcaaaattccagcaatgaccactgctacgaatgcaggtgttgaaggatctttgatagttgagaaaattatgcaaaattcctcagaagttggttatgatgctatggttggagattttatgaatatggtagaaaaaggaattattgacccaacaaagcttgtgagaactgctttattggatgctgctggtgtggcctctctgttaactacagcagaagttgtagtcacagaaattcctaaagaagagaaggaccctggaatgggtgcaatgggtggaatgggaggtggtatgggaggtggcatgttctaactcctagactagtgctttacctttattaatgaactgtgacaggaagcccaaggcagtgttcctcaccaataacttcagagaagtcagttggagaaaatgaaaaatatataatggtttactgctgtcattgtccatgcctacagataatttattttgtatttttgaataaaaaacatttgtacattcctgatactgggtacaagagccatgtaccaatgtactgcttt

SEQ ID NO: 1596 - DNA, 711 bp, Homo sapiens
acctgtctcgccgcgcgcatgccctgcagccgccccacagaaatgcttcggttacccacagtctttcgccagatgagaccagtgtccagggtactggctcctcatctcactcgagcttatgccaaagatgtaaaatttggtgcagatgcccgagccttaatgcttcaaggtgtagaccttttagccgatgctgtggccgttacaatggagccaaagggaagaacagtgattattgagcagagctggggaagtcccaacgtaacaaaagatggtgtgactgttgcaaagtcaattgacttgaaggataaatataaaaacattggagctaaacttgttcaagatgttgccaataacacaaattgaaaaacgtattcaagaaatcattgggcagttagatgtcacaactagtgaatatgaaaaggaaaaactgaatgaatggctggcaaaactttcagatggagtagttgtgctgaagtttggtgggacaagtgatgttgaagtgaatgaaaagaaagacagagttacagatgcccttaatgctacaagagctgctgttgaaggaggcattgttttgggagggggttttgccctccttcgatgcattccagcaatgaccactgctacgaatgcaggtgttgaaggatctttgatagttgagaaaattatgcaaaattcctcagaagttggttatgatgctatggttggagattt

SEQ ID NO: 1597 - DNA, 1393 bp, Homo sapiens
ctctgtccctcactcgccgccgacaacctgtctcgccgcgcgcatgccctgcagccgccccacagaaatgcttcggttacccacagtctttcgccagatgagaccagtgtccagggtactggctcctcatctcactcgagcttatgccaaagatgtaaaatttggtgcagatgcccgagccttaatgcttcaaggtgtagaccttttagccgatgctgtggccgttacaatggagccaaagggaagaacagtgattattgagcagagctggggaagtcccaacgtaacaaaagatggtgtgactgttgcaaagtcaattgacttgaaggataaatataaaaacattggagctaaacttgttcaagatgttgccaataacacaaatgaagaatctggggatggcactaccactgctactgtactggcaggctctatagccaaggaaggcttccagaagattagcaaaggtgctaatccagtggaaatcaggagaggtgtgatgttagctgttgatgctgtaattgctgaacttaaaaagcagtctaaacctgtgaccacccctgaagaaattgcacaggttgctatgatttctgcaaatggagacaaagaaattggcaatatcatctctgatgcaatgaaaaaggttggaagaaagggtgtcatcacagtaaaggatggaaaaacactgaatgatgaattagaaattattgaaggcatgaagtttgattgagggtatatttctccatactttattaatacatcaaaaggtcagaaatgtgaattccaggatgcctatgttctgttgagtgaaaagaaaatttctagtgtccagtccattgtacctgctcttgaaattgccaatgctcaccataagcctttggtgataatcgctgaagatgttgatggagaagctctaagtacactcatcttgaataggctaaaggttggtcttcaggttgtggcagtcaaggctccagggtttggtgacaatagaaagaaccaacttaaagatatggctattgctactggtggtgcagtgtttggagaagaggggttgaccctgaatcttgaagatgttcagcctcatgacttaggaaaagttggagaggtcattgtgaccaaagacgatgccatgctcttaaaaggaaaaggtgacaaggctcaacttgaaaaacgtattcaagaaatcattgggcagttagatgtcacaactagtgaatatgaaaaggaaaaactgaatgaatggctggcaaaactttcagatggagtagttgtgctgaagtttggtgggacaagtgatgttgaagtgaatgaaggcattgttttgggagggggttttgccctccttcgatgcattccagccttggactcattgactccagctaatgaagat

SEQ ID NO: 1598 - DNA, 1578 bp, Homo sapiens
acgaacaggccaataaggagggagcagtgcggggtttaaatctgaggctaggctggctcttctcggcgtgctgcggcggaacggctgttggtttctgctggttgtaggtccttggctggtcgggcctccggtgttctgcttctccccgctgagctgctgcctggtgaagaggaagccatggcgctccgagtcaccaggaactcgaaaattaatgctgaaaataaggcgaagatcaacatggcaggcgcaaagcgcgttcctacggcccctgctgcaacctccaagcccggactgaggccaagaacagctcttggggacattggtaacaaagtcagtgaacaactgcaggccaaaatgcctatgaagaaggaagcaaaaccttcagctactggaaaagtcattgataaaaaactaccaaaacctcttgaaaaggtacctatgctggtgccagtgccagtgtctgagccagtgccagagccagaacctgagccagaacctgagcctgttaaagaagaaaaactttcgcctgagcctattttggttgatactgcctctccaagcccaatggaaacatctggatgtgcccctgcagaagaagacctgtgtcaggctttctctgatgtaattcttgcagtaaatgatgtggatgcagaagatggagctgatccaaacctttgtagtgaatatgtgaaagatatttatgcttatctgagacaacttgaggaagagcaagcagtcagaccaaaatacctactgggtcgggaagtcactggaaacatgagagccatcctaattgactggctagtacaggttcaaatgaaattcaggttgttgcaggagaccatgtacatgactgtctccattattgatcggttcatgcagaataattgtgtgcccaagaagatgctgcagctggttggtgtcactgccatgtttattgcaagcaaatatgaagaaatgtaccctccagaaattggtgactttgcttttgtgactgacaacacttatactaagcaccaaatcagacagatggaaatgaagattctaagagctttaaactttggtctgggtcggcctctacctttgcacttccttcggagagcatctaagattggagaggttgatgtcgagcaacatactttggccaaatacctgatggaactaactatgttggactatgacatggtgcactttcctccttctcaaattgcagcaggagctttttgcttagcactgaaaattctggataatggtgaatggacaccaactctacaacattacctgtcatatactgaagaatctcttcttccagttatgcagcacctggctaagaatgtagtcatggtaaatcaaggacttacaaagcacatgactgtcaagaacaagtatgccacatcgaagcatgctaagatcagcactctaccacagctgaattctgcactagttcaagatttagccaaggctgtggcaaaggtgtaacttgtaaacttgagttggagtactatatttacaaataaaattggcaccatgtgccatctgtaaaaaaaaaaaaaaaaaaaaaaaaaaaaaaaaaaaaaa

SEQ ID NO: 1599 - protein, 433 aa, Homo sapiens
MALRVTRNSKINAENKAKINMAGAKRVPTAPAATSKPGLRPRTALGDIGNKVSEQLQAKMPMKKEAKPSATGKVIDKKLPKPLEKVPMLVPVPVSEPVPEPEPEPEPEPVKEEKLSPEPILVDTASPSPMETSGCAPAEEDLCQAFSDVILAVNDVDAEDGADPNLCSEYVKDIYAYLRQLEEEQAVRPKYLLGREVTGNMRAILIDWLVQVQMKFRLLQETMYMTVSIIDRFMQNNCVPKKMLQLVGVTAMFIASKYEEMYPPEIGDFAFVTDNTYTKHQIRQMEMKILRALNFGLGRPLPLHFLRRASKIGEVDVEQHTLAKYLMELTMLDYDMVHFPPSQIAAGAFCLALKILDNGEWTPTLQHYLSYTEESLLPVMQHLAKNVVMVNQGLTKHMTVKNKYATSKHAKISTLPQLNSALVQDLAKAVAKV

SEQ ID NO: 1600 - DNA, 1717 bp, Homo sapiens
gctggcaagcgcttcctgcgcagcgcctaggcgacctggagtttgtgacgctgtgatggtctagaggctggagattcaagatctgggtgccatcattttctggttctgttgatgaccctcttccaggttacatacagcttacatcttgcatcctcaagcgtttttcttataaggctaaaaattcacaaagcatatatcaatgaatcaggaggatctagatccggatagtactacagatgtgggagatgttacaaatactgaagaagaacttattagagaatgtgaagaaatgtggaaagatatggaagaatgtcagaataaattatcacttattggaactgaaacactcaccgattcaaatgctcagctatcattgttaattatgcaagtaaaatgtttaaccgctgaactcagtcaatggcagaaaaaaacacctgaaacaattcccttgactgaagacgttctcataacattaggaaaagaagagttccaaaagctgagacaagatcttgaaatggtactgtccactaaggagtcaaagaatgaaaagttaaaggaagacttagaaagggaacaacggtggttggatgaacagcaacagataatggaatctcttaatgtactacacagtgaattgaaaaataaggttgaaacattttctgaatcaagaatctttaatgaactgaaaactaaaatgcttaatataaaagaatataaggagaaactcttgagtaccttgggcgagtttctagaagaccattttcctctgcctgatagaagtgttaaaaagaaaaagaaaaacattcaagaatcatctgtaaacctgataacactgcatgaaatgttagagattcttataaatagattatttgatgttccacatgatccatatgtcaaaattagtgattccttttggccaccttatgttgagctgctgctgcgtaatggaattgccttgagacatccagaagatccaacccgaataagattagaagctttccatcagtaaaaggatgttttcttttttcacacagtaaaaattcttatcattcaaggatattggaaccacaggactatttggataaaaaacattatttgcaaattaatgcgcataggccatcttacttttattgcaaaatggcatgtgctgccatctattattcatttttaaatggtcatttcttattcagtgagtgctttagtgttttaaactatatggataagaatgcaggtagataatattctaggcataaaacatttaatgtaccttacctcatgcaatattctttggattctttgttgatttatgatattgctaatataatattttcttaaaatatataacaatatcttttatgcattttgagttccagctggtgcttctttatatttagaaattataatgggaaggtcatttaatttacagatggttttaaaattgaggtaatatctgaggtggcataatttaaaaatatttagcaaatttgtttcatatatactgtcttatttctagatttgtttaaaattggaatatgaaaaactaatggataaagctagcataaaattgatattttagtttgtattattaatatatcatgttaccttatatattaatctactcttgattctgctaattattaccaacaaaattgtattcatgacattttattaatcctctgtgaattttctgtaaataaaattatttctgaaaatctct

SEQ ID NO: 1601 - protein, 269 aa, Homo sapiens
MNQEDLDPDSTTDVGDVTNTEEELIRECEEMWKDMEECQNKLSLIGTETLTDSNAQLSLLIMQVKCLTAELSQWQKKTPETIPLTEDVLITLGKEEFQKLRQDLEMVLSTKESKNEKLKEDLEREQRWLDEQQQIMESLNVLHSELKNKVETFSESRIFNELKTKMLNIKEYKEKLLSTLGEFLEDHFPLPDRSVKKKKKNIQESSVNLITLHEMLEILINRLFDVPHDPYVKISDSFWPPYVELLLRNGIALRHPEDPTRIRLEAFHQ

SEQ ID NO: 1602 - DNA, 2389 bp, Homo sapiens
gcaggaagatggcggcggtagcggaggtgtgagtggacgcgggactcagcggccggattttctcttcccttcttttcccttttccttccctatttgaaattggcatcgagggggctaagttcgggtggcagcgccgggcgcaacgcaggggtcacggcgacggcggcggcggctgacggctggaagggtaggcttcattcaccgctcgtcctccttcctcgctccgctcggtgtcaggcgcggcggcggcgcggcgggcggacttcgtccctcctcctgctcccccccacaccggagcgggcactcttcgcttcgccatcccccgacccttcaccccgaggactgggcgcctcctccggcgcagctgagggagcgggggccggtctcctgctcggttgtcgagcctccatgtcggataatcagagctggaactcgtcgggctcggaggaggatccagagacggagtctgggccgcctgtggagcgctgcggggtcctcagtaagtggacaaactacattcatgggtggcaggatcgttgggtagttttgaaaaataatgctctgagttactacaaatctgaagatgaaacagagtatggctgcagaggatccatctgtcttagcaaggctgtcatcacacctcacgattttgatgaatgtcgatttgatattagtgtaaatgatagtgtttggtatcttcgtgctcaggatccagatcatagacagcaatggatagatgccattgaacagcacaagactgaatctggatatggatctgaatccagcttgcgtcgacatggctcaatggtgtccctggtgtctggagcaagtggctactctgcaacatccacctcttcattcaagaaaggccacagtttacgtgagaagttggctgaaatggaaacatttagagacatcttatgtagacaagttgacacgctacagaagtactttgatgcctgtgctgatgctgtctctaaggatgaacttcaaagggataaagtggtagaagatgatgaagatgactttcctacaacgcgttctgatggtgacttcttgcatagtaccaacggcaataaagaaaagttatttccacatgtgacaccaaaaggaattaatggtatagactttaaaggggaagcgataacttttaaagcaactactgctggaatccttgcaacactttctcattgtattgaactaatggttaaacgtgaggacagctggcagaagagactggataaggaaactgagaagaaaagaagaacagaggaagcatataaaaatgcaatgacagaacttaagaaaaaatcccactttggaggaccagattatgaagaaggccctaacagtctgattaatgaagaagagttctttgatgctgttgaagctgctcttgacagacaagataaaatagaagaacagtcacagagtgaaaaggtgagattacattggcctacatccttgccctctggagatgccttttcttctgtggggacacatagatttgtccaaaagccctatagtcgctcttcctccatgtcttccattgatctagtcagtgcctctgatgatgttcacagattcagctcccaggttgaagagatggtgcagaaccacatgacttactcattacaggatgtaggcggagatgccaattggcagttggttgtagaagaaggagaaatgaaggtatacagaagagaagtagaagaaaatgggattgttctggatcctttaaaagctacccatgcagttaaaggcgtcacaggacatgaagtctgcaattatttctggaatgttgacgttcgcaatgactgggaaacaactatagaaaactttcatgtggtggaaacattagctgataatgcaatcatcatttatcaaacacacaagagggtgtggcctgcttctcagcgagacgtattatatctttctgtcattcgaaagataccagccttgactgaaaatgaccctgaaacttggatagtttgtaatttttctgtggatcatgacagtgctcctctaaacaaccgatgtgtccgtgccaaaataaatgttgctatgatttgtcaaaccttggtaagcccaccagagggaaaccaggaaattagcagggacaacattctatgcaagattacatatgtagctaatgtgaaccctggaggatgggcaccagcctcagtgttaagggcagtggcaaagcgagagtatcctaaatttctaaaacgttttacttcttacgtccaagaaaaaactgcaggaaagcctattttgttctagtattaacaggtactagaagatatgttttatctttttttaactttatttgactaatatgactgtcaatactaaaatttagttgttgaaagtatttactatgtttttt

SEQ ID NO: 1603 - protein, 624 aa, Homo sapiens
MSDNQSWNSSGSEEDPETESGPPVERCGVLSKWTNYIHGWQDRWVVLKNNALSYYKSEDETEYGCRGSICLSKAVITPHDFDECRFDISVNDSVWYLRAQDPDHRQQWIDAIEQHKTESGYGSESSLRRHGSMVSLVSGASGYSATSTSSFKKGHSLREKLAEMETFRDILCRQVDTLQKYFDACADAVSKDELQRDKVVEDDEDDFPTTRSDGDFLHSTNGNKEKLFPHVTPKGINGIDFKGEAITFKATTAGILATLSHCIELMVKREDSWQKRLDKETEKKRRTEEAYKNAMTELKKKSHFGGPDYEEGPNSLINEEEFFDAVEAALDRQDKIEEQSQSEKVRLHWPTSLPSGDAFSSVGTHRFVQKPYSRSSSMSSIDLVSASDDVHRFSSQVEEMVQNHMTYSLQDVGGDANWQLVVEEGEMKVYRREVEENGIVLDPLKATHAVKGVTGHEVCNYFWNVDVRNDWETTIENFHVVETLADNAIIIYQTHKRVWPASQRDVLYLSVIRKIPALTENDPETWIVCNFSVDHDSAPLNNRCVRAKINVAMICQTLVSPPEGNQEISRDNILCKITYVANVNPGGWAPASVLRAVAKREYPKFLKRFTSYVQEKTAGKPILF

SEQ ID NO: 1604 - DNA, 1877 bp, Homo sapiens
agtacaatctgctgcccaggacctggacattgacagataaaatgaagtgggtcagttaactacagagggaagaatatgaagaactgcttcattatgctatagtgactccaaatattgaaccctgtgcttcacagtcatctcatcctaagggagaattggtgccagatgtcagaatttctacaattcatgatattcttcatagtcaaggaaataactctgaagtaagagaaactgcaatagaagttggaaaaggatgtgatttccatatttcaagtcattcaaagacagatgctacaacttttcttttattcagagtcatcaccagtgttatcgccaaggaagccttctcacccagtcatggattttttcagttcacatcttttagctgactcttcctcaccagcaacaaattctagtcatacagatgcccatgaaatacttgtgagcgattttcttgtttctgatgaaaaccttcagaagatggaaaatgtgcttgatctttggagttcaggtcttaagacaaacatcatatctgaactaagtaaatggagacttaattttattgactggcaccgaatggaaatgagaaaagagaaagaaaaacatgcagcacatttaaaacaactgtgtaatcagatcaatgaattgaaggagctgcaaaaaacctttgaaatctccattgggagaaaagatgaggtgatttctagcttgtctcatgccataggcaagcaaaaggaaaagatagagttgatgagaacattcttccactggcgaatcggccatgtcagagccagacaggatgtttatgaaggtaaactagctgaccagtactaccagagaactttactgaagaaagtctggaaagtctggcgttccgtagtgcaaaagcagtggaaagatgtggtagaaagagcttgtcaagcaagagctgaagaagtttgtatccagatttccaatgattatgaagccaaagttgctatgttatctggagctttggaaaatgcaaaagctgagattcaaagaatgcaacatgaaaaagagcactttgaagattccatgaaaaaagctttcatgaggggtgtatgtgcattaaatcttgaagccatgactatatttcaaaacagaaatgatgcagctcctccgatgcccttaccagttacatcaccactgctgccatccccaccagccgccgtcggaggagccagcgcgactgccgttccctcagctgcttcgatgacttctaccagggctgcttccgcatcttctgttcacgttcctgtttctgctcttggtgcaggatctgcagctactgctgcatcagaagaaatgtatgtgccaagagttgtaacctctgcacaacagaaagcaggaagaactattacagcccggatcacaggaagatgtgattttgcttcaaaaaatagaattagcagcagtttagctataatgggagtttctcctcccatgagctcagttgttgtggaaaaacatcatccagtcacagtgcaaaccattcctcaagcaactgcagcaaaatatccccggaccattcatcctgaaagtagtacctcagcttccagatcacttggaaccagatcagctcacacccagtctctcacaagtgttcattccataaaagtggttgactaaagtgaatatgtccatagtggggtcttttaatccctctggtcttaccaagggttagaagtcttttggttttaacttttccatattgttagaacatcatggagacatcatgttcatctgttcaaaattacaagaggctttttcaagctctaccatgctttgtaactatatgtagaaattattttaatgttattttttatttaagcaattaagtaaaacttttttaaatt

SEQ ID NO: 1605 - protein, 575 aa, Homo sapiens
MSSDEEKYSLPVVQNDSSRGSSVSSNLQEEYEELLHYAIVTPNIEPCASQSSHPKGELVPDVRISTIHDILHSQGNNSEVRETAIEVGKGCDFHISSHSKTDESSPVLSPRKPSHPVMDFFSSHLLADSSSPATNSSHTDAHEILVSDFLVSDENLQKMENVLDLWSSGLKTNIISELSKWRLNFIDWHRMEMRKEKEKHAAHLKQLCNQINELKELQKTFEISIGRKDEVISSLSHAIGKQKEKIELMRTFFHWRIGHVRARQDVYEGKLADQYYQRTLLKKVWKVWRSVVQKQWKDVVERACQARAEEVCIQISNDYEAKVAMLSGALENAKAEIQRMQHEKEHFEDSMKKAFMRGVCALNLEAMTIFQNRNDAGIDSTNNKKEEYGPGVQGKEHSAHLDPSAPPMPLPVTSPLLPSPPAAVGGASATAVPSAASMTSTRAASASSVHVPVSALGAGSAATAASEEMYVPRVVTSAQQKAGRTITARITGRCDFASKNRISSSLAIMGVSPPMSSVVVEKHHPVTVQTIPQATAAKYPRTIHPESSTSASRSLGTRSAHTQSLTSVHSIKVVD

SEQ ID NO: 1606 - DNA, 1569 bp, Homo sapiens
atggagggtcgtggctatgccaaggagggactaaaagatctggccaccaggacacccagaactcctaagaagaaattaacatcttgtgagcagccctttggctgtgaaaatgcaaatgactcagactggctgccaagagtcacctgtgaagctcaactggcacaggactcagggctgagctccattcttaactctccatcccatacagccaaacaagcagaacacaggttgcgcccaagggttctgaacccaggatgtataaagaagatgggccagcgagagctcaccggatgccgccagaaccgcgacgctttccaaggcacgggcccctctctcggggcgaacccattccagggcgccctgcccttcacaaagaaaagagaactctccccggggctcccgccggcttctccgggatcggtcacgtttcccagaattaaacagaaaaagcctgggagtgggcaagttggcaaaaggaagagaggcctgtttggctgtgacatgtgggtggagggtcataaaggccaggtggggaatggcagtgtccggctgagggagggagctgccacactgcctgatcattcgcgtggcagcagcggggaggagatcggcagcacctttggccacagagctgcgcctctgtcacaaacaggcagcgctgcaggcggccagagatccacttccacagattctcgtggccagggcaggggtgtgttgtggtgggcagactggccaggcgaccctggcccaccatcaccctctcttcacagcccagatgcgttctcggggccccaggcctgcacccgtttcttctcccgcatcacgaaggccaatgtggacctgctcccgaggggggctcccgagcgacagcggctgctgcctgcggctctggcctgctgggggctggggccagcgcggggcggagagggctcggcagttccaaaagcgctgaggccagcctctctgcagggtgtgcgggggtctctgctgagcgaggctgatgtgcgggctctgggaggcctggcttgcgacctgcctgggcgctttgtggccgagtcggccgaagtgctgctaccccggctgaggactgccatcaggctacaaggccactttgccacaacaggcagaaaacaaggaacacttgggaatttacatctccttgtttggcccttagacaatgatcaacttgtattggaatatgaaacccagctccctggcctgagtctgatcaaactctcaggatttttaaaaaccctcagtggacaaaagtctactcacgctgctttggtagaattggacatagccaaggagctcatcagaaaaggagctgctagtcacaggcagcaacaaacccacctccacacagggatccactgtggggctgcaataactgctccttctctgagtgatacaggacattctgaggaaaagtggctggtggatgggcagtatgtaatgacacaagctcatgagtacaagctgagacatgatgggagtctacgggtcccatctacacagcttgatgcagctcttccaattaatggccagtgtctggctgaactattatag

SEQ ID NO: 1607 - protein, 378 aa, Homo sapiens [sequence omitted]

SEQ ID NO: 1608 - DNA, 3590 bp, Homo sapiens
ggggcgcacagagccagaggggcttgcgagcggcggctgagggaccgcggggagggggcgccgagcggctccagcgcagagactctcactgcacgccggagggcgcccttcctcgctcgcgcccgcgcgaccgcgcgccccagtcccgccccgccccgctaaccgccccagacacagcgctcgccgagggtcgcttggaccctgatcttacccgtgggcaccctgcgctctgcctgccgcgaagaccggctccccgacccgcagaagtcaggagagagggtgaagcggagcagcccgaggcggggcagcctcccggagcagcgccgcgcagagcccgggacaatggggccgcggcggctgctgctggtggccgcctgcttcagtctgtgcggcccgctgttgtctgcccgcacccgggcccgcaggccagaatcaaaagcaacaaatgccaccttagatccccggtcatttcttctcaggaaccccaatgataaatatgaaccattttgggaggatgaggagaaaaatgaaagtgggttaactgaatacagattagtctccatcaataaaagcagtcctcttcaaaaacaacttcctgcattcatctcagaagatgcctccggatatttgaccagctcctggctgacactctttgtcccatctgtgtacaccggagtgtttgtagtcagcctcccactaaacatcatggccatcgttgtgttcatcctgaaaatgaaggtcaagaagccggcggtggtgtacatgctgcacctggccacggcagatgtgctgtttgtgtctgtgctcccctttaagatcagctattacttttccggcagtgattggcagtttgggtctgaattgtgtcgcttcgtcactgcagcattttactgtaacatgtacgcctctatcttgctcatgacagtcataagcattgaccggtttctggctgtggtgtatcccatgcagtccctctcctggcgtactctgggaagggcttccttcacttgtctggccatctgggctttggccatcgcaggggtagtgcctctgctcctcaaggagcaaaccatccaggtgcccgggctcaacatcactacctgtcatgatgtgctcaatgaaaccctgctcgaaggctactatgcctactacttctcagccttctctgctgtcttcttttttgtgccgctgatcatttccacggtctgttatgtgtctatcattcgatgtcttagctcttccgcagttgccaaccgcagcaagaagtcccgggctttgttcctgtcagctgctgttttctgcatcttcatcatttgcttcggacccacaaacgtcctcctgattgcgcattactcattcctttctcacacttccaccacagaggctgcctactttgcctacctcctctgtgtctgtgtcagcagcataagctgctgcatcgaccccctaatttactattacgcttcctctgagtgccagaggtacgtctacagtatcttatgctgcaaagaaagttccgatcccagcagttataacagcagtgggcagttgatggcaagtaaaatggatacctgctctagtaacctgaataacagcatatacaaaaagctgttaacttaggaaaagggactgctgggaggttaaaaagaaaagtttataaaagtgaataacctgaggattctattagtccccacccaaactttattgattcacctcctaaaacaacagatgtacgacttgcatacctgctttttatgggagctgtcaagcatgtatttttgtcaattaccagaaagataacaggacgagatgacggtgttattccaagggaatattgccaatgctacagtaataaatgaatgtcacttctggatatagctaggtgacatatacatacttacatgtgtgtatatgtagatgtatgcacacacatatattatttgcagtgcagtatagaataggcactttaaaacactctttccccgcaccccagcaattatgaaaataatctctgattccctgatttaatatgcaaagtctaggttggtagagtttagccctgaacatttcatggtgttcatcaacagtgagagactccatagtttgggcttgtaccacttttgcaaataagtgtattttgaaattgtttgacggcaaggtttaagttattaagaggtaagacttagtactatctgtgcgtagaagttctagtgttttcaattttaaacatatccaagtttgaattcctaaaattatggaaacagatgaaaagcctctgttttgatatgggtagtattttttacattttacacactgtacacataagccaaaactgagcataagtcctctagtgaatgtaggctggctttcagagtaggctattcctgagagctgcatgtgtccgcccccgatggaggactccaggcagcagacacatgccagggccatgtcagacacagattggccagaaaccttcctgctgagcctcacagcagtgagactggggccactacatttgctccatcctcctgggattggctgtgaactgatcatgtttatgagaaactggcaaagcagaatgtgatatcctaggaggtaatgaccatgaaagacttctctacccatcttaaaaacaacgaaagaaggcatggacttctggatgcccatccactgggtgtaaacacatctagtagttgttctgaaatgtcagttctgatatggaagcacccattatgcgctgtggccactccaataggtgctgagtgtacagagtggaataagacagagacctgccctcaagagcaaagtagatcatgcatagagtgtgatgtatgtgtaataaatatgtttcacacaaacaaggcctgtcagctaaagaagtttgaacatttgggttactatttcttgtggttataacttaatgaaaacaatgcagtacaggacatatattttttaaaataagtctgatttaattgggcactatttatttacaaatgttttgctcaatagattgctcaaatcaggttttcttttaagaatcaatcatgtcagtctgcttagaaataacagaagaaaatagaattgacattgaaatctaggaaaattattctataatttccatttacttaagacttaatgagactttaaaagcattttttaacctcctaagtatcaagtatagaaaatcttcatggaattcacaaagtaatttggaaattaggttgaaacatatctcttatcttacgaaaaaatggtagcattttaaacaaaatagaaagttgcaaggcaaatgtttatttaaaagagcaggccaggcgcggtggctcacgcctgtaatcccagcactttgggaggctgaggcgggtggatcacgaggtcaggagatcgagaccatcctggctaacacggtgaaacccgtctctactaaaaatgcaaaaaaaattagccgggcgtggtggcaggcacctgtagtcccagctactcgggaggctgaggcaggagactggcgtgaacccaggaggcggaccttgtagtgagccgagatcgcgccactgtgctccagcctgggcaacagagcaagactccatctc

SEQ ID NO: 1609 - DNA, 647 bp, Homo sapiens
gaagaggcgagaacgacccccggtccgaccaaagcccgcgcgccgctgcgtcccgcgtccagcacctatgtcccgctgccgtcgctgccgccaccatgcccaagagaaaggctgaaggggatgctaagggagataaagccaaggtgaaggacgaaccacagagaagatccgcgaggttgtctgctaaacctgctcctccaaagccagagcccacgcctaaaaggcccctgcaaagaagggagagaaggtacccaaagggaaaaagggaaaagctgatgctggcaaggagggaaataaccctgcaggaaatggagatgccaaaacagaccaggcgcagaaagctgaaggtgctggagatgccaagtgaagtgtgtgcatttttgataactgtgtacttctggtgactgtacagtttgaaatactattttttatcaagttttataaaaatgcagaattttgttttattttattttattttttttaaagctatgttgttagcacatagaacacttcattgttgtttttgggggaaggggcatatgtcgctaatagaatgtctccaaagctggattgatgtggaggattccctgactttgacacacatggccaccttggcacaaaagccttgtggtatagaaaaacaaatt

SEQ ID NO: 1610 - DNA, 788 bp, Homo sapiens
ggcgagaacgacccccggtccgaccaaagcccgcgcgccgctgcgtcccgcgtccagcacctatgtcccgctgccgtcgctgccgccaccatgcccaagagaaaggctgaaggggatgctaagggagataaagccaaggtgaaggacgaaccacagagaagatccgcgaggttgtctgctaaacctgctcctccaaagccagagcccacgcctaaaaggcccctgcaaagaagggagagaaggtacccaaagggaaaaagggaaaagctgatgctggcgaggagggattccctgactttgacacacatggccaccttggcacaaaagccttgtggtatagaaaaacaaatttgtttttatgtcctcgtctccctttccctctttcagcatagacttaactcccttaagcccagacatctgttgggacctgacccctagtcattggttaccagtgtgttaggcaatctggactttccagtgatgccactgagatggcacctgtcaaaagagcagtggttctgtttctagattatggatcttcagataaattctgccattttcatttaacttcctgaaagtcagggtcggcttgtgaaaagttgttaaacaacatgctaaatgtgaaatgtcaaccctcactctaaactttccctgttcagagcatcagatgaagacttcattgggttttatagtggctttctgatttttggtagtccattgaagaagggagtttgaaagttgttgtatactgttaacgattgtctgcccatgtcctgcctgaaatacca

SEQ ID NO: 1611 - DNA, 672 bp, Homo sapiens
gggagataaagccaaggtgaaggacgaaccacagagaagatccgcgaggttgtctgctaaacctgctcctccaaagccagagcccacgcctaaaaggcccctgcaaagaagggagagaaggtacccaaagggaaaaagggaaaagctgatgctggcaaggagggaaataaccctgcaggaaatggagatgccaaaacagaccaggcgcagaaagctgaaggtgctggagatgccaagtgaagtgtgtgcatttttgataactgtgtacttctggtgactgtacagtttgaaatactattttttatcaagttttataaaaatgcagaattttgttttattttattttattttttttaaagctatgttgttagcacatagaacacttcattgttgtttttgggggaaggggcatatgtcgctaatagaatgtctccaaagctggattgatgtggagaaaacacctttcccttctagttttgagagacttcctcttggcttccaggaggagggattccctgactttgacacacatggccaccttggcacaaaagccttgtggtatagaaaaaactcccttaagcccagacatctgttgggacctgacccctagtcattggttaccagtgtgttaggcaatctggactttccagtgatgccactgagatggcacct

SEQ ID NO: 1612 - DNA, 1243 bp, Homo sapiens
aaacctcgcccagattcaggcgtgtaaaccagccggagcggcgcggcagcggcaggaccgccgtggcgcctagagtagcgacccgcggggagcacggggcgacgctggctgcagagacccggtgacagctgtatgcttgaaatcttggatactgcaggaacggagcaatttacagcaatgagggatttatacatgaaaaatggacaagggtttgcattagtttattccatcacagcacagtccacatttaacgatttacaagacctgagagaacagattcttcgagttaaagacactgatgatgttccaatgattcttgttggtaataagtgtgacttggaagatgaaagagttgtagggaaggaacaaggtcaaaatctagcaagacaatggaacaactgtgcattcttagaatcttctgcaaaatcaaaaataaatgttaatgagatcttttatgacctagtgcggcaaattaacagaaaaactccagtgcctgggaaggctcgcaaaaagtcatcatgtcagctgctttaatatactaaatgcattgtagctctgagccaggtctgaagaactgttgcccaattcaacagtgccagcattccaactttgttaaacctaccaacatcttaaatggactttcctgtggtggtaccctttaagaggcggatgaaagctactatatcagtttgcacattctaatcactttccagtatcacaagagagatttttacttatataatagtcctagagtatgcagctggtaaaaccagaggctacatccagtattactgctaagagacattcttcatccaccaatgttgtacatgtatgaaaatggtgtactgtatactttaacatgccccatactttgtattggagagtacaataatgtaaatcctaaaagcaccactattttagcataataaaagaaagtccaaagagctcctatatagactactccagataacttcgcttctttgatacttgtagcttattgtaattttttttaagaaattcaaggtcattattattgtacaaaataagcgctttgattaacacagctatatagtttttttaatttttaatgtcttagattaaagacgttgcctttaatatctgttgggaaggaaatgtccagacttttcaaatctcttattatatgtttcctttttttgtttacatagggaacaatgtttatagtcgtgtgtacagtgggggtctacaacaagaagtgtatatt

SEQ ID NO: 1613 - protein, 136 aa, Homo sapiens
MREYKLVVLGSRGVGKSALTVQFVQGIFVEKYDPTIEDSYREQVEVDAQQCMLEILDTAGTEQFTAMRDLYMKNGQGFALVYSITAQSTFNDLQDLREQILRVKDTDDIFYDLVRQINRKTPVPGKARKKSSCQLL

SEQ ID NO: 1614 - DNA, 1752 bp, Homo sapiens
ttggagcaggcctgctgccttcatgtccactctcctcatcaatcagccccagtatgcatggctgaaagaggtggggctccgagaggaaaatgagggcgtgtataatggaagctggggaggccggggagaggttattatgacctgttgctctgctaacaactagccaatagcaagagtccgacaggccagtgtggcagactatgaagaaactgtaaagaaagcaacagaagcatggaaaatctgggcagatattcctgctccaaaacgaggagaaatagtaagacagattgacgatgccttgtgggagaagatccaagtactaggaagcttggtgtctttggagatggggaaaatcttagtggaaggtgtgggtgaagttcaggagtatgtggatatctgtgactatgctgttggtttatcaaggatgattggaggacctatcttgccttctgaaagacctggccatgcactgattgagcagtggaatcctgtaggcctggttggaatcatcacggcattcaatttccctgtggcagtgtatggttggaacaacgccattgtcatgatctgtggaaatgtctgcctctggaaaggagctccaaccacttccctcattagtgtggctgtcacaaagataatagccaaggttctggaggacaacaagctgcttggtgcaatttgttccttgacttgtggtggagcagataccggcacagcaatggccaaagatgaacgagtgaacctgctgtccttcaccgggagcactcaggtgggaaaacagatggccctgatggtgcaggagaggtttgggagaagtttgttggaacttggaggaaacagtaccattattgcctttgaagatgcagacctcagcttagttgttccatcagctctcttcactgctgtgggaatagctggccagaggtgtaccactgcgaggcgactgtttgtacatgaaagcatccatcatgaggttgtaaacagacttaaaaaggcctacgcacagatccgagttgggaacccatgggaccctaatgttctctatgggccactccacaccaagcaggcagtgagcatgtttcttggagcagcggaagaagcaaagaaagaaggtagcacagtggtctatgggggcaaggttatggatcgccctggaaattatgtagaaccgacaattgtgacaggtcttgcccacgatgcatccattgcacacacagagacttttgctccgattctgtatgtctttaaattcaagaatgaagaagaggtctttgcatggaatactgaagtaaaacagagactttcaagtagcaactttaccaaagatctgggcagaatctttcgctggcttggacctaaaggatcagactgtggcactgtaaatgtcaacattccaacaagtggggctgagattggaggtgcctttggaggagaaaagcacactggtggtggcagggaatctggcagtgatgcctggaaacagtacatgagaaggtctacttgtactatcaactacagtaaagactttcctctggcccaaggaatcaagtttcagtaaaggtgttttagatgaacatcccttaatttgaggtgttcggcagctgtttttgaagaagacaaagaaaattaaagttttccttgaataaatgcattattatgactgtgacagtgactaatccccctatgaccccaaagccctgattaaatcaaaagactccttttttaaaaatcaaaataaaattgttacaacat

SEQ ID NO: 1615 - DNA, 832 bp, Homo sapiens
cctctttttccggctggaaccatggagggtgtagaagagaagaagaaggaggttcctgctgtgccagaaacccttaagaaaaagcgaaggaatttcgtagagctgaagatcaagcgcctgagaaagaagtttgcccaaaagatgcttcgaaaggcaaggaggaagcttatctatgaaaaagcaaagcactatcacaaggaatataggcaaatgtacagaactgaaattcgagtggcgaggatggcaagaaaagctggcaacttctatgtacctgcagaacccaaattggcgtttgtcatcagaatcagaggtatcagtgctgtgagcccaaaggtccgaaaggtgttgcagcttcttcgccttcgtcaaatcttcaatggaacctttgtgaagctcaacaaggcttcgattaacatgctgaggattgtagagccatatatagcatgggggtaccccaatctgaagtcagtaaatgaactaatctacaagcgtggttatggcaaaatcaataagaagcgaattgctttgacagataacgctttgattgctcgatctcttggtaaatacggcattatctgcatggaggatttgattcatgagatctatactgttggaaaacgcttcaaagaggcaaataacttcctgtggcccttcaaattgtcttctccacgaggtggaatgaagaaaaagaccacccattttgtagaaggtagagatgctggcaacagggaggaccagatcaacaggcttactagaagaatgaactaaggtgtctaccatgattatttttctaagctggttggttaataaacagtacctgctctcaaattga

SEQ ID NO: 1616 - protein, 248 aa, Homo sapiens
MEGVEEKKKEVPAVPETLKKKRRNFVELKIKRLRKKFAQKMLRKARRKLIYEKAKHYHKEYRQMYRTEIRVARMARKAGNFYVPAEPKLAFVIRIRGISAVSPKVRKVLQLLRLRQIFNGTFVKLNKASINMLRIVEPYIAWGYPNLKSVNELIYKRGYGKINKKRIALTDNALIARSLGKYGIICMEDLIHEIYTVGKRFKEANNFLWPFKLSSPRGGMKKKTTHFVEGRDAGNREDQINRLTRRMN

SEQ ID NO: 1617 - DNA, 798 bp, Homo sapiens
gcaccatggcggttggcaagaacaagcaccttacgaaaggcagcaaaaagggggccaagaagaaagtggttgatccattttctaagaaagattggtatgatgtgaaagcacctgctatgttcaatataagaaatattggaaagatgctcatcaccaggacccaaggaaccaaaattgcatctgatggtctcaagggtcgtgtgtttgaagtgagtcttgctgatttgcagaatgatgaagttgcacttagaaaattcaagctgattactgaagatgttcagggtaaaaactgcctaacttccatggcatggatcttacctgtgacaaaatgtgttccatggtcaaaaaatggcagacaatgattgaagctcacgttgacgtcaggactattgatggttacttgcttcgtctgttctgtgttggttttactaaaaaacgcaacaatcagatacagaagacctcttatgcccagcaccaacgggtccgccaaatccggaagaagatgatggaaatcatgacccgagaggattccagacagcattggaaaagacatagaaaaggcttgccaatctatcctctccatgatgtcttcgttagaaaagtaaaaatgctgaagaagcccaagtttgaattgggaaagctcatggagcttcatggtgaaggcagtagttctggaaaagccactggggacgagagaggtgctaaagttgaacgagctgatggttttgaaccaccagtccaagaatctgtttaaagttcagacttcaaatagtggcaaataaaaagtgctatttgtga

SEQ ID NO: 1618 - protein, 148 aa, Homo sapiens
MDLTCDKMCSMVKKWQTMIEAHVDVRTIDGYLLRLFCVGFTKKRNNQIQKTSYAQHQRVRQIRKKMMEIMTREDSRQHWKRHRKGLPIYPLHDVFVRKVKMLKKPKFELGKLMELHGEGSSSGKATGDERGAKVERADGFEPPVQESV

SEQ ID NO: 1619 - DNA, 1731 bp, Homo sapiens
tttctgcccatggacaccgccgaagaagcattgttaaagtctctcttcaccctgccgtcatgtctaagtcagagtctcctgaagagcccgaacagctgaggaagctcttcattggagggctgagctttgaaacaactgatgagagccttgaggagccattttgagcaatggggaatgctcacggactgtgtggtcatgagagatccaaacaccaagcaccccaggggctttgggtttgtcacatatgctactgtggaggaggtggatgcagccatgaatgcaaggccacacaaggtggatggaagagttgtggaaccaaagagagctgtctcgagagaagattctgaaagaccaggtgcccacttaactgtgaaaaagatatttgttggtggcattaaagaagacactgaagaacatcacctaagagatgattttgaacagtatggaaaaattgaagtgattgaaatcatgactgaccgaggcagtggcaagaaaaggggctttgcctttgtaaattttgacgaccatgactccatggataagattgtcattcagaaataccatactgtgaatggccacaactgtgaagttaggaaagccccgtcacagcaagagatggatagtgcttcatccagccaaagaggtcgaagtggttctggaaactttggtggtggtcgtggaggtggtttcggtgggaatgacaactttggtcatggaggaaacttcagtggttgtggtggctttggtggcagtcatggtggtggtggatatggtggcagtggggatggctataatggatttggtaatgatggaagcgattttggaggtggtggaagctacaatgattttggcaattacaacaatcagtcttcaaattttggacccatgaagggaggaaattttggaggcagaagctctggcccttatggtggtggaggccaatactttgcaaaaccacaaaaccaaggtggctatggcggttccagtagcagcggtagctatggcagtggcagaagattttaattaggaaacaaagcttagcaggagcggagagccagagaagtgacagggaagctacaggttacaacagatttgtgaactcagccaagcacagtggtggcagggcctagctgctacaaagaagacatgttttagacaaatactcatgtgtatgggcaaaaaactcgaggactgtatttgtgactaattgtataacaggttattttagtttctgttctgtggaaagtgtaaagcattccaacaaagggttttaatgtagattttttttttgcacctatgctgttgattgctaatgtaatagtctgatcgtgatgctgaataaatgtcttttctttttaatgtgctgtgtaaagttagtctactctgaagccatcttggtaaatttccccaacagtgtgaagttagaattccttcagggtgatgccaggttctatttggaatttatatacaacctgcttggagggagaagccattgtcttcagaaaccttggtgtagttgaactgatagttaccgttgtgacctgaagttcaccattaaaagggattacccaagcaaaatcatggaattattggttataaaagtgattgttggcacatcctatgcaatatatctaaattgaataatggtactagataaaattatagatgggaatgaagcttgtgtatcatccattatcatgtgtaatcaataaatgatttaattctcttgaa

SEQ ID NO: 1620 - protein, 294 aa, Homo sapiens
MRALRSHFEQWGMLTDCVVMRDPNTKHPRGFGFVTYATVEEVDAAMNARPHKVDGRVVEPKRAVSREDSERPGAHLTVKKIFVGGIKEDTEEHHLRDDFEQYGKIEVIEIMTDRGSGKKRGFAFVNFDDHDSMDKIVIQKYHTVNGHNCEVRKAPSQQEMDSASSSQRGRSGSGNFGGGRGGGFGGNDNFGHGGNFSGCGGFGGSHGGGGYGGSGDGYNGFGNDGSDFGGGGSYNDFGNYNNQSSNFGPMKGGNFGGRSSGPYGGGGQYFAKPQNQGGYGGSSSSGSYGSGRRF

SEQ ID NO: 1621 - DNA, 808 bp, Homo sapiens
ccgccgaagaagcattgttaaagtctctcttcaccctgccgtcatgtctaagtcagagtctcctgaagagcccgaacagctgaggaagctcttcattggagggctgagctttgaaacaactgatgagagccttgaggagccattttgagcaatggggaatgctcacggactgtgtgattctgaaagaccaggtgcccacttaactgtgaaaaagatatttgttggtggcattaaagaagacactgaagaacatcacctaagagatgattttgaacagtatggaaaaattgaagtgattgaaatcatgactgaccgaggcagtggcaagaaaaggggctttgcctttgtaaattttgacgaccatgactccatggataagattgtcattcagaaataccatactgtgaatggccacaactgtgaagttaggaaagccccgtcacagcaagagatggatagtgcttcatccagccaaagaggtcgaagtggttctggaaactttggtggtggtcgtggaggtggtttcggtgggaatgacaactttggtcatggaggaaacttcagtggttgtggtggctttggtggcagtcatggtggtggtggatatggtggcagtggggatggctataatggatttggtaatgatggaagcgattttggaggtggtggaagctacaatgattttggcaattacaacaatcagtcttcaaattttggacccatgaagggaggaaattttggaggcagaagctctggcccttatggtggtggaggccaatactttgcaaagcagaagattttaattagg

SEQ ID NO: 1622 - DNA, 904 bp, Homo sapiens
aagtctctcttcaccctgccgtcatgtctaagtcagagtctcctgaagagcccgaacagctgaggaagctcttcattggagggctgagctttgaaacaactgatgagagccttgaggagccattttgagcaatggggaatgctcacggactgtgtggtcatgagagatccaaacaccaagcaccccaggggctttgggtttgtcacatatgctactgtggaggaggtggatgcagccatgaatgcaaggccacacaaggtggatggaagagttgtggaaccaaagagagctgtctcgagagaagattctgaaagaccaggtgcccacttaactgtgaaaaagatatttgttggtggcattaaagaagacactgaagaacatcacctaagagatgattttgaacagtatggaaaaattgaagtgattgaaatcatgactgaccgaggcagtggcaagaaaaggggctttgcctttgtaaattttgacgaccatgactccatggataagattgtcattcagaaataccatactgtgaatggccacaactgtgaagttaggaaagccccgtcacagcaagagatggatagtgcttcatccagccaaagaggtcgaagtggttctggaaactttggtggtggtcgtggaggtggtttcggtgggaatgacaactttggtcatggaggaaacttcagtggttgtggtggctttggtggcagctataatggatttggtaatgatggaagcgattttggaggtggtggaagctacaatgattttggcaattacaacaatcagtcttcaaattttggacccatgaagggaggaaattttggaggcagaagctctggcccttatggtggtggaggccaatactttgcaaaaccacaaaaccaaggtggctatg

SEQ ID NO: 1623 - DNA, 645 bp, Homo sapiens
accctgccgtcatgtctaagtcagagtctcctgaagagcccgaacagctgaggaagctcttcattggagggctgagctttgaaacaactgatgagagccttgaggagccattttgagcaatggggaatgctcacggactgtgtggtcatgagagatccaaacaccaagcaccccaggggctttgggtttgtcacatatgctactgtggaggaggtggatgcagccatgaatgcaaggccacacaaggtggatggaagagttgtggaaccaaagagagctgtctcgagagaagattctgaaagaccaggtgcccacttaactgtgaaaaagatatttgttggtggcattaaagaagacactgaagaacatcacctaagagatgattttgaacagtatggaaaaattgaagtgattgaaatcatgactgaccgaggcagtggcaagaaaaggggctttgcctttgtaaattttgacgaccatgactccgtggtggctttggtggcagtcatggtggtggtggatatggtggcagtggggatggctataatggatttggtaatgatggaagcgattttggaggtggtggaagctacaatgattttggcaattacaacaatcagtcttcaaattttggacccatgaagg

SEQ ID NO: 1624 - DNA, 952 bp, Homo sapiens
caaaggctactaagttaatggtattttctgcacagaaaataccattaacttagtagcctttgcttaaaggtgggattaattctccatgaagtcagaatgagacaataagcagcattaacttcataggcacacagaactagtgctcaaactgctaccacccttttcaattgctatcttttgaaaggcaccactatttgttttgctggggtctcgggtggacccttattcgctccgacaagatgaaagaaacaatcatgaaccaggaaaaactcgccaaactgcaggcacaagtgcgcattggtgggaaaggaactgctcgcagaaagaagaaggtggttcatagaacagccacagcagatgacaaaaaacttcagttctccttaaagaagttaggggtaaacaatatctctggtattgaagaggtgaatatgtttacaaaccaaggaacagtgatccactttaacaaccctaaagttcaggcatctctggcagcgaacactttcaccattacaggccatgctgagacgaagcagctgacagaaatgctacccagcatcttaaaccagcttggtgcggatagtctgactagtttaaggagactggccgaagctctgcccaaacaatctgtggatggaaaagcaccacttgctactggagaggatgatgatgatgaagttccagatcttgtggagaattttgatgaggcttccaagaatgaggcaaactgaattgagtcaacttctgaagataaaacctgaagaagttactgggagctgctattttatattatgactgctttttaagaaattcttgtttatggatctgataaaatctagatctctaatatttttaagcccaagccccttggacactgcagctcttttcagtttttgcttatacacaattcattctttgcagctaattaagccgaagaagccttaagtgggaattc

SEQ ID NO: 1625 - protein, 162 aa, Homo sapiens
MKETIMNQEKLAKLQAQVRIGGKGTARRKKKVVHRTATADDKKLQFSLKKLGVNNISGIEEVNMFTNQGTVIHFNNPKVQASLAANTFTITGHAETKQLTEMLPSILNQLGADSLTSLRRLAEALPKQSVDGKAPLATGEDDDDEVPDLVENFDEASKNEAN

SEQ ID NO: 1626 - DNA, 4784 bp, Homo sapiens
gcggtggcgctgcggagacccggtccagacgcctggcggccgccggcacacaaggcgctttctagctccctcccccgagcgcacagcccgcctccttccgcggcgcctgcagtggcaggcttgctctgccctaccgtgacgcgctccggagacgctctgcgggtcctggacaccgggtccgcggcgtggggacgacagacggaggcgaacgccatcggtagccggtccgcgagccatcgttcggggcgcagtcctctccccggctggccctcctttctccggggcattcgccaccgcttccctgggctgagacgaccggttcgtcgcctccttgcccgtgaccgtcgctagaactcagttgtgcgttgcggccagtcgccactgctgagtggaaacaaaatgtcagtcagtgtgcatgagaaccgcaagtccagggccagcagcggctccattaacatctatctgtttcacaagtcctcctacgctgacagcgtcctcactcacctgaatcttttacgccagcagcgtctcttcactgacgtccttctccatgccggaaataggaccttcccttgccaccgggcagtgctggctgcatgcagtcgctactttgaggccatgttcagtggtggcctgaaagagagccaggacagtgaggtcaactttgacaattccatccacccagaagtcttggagctgctgcttgactatgcgtactcctcccgggtcatcatcaatgaagaaaatgcagaatcgctcctggaagctggtgacatgctggagtttcaagacatccgggatgcatgtgcagagttcctggaaaagaacctgcatcccaccaactgcctgggcatgctgctgctgtctgatgcacaccagtgcaccaagctgtacgaactatcttggagaatgtgtctcagcaacttccaaaccatcaggaagaatgaagatttcctccagctgccccaggacatggtagtgcaactcttgtccagtgaagagctggagacagaggatgaaaggcttgtgtacgagtctgcaattaactggatcagctatgacctgaagaagcgctattgctacctcccagaactgttgcagacagtaaggctggcacttctgccagccatctatctcatggagaatgtggccatggaggaactcatcaccaagcagagaaagagtaaggaaattgtggaagaggccatcaggtgcaaactgaaaatcctgcagaatgacggtgtggtaaccagcctctgtgcccgacctcggaaaactggccatgccctcttccttctgggaggacagactttcatgtgtgacaagttgtatctggtagaccagaaggccaaagaaatcattcccaaggctgacattcccagcccaagaaaagagtttagtgcatgtgcgattggctgcaaagtgtacattactggggggcgggggtctgaaaatggggtctcaaaagatgtctgggtttatgataccctgcacgaggagtggtccaaggctgcccccatgctggtggccaggtttggccatggctctgctgaactgaagcactgcctgtatgtggttggggggcacacggccgcaactggctgcctcccggcctccccctcagtctctctaaagcaggtagaacattatgaccccacaatcaacaaatggaccatggtggccccactccgagaaggcgttagcaacgccgcagtagtgagtgccaaacttaagttatttgctttcggaggtaccagtgtcagtcatgacaagctccccaaagttcagtgttacgatcagtgtgaaaacaggtggactgtaccggccacctgtccccagccctggcgttacacagcagcagctgtgctggggaaccagatttttattatggggggtgatacagaattctctgcctgctctgcttataaattcaacagtgagacttaccagtggaccaaggtgggagatgtgacagcaaagcgcatgagctgccatgctgtggcctctggaaacaaactctacgtggttggaggatactttggcattcagcgatgcaagactttggactgctacgatccaacattagacgtgtggaacagcatcaccactgtcccgtactcgctgattcctactgcatttgtcagcacctggaaacatctgccttcttaaatgcagtacattctaaagagagtgagcatgagctcactccatcactcgatgagataatatgagatttctacttcggagaggccaagtctaatgaagagaaaaaaaggaaaagaagttgcaagactcgaataaaatctgctgcaccttgtaaatgctctaactggacatgaaggaaaggggcgagggaggggggtgggatttttggtgcaagtagcacatggtttaaatatgaatgaacaaacctgtgatctagtccttgtcttgtaattgtggattaatgtcaatgttaatcagcccctcaaagggagagaaaagctggaccttttcccttgctgtaccatattcagcatttgatttccatgggccccaccatttatgtgtagaatttgaaatggttgtcacctctctctgaggacagagcttgaagcctccacaccagctgctgctggagattcaaagcccaactgtgggtccgagagggaagctggctgggctggctgaagaatgaagaccactggactctccgttaatctctaaggggtctgctccccaggaacgtttctgaacaatggggactttgttggtagccatttggtagatgttcttttctatttataagtgactttaaactttcccttggctgttaagaagtttgttatagatttagctatttattgttcgatgcctgcatgctgaaacaatgcctacagctgtcttcacatgtatggacgtgtgtgaatggttgtacgttttgcacattttgtggctgttgagatgtgctttgctgcacaaacatgaaaatttttgagttacaatttggagcataactggagggtgggttggggaggggtggatttttaaaatgtcaagacagggaaggatgacaaaatggaaatttaaatgacatcctagaggtagagaaaccgtggagatcgcttttctcagactcaccaacttttaatgggatttcatggggtttggttgtgctgatagggtaaggggaggctgctttctgcccttctccccactcccatctgatttacttaattcagtctcagctgctgaaatttggaaaggaccaaattgctttacagtttttttctttgtgtagtatcttgaaatcctggaaaattctatggaatagttctgtatatagggcacaagtaaaggcattgtccaaagtttatttatttatttattaccctaagaatgctttgccataaccacatttaatgggaaaaacggcagtatcacagatgtaaattaactcaccagatttactgggcctgaactcattctcttcttgctatatgatttagcaagttctagaaggtctccaagacaataattacattggcacaatgtatacttcagtgctcacccgtaggcaaatctctttttaaaaaactctttggtgcacaagtaacacatttggccacaaaacaccaaagaattgtaggcagtggcccctattgagaagttttccggtagagttggaaatcagttgtgaatacattctttgctagttggagtgcttgtttactaagcatgtgccgtcgtaggtattagtgctagtctcagataggtgcttcccctgaggtgcaggggaagaccaaagtttgcaactcgaactgctttcgtccatgtttctcacattgctgtattttagaaaataggggttaagactgataacaaccttttacattgtgactgtgtttgcattgtctaatgacagataaatccttaacatttctctccaccttagtactttagactaattgtgtttgtccgtccatgccatgaatgagtgggctgtagttgggcctaaataaatgagctgttggaagaaaagaatcacagtactttccagcagtcagtccctggttcctagatgtgttctaagcaatgcaaatgtctaattgtcccccagtgggcatagtcagtgtcgtttatattgtagcagttacagctctgtagtttatgatgcaaatctgccaagagagatgtatgtgtcactgcatggcttctgaaagcaggatgaattttctgcagctgtttcaaagttggggtctgttcttgaatcctctattaattactgtgtgtgagccagagggagctgtggtaagggttgggcccccagcctgtagggaactttctggactcccactctttgaatcgatataggcatttggtctcactacttgaccattctcaccctgtgaaacgtcccacactttgaagcaaatacaattcacagcacagtacacacaaaaaccttggcataagacagagaaggttcttcttattttgtgggctggttgctgtagaaacacataacaaagggcagccctccacttctggtataattgtgtagccccttttctttgggcttgacacctgtcttgaataagagtgattagagctgcataatgtccctctcttggctattgaccatgtggttcacgtacaaaactctgtataagttgaaggaaaatgttcatgttcatatgtacttgtttgctatgactacattttgaggttttgtaaaactgttatttttttttttttcacaatgtgaaactgaaggtcaataaattattagagattttctcttc

SEQ ID NO: 1627 - DNA, 1857 bp, Homo sapiens
ctgatccgggccgggcgggaagtcgggtcccgaggctccggctcggcagaccgggcggaaagcagccgagcggccatggagctgtgcgggctggggctgccccggccgcccatgctgctggcgctgctgttggcgacactgctggcggcgatgttggcgctgctgactcaggtggcgctggtggtgcaggtggcggaggcggctcgggccccgagcgtctcggccaagccggggccggcgctgtggcccctgccgctctcggtgaagatgaccccgaacctgctgcatctcgccccggagaacttctacatcagccacagccccaattccacggcgggcccctcctgcaccctgctggaggaagcgtttcgacgatatcatggctatatttttggtttctacaagtggcatcatgaacctgctgaattccaggctaaaacccaggttcagcaacttcttgtctcaatcacccttcagtcagagtgtgatgctttccccaacatatcttcagatgagtcttatactttacttgtgaaagaaccagtggctgtccttaaggccaacagagtttggggagcattacgaggtttagagacctttagccagttagtttatcaagattcttatggaactttcaccatcaatgaatccaccattattgattctccaaggttttctcacagaggaattttgattgatacatccagacattatctgccagttaagattattcttaaaactctggatgccatggcttttaataagtttaatgttcttcactggcacatagttgatgaccagtctttcccatatcagagcatcacttttcctgagttaagcaataaaggaagctattctttgtctcatgtttatacaccaaatgatgtccgtatggtgattgaatatgccagattacgaggaattcgagtcctgccagaatttgatacccctgggcatacactatcttggggaaaaggtcagaaagacctcctgactccatgttacagtagacaaaacaagttggactcttttggacctataaaccctactctgaatacaacatacagcttccttactacatttttcaaagaaattagtgaggtgtttccagatcaattcattcatttgggaggagatgaagtggaatttaaatgttgggaatcaaatccaaaaattcaagatttcatgaggcaaaaaggctttggcacagattttaagaaactagaatctttctacattcaaaaggttttggatattattgcaaccataaacaagggatccattgtctggcaggaggtttttgatgataaagcaaagcttgcgccgggcacaatagttgaagtatggaaagacagcgcatatcctgaggaactcagtagagtcacagcatctggcttccctgtaatcctttctgctccttggtacttagatttgattagctatggacaagattggaggaaatactataaagtggaacctcttgattttggcggtactcagaaacagaaacaacttttcattggtggagaagcttgtctatggggagaatatgtggatgcaactaacctcactccaagattatggcctcgggcaagtgctgttggtgagagactctggagttccaaagatgtcagagatatggatgacgcctatgacagactgacaaggcaccgctgcaggatggtcgaacgtggaatagctgcacaacctctttatgctggatattgtaaccatgagaacatgtaaaaaatggaggggaaaaaggccacagcaatctgtactacaatcaactttattttgaaatcatgtaaaataagatattagacttttttgaataaaatatttttattgattgaa

SEQ ID NO: 1628 - protein, 556 aa, Homo sapiens
MELCGLGLPRPPMLLALLLATLLAAMLALLTQVALVVQVAEAARAPSVSAKPGPALWPLPLSVKMTPNLLHLAPENFYISHSPNSTAGPSCTLLEEAFRRYHGYIFGFYKWHHEPAEFQAKTQVQQLLVSITLQSECDAFPNISSDESYTLLVKEPVAVLKANRVWGALRGLETFSQLVYQDSYGTFTINESTIIDSPRFSHRGILIDTSRHYLPVKIILKTLDAMAFNKFNVLHWHIVDDQSFPYQSITFPELSNKGSYSLSHVYTPNDVRMVIEYARLRGIRVLPEFDTPGHTLSWGKGQKDLLTPCYSRQNKLDSFGPINPTLNTTYSFLTTFFKEISEVFPDQFIHLGGDEVEFKCWESNPKIQDFMRQKGFGTDFKKLESFYIQKVLDIIATINKGSIVWQEVFDDKAKLAPGTIVEVWKDSAYPEELSRVTASGFPVILSAPWYLDLISYGQDWRKYYKVEPLDFGGTQKQKQLFIGGEACLWGEYVDATNLTPRLWPRASAVGERLWSSKDVRDMDDAYDRLTRHRCRMVERGIAAQPLYAGYCNHENM

SEQ ID NO: 1629 - DNA, 663 bp, Homo sapiens
atggaagaagatgagttcattggagaaaaaacattccaacgttattgtgcagaattcattaaacattcacaacagataggtgatagttgggaatggagaccatcaaaggactgttctgatggctacatgtgcaaaatacactttcaaattaagaatgggtctgtgatgtcacatctaggagcatctacccatggacagacatgtcttcccatggaggaggctttcgagctacccttggatgattgtgaagtgattgaaactgcagcagcgtccgaagtgattaaatatgagtatcatgtcttatattcctgtagctaccaagtgcctgtactttactttagggcaagctttttagatgggagacctttaactctgaaggacatatgggaaggagttcatgagtgctataagatgcgactgctacagggaccatgggacactattacgcaacaggaacatccaatacttgggcaacccttttttgtacttcatccctgcaagacgaatgaattcatgactcctgtattaaagaattctcagaaaatcaataagaatgtcaactatatcacatcatggctgagcattgtagggccagttgttgggctgaatctacctctgagttatgccaaagcaacgtctcaggatgaacgaaatgtcccttaa

SEQ ID NO: 1630 - protein, 220 aa, Homo sapiens
MEEDEFIGEKTFQRYCAEFIKHSQQIGDSWEWRPSKDCSDGYMCKIHFQIKNGSVMSHLGASTHGQTCLPMEEAFELPLDDCEVIETAAASEVIKYEYHVLYSCSYQVPVLYFRASFLDGRPLTLKDIWEGVHECYKMRLLQGPWDTITQQEHPILGQPFFVLHPCKTNEFMTPVLKNSQKINKNVNYITSWLSIVGPVVGLNLPLSYAKATSQDERNVP

SEQ ID NO: 1631 - DNA, 746 bp, Homo sapiens
tttgcagatgacgccgccgaggaaaactgtgtactattagccatggtcaaccccaccgtgttcttcgacattgccgtcgatggcgagcccttgggccgcgtctcctttgagctgttagctgacaaggtcccaaagacagcagaaaattttcatgctctgagcactggagagaaaggatttggttataagggttcctgctttcacagaattattccagggtttatgtgtcagggtggtgacttcacacgccataatggcactagtggcaagtccatctatggggagaaatttgaagatgagaacttcatcctaaagcatacaggtcctggcatcttgtccatggcaaatgctggacccaacacaaatggctcccagtttttcatctgcactgccaagactgagtggttggatggcatgcatgtgatctgtggcaaagtgaaagaaggcatgaatattgtggaggtcatggagtgctttgggtccaggaatggcaagaccagcaagaagatcaccattgctgactgtggacaactcgaataagtttgacttgtgttttatcttaaccaccagaccattccttctgtagctcaggagagcacccctccatcccatttgctcgcagtatcctagaatctttgtgctctcgctgcagttccctttgggttccatgttttccttgttccctcccatgcctagctggattgcagagttaagtttatgattatgaaataaaaactaaataacaa

SEQ ID NO: 1632 - DNA, 506 bp, Rattus norvegicus
ctctttcgctcaggcccgtggcgccgacaggatgggcaagtgtcgtggacttcgtactgctaggaagctccgtagtcaccgacgagaccagaagtggcatgataaacagtataagaaagctcatttgggcacagccctaaaggccaacccttttggaggtgcttctcatgcaaaaggaatcgtgctggaaaaagtaggagttgaagccaaacagccaaattctgccattaggaagtgtgtaagggtccagctgatcaagaatggcaagaaaatcacagcctttgtacccaatgacggttgcttgaactttattgaggaaaatgatgaagttctggttgctggatttggtcgcaaaggtcatgctgttggtgatattcctggagtccgctttaaggttgtcaaagtagccaatgtttctcttttggccctatacaaaggcaagaaggaaagaccaagatcataaatattaatggtgaaaacactgtagtaataaattttcatatgcc

SEQ ID NO: 1633 - protein, 143 aa, Rattus norvegicus [sequence omitted]

SEQ ID NO: 1634 - DNA, 3405 bp, Homo sapiens
tttattttaattgccgtaaaggaactgtatttttgttttgttttttaacacagcactttaaatccagtttgtgttttgtcaacttgaactggaatctcttttgttactttggaggtgataaatagttttcaaatctgctgatttgtatactgtggcacaagtatctttgaactttgatagtgaaaggagaccttcaacaatttttagtctaggcgagaggaatattaggaatgtgacttctaaattttacaatagagcagttattttaaggtcatggttaacatttcttaaggttcaactaaaattcagttaaaatttcagagctacgaggaacttaaatcttagctaaaaattacctgttgtagatagtattaattagattgtttgcagctattaattcatcataaagataaaatgaagaaactctccctttttttaaacaaaaaaaattatttctagattaataggctagtagttatttctgcagaaacaacgtatggaactgaaagccacctatttttattttagactaatttaaaccacttggaatggattctaggaaacatcttaagcttgtgtgttgcctgtggtggttttttgtttgggggtgttttttggttttggtttgattttctgtattttgttatctggggattttttgtttgtttgttttggtttggttttggttttatatttttggcatgtctatggcagttaaaagtggtatattttgctttagatagggaatcaggttataatcattgttcttcctctaaactgcctcttgggctttacatcaggtcaaggatttttagggtttctcaaaaataggattcttgtcagtgtatgcatgctgagtaagtcacctttctggctctaatttctgggtggccatctgttgtccagctctgctgccaactggactttccgaaagccatgtcaactaattttttatatgctaagacaaatcgaatatgaaaagaggaagaatattctagatattctaagacatttcttaatttggcatctcagaggaggtaggtggaaagtaaaggaagagataattttgggggaaaatttgtggaaacatacaaaacgttttgctttgtatagatgctaaacagagtgggaggcagcatatttgtaacaacaaccattctgaccttttgaaacacaagcttttggagaagtcagggagagacacagtatgaataaaagcaattaacattttctttaatgtatatttttcaaagaggaccacggaatcctgttctctaacccaaggggcagtgtaggtggttttaagcccacagaatattgagatatttctcttgtggttttggtggggtggtgggatgcagaaggttattaaagatcaatttaagcatcagatagactatcccttttatttttttaacttttaggttcaggggtacatgtgcaggttgttatataggtaaactcatgtcaagtggttttgttgtacagattattttgtcacccaggtgctaagcctagtacccagtagttattttccctgctcttctccctcctcccaccctccaccctcaagtaggccccagtgtctgttgttcctttctttgtgtccttgagttctcatcatttagctcctacttctaaatgagaacatgtatttggttttctgttctgtgttagtttgctaaggataatggcctccagctcagatggaatatctctatcatatagacctgttgttacagggcaggatcggatgatggacactgaagtcctcagcttgctaagttcagttgctctccctagcctccttttggcttcagagtcttttgattccatctatcctggtattttttgtgtgctgatgtttagttctggattggcttcagctgtgctaataggaagggcgttgtcttttcaagcaatcttaaaaggtggtcaatcaaaaggccagagtctgaatcccttctgtggcttaaataatttgaggatcaagtccagtgtcttgttaatccctgttctactgtgccagacactatcttgaatgcttttatatgttcaggttcaaaatcgctctttcataccaggggatgatagtaacgtgtaacttgcaatagattccttcatcttagtaataagatgatcagtctagttaggacaaaatagagattgaataaattaacttttccaagtttacagagtaaaaatgagcagatctctgcctggttttgtgaaaaagagttagcactggtaaatagaatatttctactcctacaccattctttcagtatatcatcactgaagacaggaagataggcacacagattcttcctcgtagtaattcatagtgcactaggtgaaagagatgaagtatgtattaaaagtacaatgtgatggcatttattattcagataatcccaggattctagaagaaaataaagaagagtgacagttcagttagggtgtgaacttccagaggagcactgcttaagctgaacttgagagcattgtgcaaaagcacagtagtctgttaagaactagaaataacctagcttgtgccacttcgggagtattaagacataagcctagaaaggtaggcaaaggttagatcttagactgtcttgtatttttctcattcctgttgattacctacctcaaaattgaatatgtttttcctcctgcctaacacaaaactactcaagggcagaaatttaaattcttccttggtgtatgtgcaaagaaggttgaatatattcatgcctaccttattttggactaggaatacagtagtatactttccgaagacttgcctgaatagtatataaggtggaggcaactgactagttaggtcagtatttttagaaactcttaatagctcatactcttgataccaaaagcagccctgattgttaaagcacacacctgcacaagaagcagtgatggttgcatttacatttcctgggtgcacaaaaaaaaattctcaaaaagcaaggacttacgctttttgcaaagcctttgagaagttactggatcataggaagcttataacaagaatggaagattcttaaataactcactttctttggtatccagtaacagtagatgttcaaaatatgtagctgattaataccagcattgtgaacgctgtacaaccttgtggttattactaagcaagttactactagcttctgaaaagtagcttcataattaatgttatttatacactgccttccatgacttttactttgccctaagctaatctccaaaatctgaaatgctactccaatatcagaaaaaaagggggaggtggaattatatttcctgtgattttaagagtacagagaatcatgcacatctctgattagttcatatatgtctagtgtgtaataaaagtcaagatgaactctc

SEQ ID NO: 1635 - protein, 116 aa, Homo sapiens
MASSSDGISLSYRPVVTGQDRMMDTEVLSLLSSVALPSLLLASESFDSIYPGIFCVLMFSSGLASAVLIGRALSFQAILKGGQSKGQSLNPFCGLNNLRIKSSVLLIPVLLCQTLS

SEQ ID NO: 1636 - DNA, 1660 bp, Homo sapiens
cgggatttagatcacgtcccgcaggccggcggaagtagctgatactctcattggttgcaaaaccttgatctgtgaaagcgggcgttttggaagataccggaagtagagtcacggagaggtattaagaaatggagagaaaaataagcagaatccaccttgtttctgaacccagtataactcattttctacaagtatcttgggagaaaacactggaatctggttttgttattacacttactgatggtcattcagcatggactgggacagtttctgaatcagagatttcccaagaagctgatgacatggcaatggaaaaagggaaatatgttggtgaactgagaaaagcattgttgtcaggagcaggaccagctgatgtatacacgtttaatttttctaaagagtcttgttatttcttctttgagaaaaacctgaaagatgtctcattcagacttggttccttcaacctagagaaagttgaaaacccagctgaagtcattagagaacttatttgttattgcttggacaccattgcagaaaatcaagccaaaaatgagcacctgcagaaagaaaatgaaaggcttctgagagattggaatgatgttcaaggacgatttgaaaaatgtgtgagtgctaaggaagctttggagactgatctttataagcggtttattctggtgttgaatgagaagaaaacaaaaatcagaagtttgcataataaattattaaatgcagctcaagaacgagaaaaggacatcaaacaagaaggggaaactgcaatctgttctgaaatgactgctgaccgagatccagtctatgatgagagtactgatgaggaaagtgaaaaccaaactgatctctctgggttggcttcagctgctgtaagtaaagatgattccattatttcaagtcttgatgtcactgatattgcaccaagtagaaaaaggagacagcgaatgcaaagaaatcttgggacagaacctaaaatggctcctcaggagaatcagcttcaagaaaaggaaaagcctgattcttcactacctgagacgtcgaaaaaggagcacatctcagctgaaaacatgtctttagaaactctgagaaacagcagcccagaagacctctttgatgagatttaacagtctcaaaaaatactttgatgttcactagactatgttttctattcatttctttaaaatgaaaaaggagaatttcaagtcagcagccgctattaccgtatcttacaatttaattacatacacagtgaattgaaaccattgtgcaaaatggattacacatgtatacaaagatacgatttgatgatgacactggcacattgagttctaaactattcattcagcatgcctataattacataaattgtatgagactttttgttgcaaaggacacatttatcatattcattcacacatattatatgtgatagctgtccaacatcctgtctgggaagattttgaaaacaggacaaagaaaacatcattttaaaatgtcttcagctttttttgaatagacgtattcaaacatattctgaacattgatgtttgaacattttaatttgtgtgatgatgtagaaaatataattttagtttgtacataaacattgtgaaaatctgataataaaatttttgatacattgaaaaaaaaa

SEQ ID NO: 1637 - protein, 334 aa, Homo sapiens
MERKISRIHLVSEPSITHFLQVSWEKTLESGFVITLTDGHSAWTGTVSESEISQEADDMAMEKGKYVGELRKALLSGAGPADVYTFNFSKESCYFFFEKNLKDVSFRLGSFNLEKVENPAEVIRELICYCLDTIAENQAKNEHLQKENERLLRDWNDVQGRFEKCVSAKEALETDLYKRFILVLNEKKTKIRSLHNKLLNAAQEREKDIKQEGETAICSEMTADRDPVYDESTDEESENQTDLSGLASAAVSKDDSIISSLDVTDIAPSRKRRQRMQRNLGTEPKMAPQENQLQEKEKPDSSLPETSKKEHISAENMSLETLRNSSPEDLFDEI

SEQ ID NO: 1638 - DNA, 1707 bp, Homo sapiens
cgggatttagatcacgtcccgcaggccggcggaagtagctgatactctcattggttgcaaaaccttgatctgtgaaagcgggcgttttggaagataccggaagtagagtcacggagaggtaggatccggaagtggggctgcctctttaaataacaaaaatctgaggtattaagaaatggagagaaaaataagcagaatccaccttgtttctgaacccagtataactcattttctacaagtatcttgggagaaaacactggaatctggttttgttattacacttactgatggtcattcagcatggactgggacagtttctgaatcagagatttcccaagaagctgatgacatggcaatggaaaaagggaaatatgttggtgaactgagaaaagcattgttgtcaggagcaggaccagctgatgtatacacgtttaatttttctaaagagtcttgttatttcttctttgagaaaaacctgaaagatgtctcattcagacttggttccttcaacctagagaaagttgaaaacccagctgaagtcattagagaacttatttgttattgcttggacaccattgcagaaaatcaagccaaaaatgagcacctgcagaaagaaaatgaaaggcttctgagagattggaatgatgttcaaggacgatttgaaaaatgtgtgagtgctaaggaagctttggagactgatctttataagcggtttattctggtgttgaatgagaagaaaacaaaaatcagaagtttgcataataaattattaaatgcagctcaagaacgagaaaaggacatcaaacaagaaggggaaactgcaatctgttctgaaatgactgctgaccgagatccagtctatgatgagagtactgatgaggaaagtgaaaaccaaactgatctctctgggttggcttcagctgctgtaagtaaagatgattccattatttcaagtcttgatgtcactgatattgcaccaagtagaaaaaggagacagcgaatgcaaagaaatcttgggacagaacctaaaatggctcctcaggagaatcagcttcaagaaaaggaaaagcctgattcttcactacctgagacgtcgaaaaaggagcacatctcagctgaaaacatgtctttagaaactctgagaaacagcagcccagaagacctctttgatgagatttaacagtctcaaaaaatactttgatgttcactagactatgttttctattcatttctttaaaatgaaaaaggagaatttcaagtcagcagccgctattaccgtatcttacaatttaattacatacacagtgaattgaaaccattgtgcaaaatggattacacatgtatacaaagatacgatttgatgatgacactggcacattgagttctaaactattcattcagcatgcctataattacataaattgtatgagactttttgttgcaaaggacacatttatcatattcattcacacatattatatgtgatagctgtccaacatcctgtctgggaagattttgaaaacaggacaaagaaaacatcattttaaaatgtcttcagctttttttgaatagacgtattcaaacatattctgaacattgatgtttgaacattttaatttgtgtgatgatgtagaaaatataattttagtttgtacataaacattgtgaaaatctgataataaaatttttgatacattgaaaaaaaaa

SEQ ID NO: 1639 - protein, 334 aa, Homo sapiens; identical to SEQ ID NO: 1637

SEQ ID NO: 1640 - DNA, 3288 bp, Homo sapiens
aggtaaacagaatctggtgattatgggtaagaagacctggttctccattcctgagaagaatcgacctttaaagggtagaattaatttagttctcagcagagaactcaaggaacctccacaaggagctcattttctttccagaagtctagatgatgccttaaaacttactgaacaaccagaattagcaaataaagtagacatggtctggatagttggtggcagttctgtttataaggaagccatgaatcacccaggccatcttaaactatttgtgacaaggatcatgcaagactttgaaagtgacacgttttttccagaaattgatttggagaaatataaacttctgccagaatacccaggtgttctctctgatgtccaggaggagaaaggcattaagtacaaatttgaagtatatgagaagaatgattaatatgaaggtgttttctagtttaagttgttccccctccctctgaaaaaagtatgtatttttacattagaaaaggttttttgttgactttagatctataattatttctaagcaactagtttttattccccactactcttgtctctatcagataccatttatgagacattcttgctataactaagtgcttctccaagaccccaactgagtccccagcacctgctacagtgagctgccattccacacccatcacatgtggcactcttgccagtccttgacattgtcgggcttttcacatgttggtaatatttattaaagatgaagatccacatacccttcaactgagcagtttcactagtggaaataccaaaagcttcctacgtgtatatccagaggtttgtagataaatgttgccaccttgtttgtaacagtgaaaaattgaaaacaacctggaagtccagtgatgggaaaatgagtatgtttctgtcttagattggggaacccaaagcagattgcaagactgaaatttcagtgaaagcagtgtatttgctaggtcataccagaaatcatcaattgaggtacggagaaactgaactgagaaggtaagaaaagcaatttaaagtcagcgagcaggttctcattgataacaagctccatactgctgagatacagggaaatggaggggggaaagctggagtattgatcccgcccccctccttggttgtcagctccctgtcctgtgtgtgggcggaacatagtccagctgctctatagcaagtctcaggtgtttgcagtaagaagctgctggcatgcacgggaacagtgaatgccaaacacttaaagcaattcgatgtttaagtatgtaagttcttttttttttagacagcgtttcgctcttgttgcccaggctagcatgcaatggtgtgacctcggcttactgcaacctccgccttcccagattcaagcgattctcctgcctcaggctcccaagtagctaggaccaggtgcgcgccaccacgcccggctaatttttgtattttgtatttttagtagagatggggtttcaccatgttggtcaggctagtctcgaactcgtgaccgcaagcgattcacccacctcagcctcccaaagtgctgggattaccggcttgagccaccacacccggcacatcttcattctttttatgtagtaaaaagtataaggccacacatggtttatttgaagtattttataatttaaaaaaatacagaagcaggaaaaccaattataagttcaagtgagggatgatggttgcttgaaccaaagggttgcatgtagtaagaaattgtgatttaagatatattttaaagttataagtagcaggatattctgatggagtttgactttggttttgggcccagggagtttcagatgcctttgagaaatgaatgaagtagagagaaaataaaagaaaaaccagccaggcacagtggctcacacctgtaatcccagcgctttgggaggctaaggcaggcagatcacttgagaccagcttgggcaacatggcaaagccccatctctacaaaaaacacaaaaattagctgggcattgtggcgcacacctgtattcccatctagtcaggaagctgagatggaagaattaattgagcccacgagttcaaggctgcagtgagtcgtgattgtgccactgcactccagccggggtgacagaagagaccttgtctcgaaaaggaatctgaaaacaatggaaccatgccttcataattctagaaagttattttcaactgataaatctatattcacccaaataatcaagggtgaaggtaaaataatacatttttagacaagcaaagactcaggggttacctccatgtgccctttttagggaagctgttggagaaaatactccagcaaaatgaaggagtacacaaaccagagaatgacatgaatccagcaaataggatccaacacaggcaatattccagctatggagctagctttaaaaaggaacagtaaaaatattaatcggttagctgggtggaatggcccatgcctgtagtcccagctactcaggaggctcagcagcaggacgacttgagcccaagagttccagaccagcctggccaccttagtgagatcccttctcttaaaaataataacttattgccagatttggggcatttggaaagaagttcattgaagataaagcaaaagtaaaaaaaaaaaaaaaaaaaacaaggggaaagggttggttaggcaatcattctagggcagaaagaagtacaggataggaagagcataatacactgtttttctcaacaaggagcagtatgtacacagtcataatgatgtgactgcttagcccctaaatatggtaactactctgggacaatatgggaggaaaagtgaagattgtgatggtgtaagagctaaatcctcatctgtcatatccagaaatcactatataatatataataatgaaatgactaagttatgtgaggaaaaaaacagaagacattgctaaaagagttaaaagtcattgctctggagaattaggagggatggggcaggggactgttaggatgcattataaactgaaaagcctttttaaaattttatgtattaatatatgcattcacttgaaaaactaaaaaaaaacaataatttggaaaaacccatgaaggtaactaacggaaggaaaaactaagagaatgaaaagtatttgcctctggaaagaacaactggcaggactgttgttttcattgtaagacttttggagccatttaattgtacttaaccattttcatctatttctttaataagaacaattccatcttaataaagagttacacttgttaata

SEQ ID NO: 1641 - DNA, 323 bp, Homo sapiens
ttaccttctactgaagaggttgtggtcattctctggaaatatctgaattcattcctgagcggtggccagggcaggtccccgttcttgccgatgcccatgttctgggacacagcgacgatgcagtttagcgaaccaaccatgacagcagcgggaggacctccgagcccgctcgttacagcagaacgcgcggtcaagtttggcgcgaaattgtggccgccccgccccctcgtccctatttgtgcaggcgaggccccgcccccccgccccggcgcacgcagggtcgcggcgtgctcgcgcccgcagacgcctgggaactgcggccg

SEQ ID NO: 1642 - DNA, 4635 bp, Homo sapiens
ctccaataccgcaggagggcggtcttccccggctcgccaactcggctgctctgggggattcgtgcgcggtaagaagctgcgcggtagcgcggtgaggtgaggttctcagccaccaaagctgcagggtctcgtcgttcgttccctctggcctggcggaacttgcgtgggaagctgggaggacagaaggcttagccgctgggtccctgagctggctggagcgcgggctgtctaggggcggcgacctcagctgttgggctccggctgctgggggctgtgcgtccagccgccctggaatccgcctgtgggtgggccgcttggctctcccacttcaccctcttgataacccagagcctcccccttcccacgtacgtaggggaaggataatctacttccttttgaacagcttcggtccccactatgacagtcgcataaacttcagcgaagagtgcgctggtaaagtggcatggagtttctcacaccaattcattgggtccacccttcagcttctgtggaaggggtctttctgttactaggagctgagacttggggggttgccagggatgctggtcttaaaaggtgataatttaggccgggcgcggtggctcacgcctgtaatcccagcactttgggaggtcgaggcgggcagatctcctgagctcaggagttcgagaccaccctgggcaacatggtgaaaccccttctctactaaaatacaaaaaattagctgggcgtggtggcacgcgcctgtaatcccagctattcgggaggctgaggcccgagaatcgcttgagccctggcggcagaggttgcagtgagccaagatcgcccactgcactccaggttgggctacagagtgagactccgtctcaacaacgaccacaacaacaacaaaaaaggtggtggcttaatacagccatgctccccttaagaactggtatagttatgagaaatggttgggccgtttcgtggttgtgtgaacatcatagtgtacttgcacaaacctacacagctgggccgtatgggatagcctgttactcctagtctacagacctgtacagtataactactaaatactgtaggcagttgtaaaaggatggtgtgtatctaaacacagaaaagatactgtaaaaatatagtgtaaaagaaaacatggtacagctgaatagggcacttacgcatggagcttgcagggctgtcggtagctattaagtgagtcagtgagtggtatgtgagtgtgaaggcctacgatattatttagggtattactgtacactactgtagactttataaatgcggtatgcttagtctaagtttattaaaaataaggtaataaccttagcttactgtgcttttttaactttataaacttttaaattaattttaactccttgacctttttttttttttttgagacggagtttattctctctgtctctcatttttgagacagagttttgctcttgtcacccaggctggagtgcagtggcgcaatctcagctcactgcaacgtccacctcttgagttcaagcgattctcctgcctcagcttcccaggtggtgcgcgcctgtagctgggactacaagagtgcgccaccacgcccagctaatttttgtatttttagtagagatggggtttgaccatgttggccaggatggtctcgatatcctgaccttgtgatccacctggccttggcctcccaaagtgctgggattacaggcgtgagccaccatacccggcccactcttttgtaataacacttagcttaaaatgctaatgtgttgtatagctatataaaaatattttctttattcccttacattattctatagctttttcctgtaaaaattttttttgttgttataaactaagacacacacattgtgcctacaccgggtcaggagcatcaatatcactcttttcttcctccacatcttgtcctactggaaggttttcaggggcagtaacatgaatggagctgtcatctcctataataactgcttttttctggaatacttataattgtctagtattatgtacagtacatcattgtaagcattatgcttgtatatgactggcatcccaggtttgtttacaccagcattaccacagacatgagtaatgtgttacactacaagttatgagggctacaaagtcaataggaatttttcagctccattataatcatctgagaccagtatcatgtgtgcagtcgctgttgacctaaatgttatgtagcatgtgactagctgatgaatctttgattatggctgaatgttctcattcattgcaggaaaaaaatatcctccaaatcactaggtagtatgtaagtgaccaaaacttttttccattttatgttggagccaaatcattagtgttaggataaattacttctttatgtatgtgctctaaaatgaaaagttatttctgaatattaaagcatatgtattaagagtataaaaacaagatacagattttggtgtgaaatatatcttatgattcaagtcataatttaaatagaattgaagatgatgtgaaatcactgggctggaagtagcttataccttgattagtaagaggaagcccgggatcatcctgtgatggtaaacacttttatatgttttacttataactttgccaggaaatttcaacaaacttcatattaaaggacatgatttctgtatacttagtaatctgctatgcaaattgttgcattgaaatggcagacgaagcaagaagattgggagaaagtagctgtgggacttggagataggaaaataaacagccgggaaaactgcagaatgtgggaggaataattgcattcattgtattactatctgatttatattttatgaaataatttggtttcttaagatagtttttcaattttaagcacaccttttttaactggtgtggcagcttttctggtaagtggtagatttatgttagaagcatgtctatgcagcatattatagcattaaatatgtatacagatatctaactgaaataaaaagtgttttaataattaaaagtttaacatatgggcatatgtgacatatagtgatatagcatgtctctttagttttgttgtttttgttgttgatggctaaccacccatgcttgtcttaaaaattgataaggtaccactgatgaaattatgaccaggtgggcccgagttagtaccacatataacaagagacccttgcctgcaacatcatgggaggacatgaagaagggatcctttgagggaacaagccaaaacctaccaaagcgtaaacaacttgaagccaataggctatccctcaaaaatgatgcaccccaagcaaaacataaaaagaacaaaaagaaaaaagagtacttaaatgaagatgtgaatggattcatggaatacctaagacagaattcacagatggttcacaatgggcaaattatagcaacagacagtgaggaagtaagggaagaaattgcagttgctttaaagaaagacagtcgacgggaaggaagaagattaaaaagacaagcggcaaagaaaaatgcaatggtgtgtttccattgtagaaaacctggtcatggaattgcagattgccccgccgcccttgaaaatcaagacatgggcactgggatatgttacaggtgtgggtccacagagcacgaaataaccaagtgtaaggctaaagtagacccggctcttggcgaatttccttttgcaaaatgttttgtttgtggagaaatggggcacctgtctagatcttgtcctgataatcccaaaggactctatgctgatggtggcggttgcaaactttgtggctctgtggaacatttaaagaaagattgccctgaaagtcagaattcagagcgaatggtcacagttggtcgctgggcaaagggaatgagtgcagactatgaagaaattttggatgtacctaaaccgcaaaaacccaaaacaaaaatacctaaagttgttaatttttgataacagctagcactatcatgagttactacctcattgttactttctaaaccaggcccgcttcacgagttagagttgagctcccctgtagccaggactatgctgtagatatcagtatgatctgggtgtggccaaaaacaattttctttattctgtctatcaaatagtacttctaccactgtttggagaaaattgaagaaaagaataagatgattaaatgaattctctaaaagaacatattttaagagacagaacttagacataaccaagtagttgtatacctgattgtaacaatcatcttttataaaagcaaaattatgcataaatgtaaaacacccctaaacaaagggaacaaatgaatttttggttatattgttttcttggctcaaagtatcaatttattattataatagaaatttataagttgctagaaagtctatatttttaaagtacggaataaaaatatgttttctattaagcaatagaaatatttttgtgtataatttttctgaatacttgattctcgattgaaatatccattgttcgttaatatccatgtaacaatcccattggaaacaagatttttttgaatcctagatgagaataaacagggatttggtttttgttttagttttgaaaaaaaaaaaaaaaaaaaaaaaaaaaaaaaa

SEQ ID NO: 1643 - protein, 271 aa, Homo sapiens
MTRWARVSTTYNKRPLPATSWEDMKKGSFEGTSQNLPKRKQLEANRLSLKNDAPQAKHKKNKKKKEYLNEDVNGFMEYLRQNSQMVHNGQIIATDSEEVREEIAVALKKDSRREGRRLKRQAAKKNAMVCFHCRKPGHGIADCPAALENQDMGTGICYRCGSTEHEITKCKAKVDPALGEFPFAKCFVCGEMGHLSRSCPDNPKGLYADGGGCKLCGSVEHLKKDCPESQNSERMVTVGRWAKGMSADYEEILDVPKPQKPKTKIPKVVNF

SEQ ID NO: 1644 - DNA, 1710 bp, Homo sapiens
ggggaggctgtgatgggttgacaggtgcgtgacagtgggagctgctctcggcacaagcatgtacggcaaaggcaagagtaacagcagcgccgtcccgtccgacagccaggcccgggagaagttagcactctacgtatatgaatatctgctccatgtaggagctcagaaatcagctcaaacatttttatcagagataagatgggaaaaaaacatcacattgggggaaccaccaggattcttacattcttggtggtgtgtattttgggatctctactgtgcagctccagagagacgtgaaacatgtgaacactcaagtgaagcaaaagccttccatgattacagtgctgcagcagctcccagtccagtgctaggaaacattcccccaggagatggcatgccagtaggtcctgtaccaccagggttctttcagccttttatgtcacctcggtaccctggaggtccaaggcccccattgaggatacctaatcaggcacttggaggtgtcccaggaagtcagccattactccccagtggaatggatccaactcgacaacaaggacatccaaatatgggtgggccaatgcagagaatgactcctccaagaggaatggtgcccttaggaccacagaactatggaggtgcaatgagacccccactgaatgctttaggtggccctggaatgcctggaatgaacatgggtccaggtggtggtagaccttggccaaacccaacaaatgccaattcaataccatactcctcagcatctcctgggaattatgtaggtcctccaggaggtggagggccaccaggaacacccatcatgcctagtccagcagattcaaccaactctggtgataacatgtatactttaatgaatgcagtacctcctggacctaacagacctaattttccaatgggtcctgggtcagatggtcccatgggtggattaggaggaatggagtcacatcacatgaatggctctttaggctcaggagatatggacagtatttccaagaattctcccaataatatgagcctgagtaatcaaccgggcactccaagggatgatggcgaaatggggggaaatttcttaaatccttttcagagtgagagttactcccctagcatgacaatgagcgtgtgatccattaccaagtctcctcatgaaaaccacagtgagtcagcccttcacagaactactacggaagaaaattattcatcacagtgtacagttaaacaaaggaatctcagtcacaccaaaccaacctttttatttcctgctctctcccctcttttgtgaagaaagcgggtccaaatgtgattcaaacaactgtacggagtggcatattagaattgccctaaactgaactgcaaataattatgtgtgtatgtatatgtgtgggaaagagaatgtactgtatatgtgtatgttatacagacatatacacatacatacattgacccacaggacattgtaaaatattatcacatgacatcttaagtagaaataagtagggacttttattccatcctttttttcacgtttacattttaattattacaagttgctcctgccccctccctgaactattttgtgctgtgtatatcactgctttatataagttattttttaaggtgaactcagatgttatggttttgtaaatgtctgcaatcatggataggaataaaatcgcttatttgagagctttc

SEQ ID NO: 1645 - protein, 361 aa, Homo sapiens
MYGKGKSNSSAVPSDSQAREKLALYVYEYLLHVGAQKSAQTFLSEIRWEKNITLGEPPGFLHSWWCVFWDLYCAAPERRETCEHSSEAKAFHDYSAAAAPSPVLGNIPPGDGMPVGPVPPGFFQPFMSPRYPGGPRPPLRIPNQALGGVPGSQPLLPSGMDPTRQQGHPNMGGPMQRMTPPRGMVPLGPQNYGGAMRPPLNALGGPGMPGMNMGPGGGRPWPNPTNANSIPYSSASPGNYVGPPGGGGPPGTPIMPSPADSTNSGDNMYTLMNAVPPGPNRPNFPMGPGSDGPMGGLGGMESHHMNGSLGSGDMDSISKNSPNNMSLSNQPGTPRDDGEMGGNFLNPFQSESYSPSMTMSV

SEQ ID NO: 1646 - DNA, 4077 bp, Homo sapiens
gaattcccagctctctgctcgctctgctcgcagtcacagacacttgagcacacgcgtacacccagacatcttcgggctgctattggattgactttgaaggttctgtgtgggtcgccgtggctgcatgtttgaatcaggtggagaagcacttcaacgctggacgaagtaaagattattgttgttattttttttttctctctctctctctcttaagaaaggaaaatatcccaaggactaatctgatcgggtcttccttcatcaggaacgaatgcaggaatttgggaactgagctgtgcaagtgctgaagaaggagatttgtttggaggaaacaggaaagagaaagaaaaggaaggaaaaaatacataatttcagggacgagagagagaagaaaaacggggactatggggagaaaaaagattcagattacgaggattatggatgaacgtaacagacaggtgacatttacaaagaggaaatttgggttgatgaagaaggcttatgagctgagcgtgctgtgtgactgtgagattgcgctgatcatcttcaacagcaccaacaagctgttccagtatgccagcaccgacatggacaaagtgcttctcaagtacacggagtacaacgagccgcatgagagccggacaaactcagacatcgtggagacgttgagaaagaagggccttaatggctgtgacagcccagaccccgatgcggacgattccgtaggtcacagccctgagtctgaggacaagtacaggaaaattaacgaagatattgatctaatgatcagcaggcaaagattgtgtgctgttccacctcccaacttcgagatgccagtctccatcccagtgtccagccacaacagtttggtgtacagcaaccctgtcagctcactgggaaaccccaacctattgccactggctcacccttctctgcagaggaatagtatgtctcctggtgtaacacatcgacctccaagtgcaggtaacacaggtggtctgatgggtggagacctcacgtctggtgcaggcaccagtgcagggaacgggtatggcaatccccgaaactcaccaggtctgctggtctcacctggtaacttgaacaagaatatgcaagcaaaatctcctcccccaatgaatttaggaatgaataaccgtaaaccagatctccgagttcttattccaccaggcagcaagaatacgatgccatcagtgtctgaggatgtcgacctgcttttgaatcaaaggataaataactcccagtcggctcagtcattggctaccccagtggtttccgtagcaactcctactttaccaggacaaggaatgggaggatatccatcagccatttcaacaacatatggtaccgagtactctctgagtagtgcagacctgtcatctctgtctgggtttaacaccgccagcgctcttcaccttggttcagtaactggctggcaacagcaacacctacataacatgccaccatctgccctcagtcagttgggagcttgcactagcactcatttatctcagagttcaaatctctccctgccttctactcaaagcctcaacatcaagtcagaacctgtttctcctcctagagaccgtaccaccaccccttcgagatacccacaacacacgcgccacgaggcggggagatctcctgttgacagcttgagcagctgtagcagttcgtacgacgggagcgaccgagaggatcaccggaacgaattccactcccccattggactcaccagaccttcgccggacgaaagggaaagtccctcagtcaagcgcatgcgactttctgaaggatgggcaacatgatcagattattacttactagtttttttttttttcttgcagtgtgtgtgtgtgctataccttaatggggaaggggggtcgatatgcattatatgtgccgtgtgtggaaaaaaaaaaagtcaggtactctgttttgtaaaagtacttttaaattgcctcagtgatacagtataaagataaacagaaatgctgagataagcttagcacttgagttgtacaacagaacacttgtacaaaatagattttaaggctaacttcttttcactgttgtgctcctttgcaaaatgtatgttacaatagatagtgtcatgttgcaggttcaacgttatttacatgtaaatagacaaaaggaaacatttgccaaaagcggcagatctttactgaaagagagagcagctgttatgcaacatatagaaaaatgtatagatgcttggacagacccggtaatgggtggccattggtaaatgttaggaacacaccaggtcacctgacatcccaagaatgctcacaaacctgcaggcatatcattggcgtatggcactcattaaaaaggatcagagaccattaaaagaggaccatacctattaaaaaaaaatgtggagttggagggctaacatatttaattaaataaataaataaatctgggtctgcatctcttattaaataaaaatataaaaatatgtacattacattttgcttattttcatataaaaggtaagacagagtttgcaaagcatttgtggctttttgtagtttacttaagccaaaatgtgtttttttccccttgatagcttcgctaatattttaaacagtcctgtaaaaaaccaaaaaggactttttgtatagaaagcactaccctaagccatgaagaactccatgctttgctaaccaagataactgttttctctttgtagaagttttgtttttgaaatgtgtatttctaattatataaaatattaagaatcttttaaaaaaatctgtgaaattaacatgcttgtgtatagctttctaatatatataatattatggtaatagcagaagttttgttatcttaatagcgggaggggggtatatttgtgcagttgcacatttgagtaactattttctttctgttttcttttactctgcttacattttataagtttaaggtcagctgtcaaaaggataacctgtggggttagaacatatcacattgcaacaccctaaattgtttttaatacattagcaatctattgggtcaactgacatccattgtatatactagtttctttcatgctatttttattttgttttttgcatttttatcaaatgcagggcccctttctgatctcaccatttcaccatgcatcttggaattcagtaagtgcatatcctaacttgcccatattctaaatcatctggttggttttcagcctagaatttgatacgctttttagaaatatgcccagaatagaaaagctatgttggggcacatgtcctgcaaatatggccctagaaacaagtgatatggaatttacttggtgaataagttataaattcccacagaagaaaaatgtgaaagactgggtgctagacaagaaggaagcaggtaaagggatagttgctttgtcatccgtttttaattattttaactgacccttgacaatcttgtcagcaatataggactgttgaacaatcccggtgtgtcaggacccccaaatgtcacttctgcataaagcatgtatgtcatctattttttcttcaataaagagatttaatagccatttcaagaaatcccataaagaacctctctatgtccctttttttaatttaaaaaaatgactcttgtctaatattcgtctataagggattaattttcagaccctttaataagtgagtgccataagaaagtcaatatatattgtttaaaagatatttcagtctaggaaagattttccttctcttggaatgtgaagatctgtcgattcatctccaatcatatgcattgacatacacagcaaagaagatataggcagtaatatcaacactgctatatcatgtgtaggacatttcttatccattttttctcttttacttgcatagttgctatgtgtttctcattgtaaaaggctgccgctgggtggcagaagccaagagaccttattaactaggctatatttttcttaacttgatctgaaatccacaattagaccacaatgcacctttggttgtatccataaaggatgctagcctgccttgtactaatgttttatatatt

SEQ ID NO: 1647 - protein, 473 aa, Homo sapiens
MGRKKIQITRIMDERNRQVTFTKRKFGLMKKAYELSVLCDCEIALIIFNSTNKLFQYASTDMDKVLLKYTEYNEPHESRTNSDIVETLRKKGLNGCDSPDPDADDSVGHSPESEDKYRKINEDIDLMISRQRLCAVPPPNFEMPVSIPVSSHNSLVYSNPVSSLGNPNLLPLAHPSLQRNSMSPGVTHRPPSAGNTGGLMGGDLTSGAGTSAGNGYGNPRNSPGLLVSPGNLNKNMQAKSPPPMNLGMNNRKPDLRVLIPPGSKNTMPSVSEDVDLLLNQRINNSQSAQSLATPVVSVATPTLPGQGMGGYPSAISTTYGTEYSLSSADLSSLSGFNTASALHLGSVTGWQQQHLHNMPPSALSQLGACTSTHLSQSSNLSLPSTQSLNIKSEPVSPPRDRTTTPSRYPQHTRHEAGRSPVDSLSSCSSSYDGSDREDHRNEFHSPIGLTRPSPDERESPSVKRMRLSEGWAT

SEQ ID NO: 1648 - DNA, 297 bp, Homo sapiens
atgcaggcccgacaagtaatgctagcagtggcactttatagccacggctgcacagaaatcagaacattttctttagattttttgaagaagcgcatctttcagattcacacaagcaggatgacgctggctgatgatgtaaccctggacgacctgatcatggctaaagatgacctctctggtgctgacatcaaggcaatctgtacagaagctggtctgatggccttaagagaacgtagaatgaaagtaacaaatgaagactacattgacttttctaaaatagaaatcagggaaggttaa

SEQ ID NO: 1649 - protein, 98 aa, Homo sapiens
MQARQVMLAVALYSHGCTEIRTFSLDFLKKRIFQIHTSRMTLADDVTLDDLIMAKDDLSGADIKAICTEAGLMALRERRMKVTNEDYIDFSKIEIREG

SEQ ID NO: 1650 - DNA, 2036 bp, Homo sapiens
tttcctctttctctaagagtctctctctccctttccctctctctccccccaatctgtctttctagcatgttgccctttttcaaccacatttgtgtttcaggtgtagagaggagagagagtgaacagggagcggggcttttgtctgttggtctccctggactgaagagagggagaatagaagcccaagactaagattctcaaaatggtttattacccagaactctttgtctgggtcagtcaagaaccatttccaaacaaggacatggagggaaggcttcctaagggaagacttcctgtcccaaaggaagtgaaccgcaagaagaacgatgagacaaacgctgcctccctgactccactgggcagcagtgaactccgctccccaagaatcagttacctccactttttttaatcgtaacacctccatttgtattacatatggtgtatgggtattgatgaggtcatggtatcatatatgggatttttttctgtgtaaatcatcaagtataagaagaaactatgggactctgagccttgctttagagaatttacagtggacaaataggtgtcatcaaaccagtttttaatcattctgactcaagtgaaaacgctcagaatttcacactgtgaatccacgtttacaacccttacaggtgggccttcaggcctggttcgctacaacaatgtcttccacaactcaaactcccaccgcgctcacacaaccggtccactcctgccttttcactcacacagctcccgactgcttcttgcagaggctgagagtccccccccccacctttttttttcatttagatgtaacaaacctagtagtttatgttcatcaattgtctgtatatctctatattttatccatgtactcttttgatgtatagaagtagtttgaaactcattgtttccttgtggtaagtgaccgagatgctgccacaggacctgagacactgatgaatggtgctattttggactttcaacatgctccttggcgaggtagctctgatggagttattttttatttccatgttctaagaaggtgttggtactctgtttccctgaatgttgttctctagactggattgacttgttttccttgtgtcttcagtgtggctttcttcctcagtgttgtaggttgagcgaatgctaccagagtgtgagagaccattgtctcgttggctggcgctcacggacatgcagtcacggtagcgggagcaatcacaaaactgtaatttacttaccaaatctcttcctttccgtagcctcgcctgcctgacttagagaaagaaaagcaataattttacaggcattttgaggtgtctctttgggttctttctgtttgaaaggatatttgtcgaaaaaaagagcaaaaccgttttaaataaactccccctggaaaaaaacccaaaacactggcatctgagtaggaatatgaaaatgacaccttttccaaatattaaattggaaaacaaggtctacaaaatcatgatacttttttaaaaggcagagcattcttttttcggcaattttgataagcaaggtgtagatttacatttttgtccttgctcccaacgaaatggataaacaaaaataaattaccatctactcatggaatgttgttgtgttagccagtctgaaagcccaccttaatttttatataactgtctttagctcttcttttgacagggcaggccttgttctgaactgtttcgcttctgactgttaaacaccgatgacgcatgcactgcacttcttcgttttcttcttgctcccccattggcctgagtttcttgtgcattactcctctccctccttcgttagaataggtatatcagctgtgtaaatagagcaagaaaacagtattctgcatctgtggcatttatgtagagttgcagttgtgtactgctgaaaatgcaggcttttgtaacagtgtgatctttactgatgcactcatgacaagtacccaatgtattttagctattttagtagtatttgttcaataaatacgcaagctgtaaggtaactgtctg

SEQ ID NO: 1651 - protein, 68 aa, Homo sapiens
MVYYPELFVWVSQEPFPNKDMEGRLPKGRLPVPKEVNRKKNDETNAASLTPLGSSELRSPRISYLHFF

SEQ ID NO: 1652 - DNA, 880 bp, Homo sapiens
ttttggctctctgaccagcaccatggcagttggcaagaacaagtgccttacgaaaggcggcaaaaagggagccaagaagaaagtggttgatcaattttctaagaaagattggtatgatgtgaaagcatctgctatgttcagtataagaaatattggaaagacgctcgtcaccaggacccaaggaaccaaaattgcatctgatggtctcaagggtcgtgtgtttgaagtgagtcttgctgatttgcagaatgatgaagttgcatttagaaaattcaagctgattactgaagatgttcagggcaaaaactgcctgagcaacttccatggcatggatcttacccgtgataaaatgtgttccatggtcaaaaaatggcagacaatgattgaagctcatgttgatgtcaggactaccgatggttacttgcttcatctgttctgtgttggttttactaaaaaacgcaacaatcagatacggaagacctcttatgctcagcaccaacaggtccgccaaatccggaagaagatgatggaaatcatgaccccagaggtgcagacaaatgacttgaaagacccagaggtgcagacaaattacagtggtcaataaattgattccagacagcattggaaaagacatagaaaaggcttgccaacctatttatcctctccatgatgtcttcgttagaaaagtaaaaatgctgaagaagcccaagtttgaattgggaaagctcatggagcttcatggtgaaggcagtagttctggaagagccactggggatgagacaagtgctaaagttgaacgagctgatggatatgaaccaccagtccaagaatctgtttaaagttcagacttcaaatagtggcaaataaaaagtgctatttg

SEQ ID NO: 1653 - protein, 193 aa, Homo sapiens [sequence omitted]

SEQ ID NO: 1654 - DNA, 735 bp, Homo sapiens
gcagccagaaagctctggagcatcagggagactccaacttaaggcaacagcatgggtgaataagggcttcctgtggactggcaatgagaggcaaaacctggtgcttgagcactggcccctaaggcaggccttacagatctcttacactcgtggtgggaagagtttagtgtgaaactggggtggaattgggtgtccacgtatgttcccttttgccttactatatgttctgtcagtttctttcaggaaaatcttcatcttacaacttgtagggctggtgttaacttacgacttcactaactgtgactttgagaagattaaagcagcctatctcagtactatttctaaagacctgattacatatatgagtgggaccaaaagtaccgagttcaacaacaccgtctcttgtagcaatcggccacattgccttactgaaatccagagcctaaccttcaatcccaccgccggctgcgcgtcgctcgccaaagaaatgttcgccatgaaaactaaggctgccttagctatctggtgcccaggctattcggaaactcagataaatgctactcaggcaatgaagaagaggagaaaaaggaaagtcacaaccaataaatgtctggaacaagtgtcacaattacaaggattgtggcgtcgcttcaatcgacctttactgaaacaacagtaaaccatctttattatggtcatatttcacagcaccaaaataaatcatctttattaagt

SEQ ID NO: 1655 - DNA, 1329 bp, Homo sapiens
ccgcagcccatcggcatggctcaagagtttgtgaactgcaaaatccagcctgggaaggtggttgtgttcatcaagcccacctgcccgtactgcaggagggcccaagagatcctcagtcaattgcccatcaaacaagggcttctggaatttgtcgatatcacagccaccaaccacactaacgagattcaagattatttgcaacagctcacgggagcaagaacggtgcctcgagtctttattggtaaagattgtataggcggatgcagtgatctagtctctttgcaacagagtggggaactgctgacgcggctaaagcagattggagctctgcagtaaccacagaacaggccccatgctgacgtccctcctcaagagctggatggcattgcaaatgatgacagcacttctggtggatgaatttgggggcacaaacagcttttttcctcttttggctcagtatttaaaagtggaccaacttgctcttaatcacagggccaagaaggttgacgggccatcttggttttcttctggatgtgctctttggttttcagaagactgtgacaagttctggcccaggattcgctcactgaccctcaattgtcctctttggcatgcgtttcttactgttctccatgtgtcggcatgtctctacctctaagccagtgtttttcaactatgtttatccagactccttctccacaatgatgaatccacagttggttatctgctactgcccattagctaaaatcattttgctgcttgactttatggagtttgtattatgaaatcagtgggtattttgaatgtgttctttctaactacatgcatctctccactcaactccaccccatcccatcccaccttgaaaatcactgctctgaaccagtgttctccaccttgtcctccacagatctcataggaaatgttcaacaattctgtgaaaggtcacaggacccaattggagaaatcatatgaaaagcatagttggtcttggtgtcatatggatcagaggcacaagtgcagaggctgtggtcatgcggaacactctgttatttaagatggctatccagataatcctgaacactgtgtatttattttatttagactaccagcaaagattaaagcatgaaatgtaaaacatctgataaaacttacagccccctacaccaagagtgtatctgtgaaagagctcctacactttgaaaacttaagaatcccttatcatgaagtttgcctgttctagaattgtaagattgttaatttccttcaatctctagtgacaacacttaatttcttttctaataaaaaaaacctatagatgattcagtg

SEQ ID NO: 1656 - DNA, 436 bp, Homo sapiens
atcttggcgaggctgcggtgtctgctgctactctccgagcttcgcaatgccgcccaaggacgacgagaagaaggacgctggaaagtcagccaagaaagacaaagacccagtgaacaaatccgggggcaaggccaaaaagaagaagtggtccaaaggcaaagttcgggacaagctcaataacttagtcttgtttgacaaagctacctatgacaaactctgtaaggaagttcccaactataaacttataaccccagctgtggtctctgagagactgaagattcgaggctccctggccagggcagcccttcaggcaaagcacagagctcaagtaatttacaccagaaataccaagggtggagatgctccagctgctggtgaagatgcatgaataggtccaaccagctgtacatttggaaaaataaaactttattaaatc

SEQ ID NO: 1657 - protein, 113 aa, Homo sapiens
MPPKDDEKKDAGKSAKKDKDPVNKSGGKAKKKKWSKGKVRDKLNNLVLFDKATYDKLCKEVPNYKLITPAVVSERLKIRGSLARAALQAKHRAQVIYTRNTKGGDAPAAGEDA

SEQ ID NO: 1658 - DNA, 1713 bp, Homo sapiens
gactgtacaatttgttcaaggaatttttgtagaaaaatacgatcctacgatagaagattcttatagaaagcaagttgaagtagatgcacaacagtgtatgcttgaaatcttggatactgcaggaacggagcaatttacagcaatgagggatttatacatgaaaaatggacaaggatttgcattagtttattccatcacagcacagtccacatttaacgatttacaagacctgagagaacagattcttcgagttaaagacactgatgatgttccaatgattcttgttggtaataagtgtgacttggaagatgaaagagttgtagggaaggaacaaggtcaaaatctagcaagacaatggaacaactgtgcattcttagaatcttctgcaaaatcaaaaataaatgttaatgagatcttttatgacctagtgcggcaaattaacagaaaaactccagtgcctgggaaggctcgcaaaaagtcatcatgtcagctgctttaatatactaaatgcattgtagctctgagccaggtctgaagaactgttgcccaattcaacagtgccagcattccaactttgttaaacctaccaacatcttaaatggactttcctgtggtggtaccctttaagaggcggatgaaagctactatatcagtttgcacattctaatcactttccagtatcacaagagagatttttacttatataatagtcctagagtttgcagctggtaaaaccagaggctacatccagtattactgctaagagacattcttcatccaccaatgttgtacatgtatgaaaatggtgtactgtatactttaacatgccccatactttgtattggagagtacaataatgtaaatcctaaaagcaccactattttagcataataaaagaaagtccaaagagctcctatatagactactccagataacttcgcttctttgatacttgtagcttattgtaattttttttaagaaattcaaggtcattattattgtacaaaataagcgctttgattaacacagctatatagtttttttaatttttaaaaaacctgtggagacggtgatcttgtctttaaaacatgatagtcctttcagtataatgtcttagattaaagacgttgcctttaatatctgttgggaaggaaatgtccagacttttcaaatctcttattatatgtttcctttttttgtttacatagggaacaatgtttatagtcgtgtgtacagtgggggtctacaacaagaagtgtatattttcaaacaattttttaatgatttaacaatttttgtaaatcattttcaggcttctgcagctgtagattctcactgtgaatcccttgcttgctcatgcataagtgtatttgcaataccaaatatacaggtttagtatttttgcctgttagtgattgtttcacatgtgtaacgttttggttgagatgttaaatggtggacgagtactgtggatgtgaatgtgggaagtaattttaatcatatgtaattggtcacaaggcctaatttgcagtaactattgctgttttatttaacaatgccttgttgctttgtatgcattaatgtttggatgtaaagattgtgtgtctatccaacagggagccacagtatttaaattgaccaacctaatgttacaactactttgaggtggccaaatgtaaactaaaagccttaattaaagtggtgcaattttgt

SEQ ID NO: 1659 - protein, 133 aa, Homo sapiens
MLEILDTAGTEQFTAMRDLYMKNGQGFALVYSITAQSTFNDLQDLREQILRVKDTDDVPMILVGNKCDLEDERVVGKEQGQNLARQWNNCAFLESSAKSKINVNEIFYDLVRQINRKTPVPGKARKKSSCQLL

SEQ ID NO: 1660 - DNA, 1725 bp, Homo sapiens
gctccttctaggatctctgcctggttcggcccgcctgcctccactcctgcctccaccatgtccattaggggacccagaagtcctacaaggtgtccacctctggcccccgggccttcagcagccactcctacacaagtgggcccggtgcccacatcagctcctcaagcttctcccaagtgggcagcagctgctttcggggtggcctgggcggcggctgtggtggggccagcggcatgggaggcatcaccgcggtcacagtcaaccagagcctgctgagcccccttgtcctggaggtggaccccgacatccaggctgtgtgcacccaggagaaggagcagatcaagaccctcaacaacaagtttgcctccttcatagacaaggtacggttcctggagcagcagaacaagatgctggagaccaagtggagcctcctgcagcagcagaagacggccgggagcaacatggacaacatgttcaagagctacatcaacaaccttaggcggcagctggagactctgggctaggagaaactgaagctggaggcggagcttggcaacatgtaggggctggtggaggacttcaagaacaagtatgaggatgagatcaataagcgtgcagagatggagaatgaatttgtcctcatcaagaaggattgtggatgaagcttacattaacaaggtagagctggagtctcgcctggaagggctgactgatgagatcaacttcctcaggcagctgtatgaagaggagatccgggagctgcagtcctggatctcagacacatctgtggtgctgtccatggacaacagccgctccctggacatgaacagcgtcatcgctgaggtcaaggcacagtacgaggagatcgccaaccgcagccaggccgaggctgagagcatgtaccagatcaaggatgaggagctgcagagtctggctgggaagcatggggataacctgcggtgcacaaagactaagatctccgagatgaaccggaacatcagccggctccaggctgagaatgagggcctcaaaggccagagggctttcctggaggccgccattgcagatgccgagcagtgtggagagctggccattaaggatgctaacgccaagttgtcgagctggaggccgccctgcagcgggccaagcaggacatggcgtggcagctgcgtgagtaccaggagctgatgaacgtcaggctggccctggacatcgagatcgccacctacaagaagctgctggagggcgaggagagccggctggagtctgggatgcagaacatgagtattcatacgaagaccaccagcggctatgcaagtggtctgagctcggcctgtgggggcctcacaagccccggcctcagctacggcctgggcgccagctccttcagccgcaccagctactccagggccgtggttgtgaagatcgagacacgtgatgggaagctggtgtccgagtcctctgacgtcctgcccaagtgaacagctgtggcagcccctcccagcctacccctcctgcgctgccccagagcctgggagggaggtcactatgcagggtagcactgggaacaggagacccacctgaggctcagccctaggcctcagtccacccgcgggggagtttactgcctggggaccccccctttgcccatgcctccagctacaaaacaattcagttgcttttttttttttttttggtccaaaataaaacctcagctagctctgc

SEQ ID NO: 1661 - protein, 198 aa, Homo sapiens [sequence omitted]

SEQ ID NO: 1662 - DNA, 620 bp, Homo sapiens
agtgggcagcagctgctttcggggtggcctgggcggcggctgtggtggggccagcggcatgggaggcatcaccgcggtcacagtcaaccagagcctgctgagcccccttgtcctggaggtggaccccgacatccaggctgtgtgcacccaggagaaggagcagatcaagaccctcaacaacaagtttgcctccttcatagacaaggtacggttcctggagcagcagaacaagatgctggagaccaagtggagcctcctgcagcagcagaagacggccgggagcaacatggacaacatgttcaagagctacatcaacaaccttaggcggcagctggagactctgggctaggagaaactgaagctggaggcggagcttggcaacatgtaggggctggtggctgggatgcagaacatgagtattcatacgaagaccaccagcggctatgcaagtggtctgagctcggcctgtgggggcctcacaagccccggcctcagctacggcctgggcgccagctccttcagccgcaccagctactccagggccgtggttgtgaagatcgagacacgtgatgggaagctggtgtccgagtcctctgacgtcctgcccaagtgaacagctg

SEQ ID NO: 1663 - DNA, 699 bp, Homo sapiens
ctgggcggcggctgtggtggggccagcggcatgggaggcatcaccgcggtcacagtcaaccagagcctgctgagcccccttgtcctggaggtggaccccgacatccaggctgtgtgcacccaggagaaggagcagatcaagaccctcaacaacaagtttgcctccttcatagacaaggtacggttcctggagcagcagaacaagatgctggagaccaagtggagcctcctgcagcagcagaagacggccgggagcaacatggacaacatgttcaagagctacatcaacaaccttaggcggcagctggagactctgggctaggagaaactgaagctggaggcggagcttggcaacatgtaggggctggtggaggacttcaagaacaagtatgaggatgagatcaataagcgtgcagagatggagaatgaatttgtcctcatcaagaaggattgtggatgaagcttacattaacaaggtagagctggagtctcgcctggaagggctgactgatgagatcaacttcctcaggcagctgtatgaagaggagatccgggagctgcagtcctggatctcagacacatcatcgctgaggtcaaggcacagtacgaggagatcgccaaccgcagccaggccgaggctgagagcatgtaccagatcaaggatgaggagctgcagagtctggctgggaagcatggggat

SEQ ID NO: 1664 - DNA, 2038 bp, Homo sapiens
gcggccgcggccgtgagcctgcccccaactcgccctcagccggctggccggcgcggccatggaggtctacatcccgtcctttcgctatgaagagagcgacctggagcggggatacacggtgtttaagatagaagtgctaatgaatggaagaaaacattttgttgaaaagagatacagcgaatttcatgctttgcacaaaaagcttaagaaatgtataaaaactccagaaatcccttctaaacatgttaggaactgggtccccaaagtcttggaacagcgacgacaaggcttggaaacatacttacaggctgtcattttagaaaatgaagaacttcccaaactgtttcttgatttcctaaatgtgcgacacttgccctctctaccaaaggcagaaagttgtggatcttttgatgaaacagagtctgaagagtcaagcaaactgtcccaccagcctgtgctgctgttcctcagggatccatatgtcttgcctgcagccagcgattttccaaatgtggttattgaaggagtcctccatgggatattttaccctcatctacagcccaggtagaaatcctacatggctaaaagaagcagaagcaagtttcgaagtcacagtcaaggaaatcaatacctaccaatttaacctaaacgctatgatatataacagctctagctagtggtaaagtgcacagtcccagcttaattcagggcagggacatttccattagaatggtgctcttaaaaatagaaactgaaccggggcggtggtcaggctaaggccaagtgtttaagaagtagagtgtagctgccagcgtagaaacccatgaaaaggaggccacaggagattcctgggagcactgggtgtagcaaaacaaagccactctctgcttcagtcgcaccatttgctaattgaaaatcatatcctgaatcatactgagactgatcaactttggtagcttttttgttcagatcttatgacacactactcttctcaccgtgagattttctcagccagtgatagtacattctgaaatgctggcaccaggagacggccacagacacacactgctaaatgtgaagatggaactaaactggaaattaaattatactgacaatattatggcatttttaagatcatggcattttaatttacattagagtggagttgcatcatactcaggggttagcttccaaggtcagtacataggtaaaatgggctattaggatgatccttgaaagccctttagaagggtgccatgttggaaacctgtacatcacaacaagtagcttttcctcctatgttggaaaaaaagactgtttctttgtttgaagaccaagtgaagttgttggtgtttgtttaggggccattttgttaaaaaaaaaaagcacataacttttaacactagaatcagcccgcaagatgcttgccccgctagtggcagatgtgaactgacaaggagtgaagcgcccacccagcggatggacagcacccacctgggtttactcaagggtgtgcattcattttaggtgggatcgccacaggatttcatgttattttccttacggcttccttttcactgacctcatttgttgagttaatgtaagttaaatgtgtctatgatataactccactgtacatcatcctttgagtagtaaaggataaaagcatatatactacctatatgtatgtgctgtatgtgggcatttcattgagatctaattaatagctagcctatttatggttattcgttttagtaagttctgtgggagcaaggtatttaaaatcaaaactaataactacatcatggtttttgattaggatctaaatattcaggttttaagcctgctgcaaacttttaaaatattatgatagattctgtactacatgtgggaaacaagcaagaactaaataatcaaatgttgtcaaccaaaagtaatagttgggtattggagatttttttaaaatgtttttatgttattagctatttggagttaaataaaaacagaacaaggaaaaaaaaaaaaaaaaaaaaaaaaa

SEQ ID NO: 1665 - protein, 169 aa, Homo sapiens
MEVYIPSFRYEESDLERGYTVFKIEVLMNGRKHFVEKRYSEFHALHKKLKKCIKTPEIPSKHVRNWVPKVLEQRRQGLETYLQAVILENEELPKLFLDFLNVRHLPSLPKAESCGSFDETESEESSKLSHQPVLLFLRDPYVLPAASDFPNVVIEGVLHGIFYPHLQPR

SEQ ID NO: 1666 - DNA, 2046 bp, Homo sapiens
agctcgcgcagtcgttcgggtgagcgaagatggcggccgagagggaacctcctccgctgggggacgggaagcccaccgactttgaggatctggaggacggagaggacctgttcaccagcactgtctccaccctagagtcaagtccatcatctccagaaccagctagtcttcctgcagaagatattagtgcaaactccaatggcccaaaacccacagaagttgtattagatgatgacagagaagatctttttgcagaagccacagaagaagtttctttggacagccctgaaagggaacctatcctatcctcggaaccttctcctgcagtcacacctgtcactcctactacactcattgctcctagaattgaatcaaagagtatgtctgctcccgtgatctttgatagatccagggaagagattgaagaagaagcaaatggagacatttttgacatagaaattggtgtatcagatccagaaaaagttggtgatggcatgaatgcctatatggcatatagagtaacaacaaagacatctctttccatgttcagtaagagtgaattttcagtgaaaagaagattcagcgactttcttggtttgcacagcaaattagcaagcaaatatttacatgttggttatattgtgccaccagctccagaaaagagtatagtagggatgaccaaggtcaaagtgggtaaagaagactcatcatccactgagtttgtagaaaaacggagagcagctcttgaaaggtatcttcaaagaacagtaaaacatccaactttactacaggatcctgatttaaggcagttcttggaaagttcagagctgcctagagcagttaatacacaggctctgagtggagcaggaatattgaggatggtgaacaaggctgccgacgctgtcaacaaaatgacaatcaagatgaatgaatcggatgcatggtttgaagaaaagcagcagcaatttgagaatctggatcagcaacttaggaaacttcatgtcagtgttgaagccttggtctgtcatagaaaagaactttcagccaacacagctgcctttgctaaaagtgctgccatgttaggtaattctgaggatcatactgctttatctagagctttgtctcagcttgcagaggttgaggagaagatagaccagttacatcaagaacaagcttttgctgacttttatatgttttcagaactacttagtgactacattcgtcttattgctgcagtgaaaggtgtgtttgaccatcgaatgaagtgctggcagaaatgggaagatgctcaaattactttgctcaaaaaacgtgaagctgaagcaaaaatgatggttgctaacaaaccagataaaatacagcaagctaaaaatgaaataagagagtgggaggcgaaagtgcaacaaggggaaagagattttgaacagatatctaaaacgattcgaaaagaagtgggaagatttgagaaagaacgagtgaaggattttaaaaccgttatcatcaagtacttagaatcactagttcaaacacaacaacagctgataaaatactgggaagcattcctacctgaagccaaagccattgcctagcaataagattgttgccgttaagaagaccttggatgttgttccagttatgctggattccacagtgaaatcatttaaaaccatctaaataaaccactatatattttatgaattacatgtggttttatatacacacacacacacacacacacacacacacacacactctgacattttattacaagctgcatgtcctgaccctctttgaattaagtggactgtggcatgacattctgcaatactttgctgaattgaacactattgtgtcttaaatacttgcactaaatagtgcactgcaagaccagaaaattttacaatattttttctttacaatatgttctgtagtatgtttaccctctttatgaagtgaattaccaatgctttgaataatgttcacttatacattcctgtacagaaattacgattttgtgattacagtaataaaatgatattccttgtg

SEQ ID NO: 1667 - protein, 519 aa, Homo sapiens
MAAEREPPPLGDGKPTDFEDLEDGEDLFTSTVSTLESSPSSPEPASLPAEDISANSNGPKPTEVVLDDDREDLFAEATEEVSLDSPEREPILSSEPSPAVTPVTPTTLIAPRIESKSMSAPVIFDRSREEIEEEANGDIFDIEIGVSDPEKVGDGMNAYMAYRVTTKTSLSMFSKSEFSVKRRFSDFLGLHSKLASKYLHVGYIVPPAPEKSIVGMTKVKVGKEDSSSTEFVEKRRAALERYLQRTVKHPTLLQDPDLRQFLESSELPRAVNTQALSGAGILRMVNKAADAVNKMTIKMNESDAWFEEKQQQFENLDQQLRKLHVSVEALVCHRKELSANTAAFAKSAAMLGNSEDHTALSRALSQLAEVEEKIDQLHQEQAFADFYMFSELLSDYIRLIAAVKGVFDHRMKCWQKWEDAQITLLKKREAEAKMMVANKPDKIQQAKNEIREWEAKVQQGERDFEQISKTIRKEVGRFEKERVKDFKTVIIKYLESLVQTQQQLIKYWEAFLPEAKAIA

SEQ ID NO: 1668 - DNA, 1779 bp, Homo sapiens
agctctctggaccttggagcaggcctgccgccttcatgtccactctcctcatcaatcagccccagtatgcgtggctgaaagagctggggctccgcgaggaaaacgagggcgtgtataatggaagctggggaggccggggagaggttattacgacctattgccctgctaacaacgagccaatagcaagagtccgacaggccagtgtggcagactatgaagaaactgtaaagaaagcaagagaagcatggaaaatctgggcagatattcctgctccaaaacgaggagaaatagtaagacagattggcgatgccttgcgggagaagatccaagtactaggaagcttggtgtctttggagatggggaaaatcttagtggaaggtgtgggtgaagttcaggagtatgtggatatctgtgactatgctgttggtttatcaaggatgattggaggacctatcttgccttctgaaagatctggccatgcactgattgagcagtggaatcccgtaggcctggttggaatcatcacggcattcaatttccctgtggcagtgtatggttggaacaacgccatcgccatgatctgtggaaatgtctgcctctggaaaggagctccaaccacttccctcattagtgtggctgtcacaaagataatagccaaggttctggaggacaacaagctgcctggtgcaatttgttccttgacttgtggtggagcagatattggcacagcaatggccaaagatgaacgagtgaacctgctgtccttcactgggagcactcaggtgggaaaacaggtgggcctgatggtgcaggagaggtttgggagaagtctgttggaacttggaggaaacaatgccattattgcctttgaagatgcagacctcagcttagttgttccatcagctctcttcgctgctgtgggaacagctggccagaggtgtaccactgcgaggcgactgtttatacatgaaagcatccatgatgaggttgtaaacagacttaaaaaggcctatgcacagatccgagttgggaacccatgggaccctaatgttctctatgggccactccacaccaagcaggcagtgagcatgtttcttggagcagtggaagaagcaaagaaagaaggtggcacagtggtctatgggggcaaggttatggatcgccctggaaattatgtagaaccgacaattgtgacaggtcttggccacgatgcgtccattgcacacacagagacttttgctccgattctctatgtctttaaattcaagaatgaagaagaggtctttgcatggaataatgaagtaaaacagggactttcaagtagcatctttaccaaagatctgggcagaatctttcgctggcttggacctaaaggatcagactgtggcattgtaaatgtcaacattccaacaagtggggctgagattggaggtgcctttggaggagaaaagcacactggtggtggcagggagtctggcagtgatgcctggaaacagtacatgagaaggtctacttgtactatcaactacagtaaagaccttcctctggcccaaggaatcaagtttcagtaaaggtgttttagatgaacatcccttaatttgaggtgttccagcagctgtttttggagaagacaaagaaaattaaagttttccctgaataaatgcattattatgactgtgacagtgactaatccccctatgaccccaaagccctgattaaatcaagagattccttttttaaaaatcaaaataaaattgttacaacatagccatagttact

SEQ ID NO: 1669 - DNA, 591 bp, Homo sapiens
actggctgctctgaaaagccatctttgcattgttcctcgtccgcctccttgctcgcggcaccgcctccgccacgcgcctcctccgccgccgcggactccggcagctttatcgccagagtccctgaactctcgctttctttttaatcgcctgcatcggatcaccggcgtgccccaccatgtcagacgcagccgtagacaccagctccgaaatcaccaccaaggacttacaggagaagaaggaagttgtggaagaggcagaaaatggaagagacgcccctgctaacgggaatgctaatgaggaaaatggggagcaggaggctgacaatgaggtagatgaagaagaggaagaaggtggggaggaagaggaggaggaagaaggtgatggtgaggaagaggatggagatgaagatgaggaagctgagacagctacgggcaagcgggcagctgaagatgatgaggatgacacgcgctctccaccacccaacccaaaccatgagaatttgcaacaggggaggaaaaaagaaccaaaacttccaaggccctgctttttttcttaaaagtactttaaaaaggaaatttgtttgtattttt

SEQ ID NO: 1670 - DNA, 1932 bp, Homo sapiens
gggggaacatggcggctgcggagccggcggtccttgcgctccccaacagcggcgccgggggcgcgggggcgccgtcgggcacagtcccggtgctcttctgtttctcagtcttcgcgcgaccctcgtcggtgccacacggggcgggctacgagctgctcatccagaagttcctcagcctgtacggcgaccagatcgacatgcaccgcaaattcgtggtgcagctgttcgccgaggagtggggccagtacgtggacttgcccaagggcttcgcggtgagcgagcgctgcaaggtgcgcctcgtgccgttgcagatccagctcactaccctgggaaatcttacaccttcaagcactgtgtttttctgctgtgatatgcaggaaaggttcagaccagccatcaagtattttggggatattattagcgtgggacagagattgttgcaaggggcccggattttaggaattcctgttattgtaacagaacaataccctaaaggtcttgggagcacggttcaagaaattgatttaacaggtgtaaaactggtacttccaaagaccaagttttcaatggtattaccagaagtagaagcggcattagcagagattcccggagtcaggagtgttgtattatttggagtagaaactcatgtgtgcatccaacaaactgccctggagctagttggccgaggagtcgaggttcacattgttgctgatgccacctcatcaagaagcatgatggacaggatgtttgccctcgagcgtctcgctcgaaccgggatcatagtgaccacgagtgaggctgttctgcttcagctggtagctgataaggaccatccaaaattcaaggaaattcagaatctaattaaggcgagtgctccagagtcgggtctgctttccaaagtataggacatttgaagaactggtatgctactcactggtgaaggacagtcaggtgaaggactgtaagcccacacaagctcttcttatctctactagaattaaaatgttaagtcaaaaacggctccttttttgcgcctcctagtgaaacttaaccagctagaccatttgagtaccagcatttagttacaaacgtcaaaggcttccggtgctgcttaccttccttttttgttaatgtgcttttatttattaaaaaaaattacaatgaagatgcctgttttgtctctactgtgtactctgatcgtatctttccaaagtgcagactcttgtgaagttttcttaaattgttcactttaaagaaaatgacgtaccaacaatgatttggcttttatattactgtaagatgttataatgttaatgtggatgtagtgcttttactttacagattgattggaataagattattgcatatgaatttacccacaggactctgaatcatgttacccactcccctcacaatgttgtccacttagtgagttgcattgatctatccgtaccaaatgatgttgaataattacatatctttcttgactatactgatttcttattttggtcactattactaaatctctgttaatattctctcttttaactgaaaagggatgggatagaagggtttgcaatgccatattattggtggagggctgttttaacatctttgaagtatggcttgctgaatatctttaccaacatcttgaatatatattctagtgtccacaagatttagcaaaaagataaagcttgggtggaatatcattttaaaatgttcatgttctgttctatattttcttcacctactctccaaatattgtaatgcaaaaagtctcagtaatgatttggtagtattaattttgtggtcattgtttctcttcgataaatttattttcattaaatacttgttagagggttttgaaatgtttttcaaatatgtgaaatgtgaaactgctgtcttttatattaaagtaattaaagaaaa

SEQ ID NO: 1671 - DNA, 2691 bp, Homo sapiens
gcttgcccgtcggtcgctagctcgctcggtgcgcgtcgtcccgctccatggcgctcttcgtgcggctgctggctctcgccctggctctggccctgggccccgccgcgaccctggcgggtcccgccaagtcgccctaccagctggtgctgcagcacagcaggctccggggccgccagcacggccccaacgtgtgtgctgtgcagaaggttattggcactaataggaagtacttcaccaactgcaagcagtggtaccaaaggaaaatctgtggcaaatcaacagtcatcagctacgagtgctgtcctggatatgaaaaggtccctggggagaagggctgtccagcagccctaccactctcaaacctttacgagaccctgggagtcgttggatccaccaccactcagctgtacacggaccgcacggagaagctgaggcctgagatggaggggcccggcagcttcaccatcttcgcccctagcaacgaggcctgggcctccttgccagctgaagtgctggactccctggtcagcaatgtcaacattgagctgctcaatgccctccgctaccatatggtgggcaggcgagtcctgactgatgagctgaaacacggcatgaccctcacctctatgtaccagaattccaacatccagatccaccactatcctaatgggattgtaactgtgaactgtgcccggctcctgaaagccgaccaccatgcaaccaacggggtggtgcacctcatcgataaggtcatctccaccatcaccaacaacatccagcagatcattgagatcgaggacacctttgagacccttcgggctgctgtggctgcatcagggctcaacacgatgcttgaaggtaacggccagtacacgcttttggccccgaccaatgaggccttcgagaagatccctagtgagactttgaaccgtatcctgggcgacccagaagccctgagagacctgctgaacaaccacatcttgaagtcagctatgtgtgctgaagccatcgttgcggggctgtctgtagagaccctggagggcacgacactggaggtgggctgcagcggggacatgctcactatcaacgggaaggcgatcatctccaataaagacatcctagccaccaacggggtgatccactacattgatgagctactcatcccagactcagccaagacactatttgaattggctgcagagtctgatgtgtccacagccattgaccttttcagacaagccggcctcggcaatcatctctctggaagtgagcggttgaccctcctggctcccctgaattctgtattcaaagatggaacccctccaattgatgcccatacaaggaatttgcttcggaaccacataattaaagaccagctggcctctaagtatctgtaccatggacagaccctggaaactctgggcggcaaaaaactgagagtttttgtttatcgtaatagcctctgcattgagaacagctgcatcgcggcccacgacaagagggggaggtacgggaccctgttcacgatggaccgggtgctgacccccccaatggggactgtcatggatgtcctgaagggagacaatcgctttagcatgctggtagctgccatccagtctgcaggactgacggagaccctcaaccgggaaggagtctacacagtctttgctcccacaaatgaagccttccgagccctgccaccaagagaacggagcagactcttgggagatgccaaggaacttgccaacatcctgaaataccacattggtgatgaaatcctggttagcggaggcatcggggccctggtgcggctaaagtctctccaaggtgacaagctggaagtcagcttgaaaaacaatgtggtgagtgtcaacaaggagcctgttgccgagcctgacatcatggccacaaatggcgtggtccatgtcatcaccaatgttctgcagcctccagccaacagacctcaggaaagaggggatgaacttgcagactctgcgcttgagatcttcaaacaagcatcagcgttttccagggcttcccagaggtctgtgcgactagcccctgtctatcaaaagttattagagaggatgaagcattagcttgaagcactacaggaggaatgcaccacggcagctctccgccaatttctctcagatttccacagagactgtttgaatgttttcaaaaccaagtatcacactttaatgtacatgggccgcaccataatgagatgtgagccttgtgcatgtgggggaggagggagagagatgtactttttaaatcatgttccccctaaacatggctgttaacccactgcatgcagaaacttggatgtcactgcctgacattcacttccagagaggacctatcccaaatgtggaattgactgcctatgccaagtccctggaaaaggagcttcagtattgtggggctcataaaacatgaatcaagcaatccagcctcatgggaagtcctggcacagtttttgtaaagcccttgcacagctggagaaatggcatcattataagctatgagttgaaatgttctgtcaaatgtgtctcacatctacacgtggcttggaggcttttatggggccctgtccaggtagaaaagaaatggtatgtagagcttagatttccctattgtgacagagccatggtgtgtttgtaataataaaaccaaagaaacata

SEQ ID NO: 1672 - protein, 683 aa, Homo sapiens
MALFVRLLALALALALGPAATLAGPAKSPYQLVLQHSRLRGRQHGPNVCAVQKVIGTNRKYFTNCKQWYQRKICGKSTVISYECCPGYEKVPGEKGCPAALPLSNLYETLGVVGSTTTQLYTDRTEKLRPEMEGPGSFTIFAPSNEAWASLPAEVLDSLVSNVNIELLNALRYHMVGRRVLTDELKHGMTLTSMYQNSNIQIHHYPNGIVTVNCARLLKADHHATNGVVHLIDKVISTITNNIQQIIEIEDTFETLRAAVAASGLNTMLEGNGQYTLLAPTNEAFEKIPSETLNRILGDPEALRDLLNNHILKSAMCAEAIVAGLSVETLEGTTLEVGCSGDMLTINGKAIISNKDILATNGVIHYIDELLIPDSAKTLFELAAESDVSTAIDLFRQAGLGNHLSGSERLTLLAPLNSVFKDGTPPIDAHTRNLLRNHIIKDQLASKYLYHGQTLETLGGKKLRVFVYRNSLCIENSCIAAHDKRGRYGTLFTMDRVLTPPMGTVMDVLKGDNRFSMLVAAIQSAGLTETLNREGVYTVFAPTNEAFRALPPRERSRLLGDAKELANILKYHIGDEILVSGGIGALVRLKSLQGDKLEVSLKNNVVSVNKEPVAEPDIMATNGVVHVITNVLQPPANRPQERGDELADSALEIFKQASAFSRASQRSVRLAPVYQKLLERMKH

SEQ ID NO: 1673 - DNA, 2256 bp, Homo sapiens
tcagagtccggctcaggctccggctgcggctccagcccgcgatgccccattccgtgaccctgcgcgggccttcgccctggggcttccgcctggtgggcggccgggacttcagcgcgcccctcaccatctcacgggtccatgctggcagcaaggctgcattggctgccctgtgcccaggagacctgatccaggccatcaatggtgagagcacagagctcatgacacacctggaggcacagaaccgcatcaagggctgccacgatcacctcacactgtctgtgagcaggcctgagggcaggagctggcccagtgcccctgatgacagcaaggctcaggcacacaggatccacatcgatcctgagatccaggacggcagcccaacaaccagcaggcggccctcaggcaccgggactgggccagaagatggcagaccaagcctgggatctccatatggacaaccccctcgctttccagtccctcacaatggcagcagcgaggccaccctgccagcccagatgagcaccctgcatgtgtctccaccccccagcgctgacccagccagaggcctcccgcggagccgggactgcagagtcgacctgggctccgaggtgtacaggatgctgcgggagccagccgagcccgtggccgcggagcccaagcagtcaggctccttccgctacttgcagggcatgctagaggccggcgagggcggggattggcccgggcctggcggcccccggaacctcaagcccacggccagcaagctgggcgctccgctgagcggcctgcaggggctgcccgagtgcacgcgctgcggccacggcatcgtgggcaccatcgtcaaggcacgggacaagctctaccatcccgagtgcttcatgtgcagtgactgcggcctgaacctcaagcagcgtggttacttctttctggacgagcggctctactgtgagagccacgccaaggcgcgcgtgaagccgcccgagggctacgacgtggtggcggtgtaccccaatgccaaggtggaactcgtctgagctgggaccctgctcccacgcctgcttcttaaggtccctgctcggccggtgtaaatatgtttcaccctgtccctctaataaagctcctctgctccaccttgaacctgtcacctggcctgccaccctcctgcgcaggccatgcatggctcccgagtacagtagtatctgcttaggtgccaggcatgtcctaggctctgggtgcagtagtgagcaggacgggtaccatgctgccctgaaggggccacagcctgggtggaaggcagacctgaatcacaacgggccagctctagtaatacgaaggtgaggtctgggatgctgcgtgcggcgcgacgacaggaggtatgacctgggtggggtcagggaaagtcttagctgagaactaagagatgagggaggcacaaactctgcacgggggaactgtgtgtgcaaaggtgagctgggggcgagaaaggcctctgtggccgtcatcggcactagcgggttgggggtggtggtggggtgctggcagcctcaggagcgatcgctcccctggagagggtgattgagtgtggagatcaccggggccgccgcgggccgtctgcacttctgttccaggtttttctggcattttctgttccaggtttcttccacccacgagcactttattctcctccgagacccccttttcttccccttcctctctcccaccagggggcgcgcttaaatttccagacagagaccagaaggaaggtttagaaagaaaagaacacttgcccagggcagctttgccctccaagaggctccctcctgtctctaagtcaattccacccctcctcgaagtcccggcttccacccctctcctcagagtcccggcgtttacctcgtggtgtgtttgccttgggcctttcatgccccggctgcacacatcgtctgtgaattgtggctgttcactcccgaggatgtgtcctagactccgggtcgcgtggatctaccctctagtttacttgctcgggagaagaaactgactcgttttatttagtgcctatttagcgagcccagagtaacgtacatttgtgctgttttcaattttgtgctatcgcaaatcacaaaaaaactgttatcaattcacattcatcatcagcacgagacccatttccttgtgctcctgccagctcaggatattatgtttcttttttcatttttgccagtctgttaagtaaaatgtcatatgcgtttgttttaa

SEQ ID NO: 1674 - protein, 330 aa, Homo sapiens
MPHSVTLRGPSPWGFRLVGGRDFSAPLTISRVHAGSKAALAALCPGDLIQAINGESTELMTHLEAQNRIKGCHDHLTLSVSRPEGRSWPSAPDDSKAQAHRIHIDPEIQDGSPTTSRRPSGTGTGPEDGRPSLGSPYGQPPRFPVPHNGSSEATLPAQMSTLHVSPPPSADPARGLPRSRDCRVDLGSEVYRMLREPAEPVAAEPKQSGSFRYLQGMLEAGEGGDWPGPGGPRNLKPTASKLGAPLSGLQGLPECTRCGHGIVGTIVKARDKLYHPECFMCSDCGLNLKQRGYFFLDERLYCESHAKARVKPPEGYDVVAVYPNAKVELV

SEQ ID NO: 1675 - DNA, 2038 bp, Homo sapiens
cgagcccccgccgaaccgaggccacccggagccgtgcccagtccacgccggccgtgcccggcggccttaagaacccggcaacctctgccttcttccctcttccactcggagtcgcgctccgcgcgccctcactgcagcccctgcgtcgccgggaccctcgcgcgcgaccgccgaatcgctcctgcagcagagccaacatgcccatcactcggatgcgcatgagaccctggctagagatgcagattaattccaaccaaatcccggggctcatctggattaataaagaggagatgatcttccagatcccatggaagcatgctgccaagcatggctgggacatcaacaaggatgcctgtttgttccggagctgggccattcacacaggccgatacaaagcaggggaaaaggagccagatcccaagacgtggaaggccaactttcgctgtgccatgaactccctgccagatatcgaggaggtgaaagaccagagcaggaacaagggcagctcagctgtgcgagtgtaccggatgcttccacctctcaccaagaaccagagaaaagaaagaaagtcgaagtccagccgagatgctaagagcaaggccaagaggaagtcatgtggggattccagccctgataccttctctgatggactcagcagctccactctgcctgatgaccacagcagctacacagttccaggctacatgcaggacttggaggtggagcaggccctgactccagcactgtcgccatgtgctgtcagcagcactctccccgactggcacatcccagtggaagttgtgccggacagcaccagtgatctgtacaacttccaggtgtcacccatgccctccacctctgaagctacaacagatgaggatgaggaagggaaattacctgaggacatcatgaagctcttggagcagtcggagtggcagccaacaaacgtggatgggaaggggtacctactcaatgaacctggagtccagcccacctctgtctatggagactttagctgtaaggaggagccagaaattgacagcccagggggggatattgggctgagtctacagcgtgtcttcacagatctgaagaacatggatgccacctggctggacagcctgctgaccccagtccggttgccctccatccaggccattccctgtgcaccgtagcagggcccctgggcccctcttattcctctaggcaagcaggacctggcatcatggtggatatggtgcagagaagctggacttctgtgggcccctcaacagccaagtgtgaccccactgccaagtggggatggggcctccctccttgggtcattgacctctcagggcctggcaggccagtgtctgggtttttcttgtggtgtaaagctggccctgcctcctgggaagatgaggttctgagaccagtgtatcaggtcagggacttggacaggagtcagtgtctggctttttcctctgagcccagctgcctggagagggtctcgctgtcactggctggctcctaggggaacagaccagtgaccccagaaaagcataacaccaatcccagggctggctctgcactaagagaaaattgcactaaatgaatctcgttcccaaagaactacccccttttcagctgagccctggggactgttccaaagccagtgaaatgtgaaggaaagtggggtccttcggggcgatgctccctcagcctcagaggagctctaccctgctccctgctttggctgaggggcttgggaaaaaaacttggcactttttcgtgtggatcttgccacatttctgatcagaggtgtacactaacatttcccccgagctcttggcctttgcatttatttatacagtgccttgctcggcgcccaccaccccctcaagccccagcagccctcaacaggcccagggagggaagtgtgagcgccttggtatgacttaaaattggaaatgtcatctaaccattaagtcatgtgtgaacacataaggacgtgtgtaaatatgtacatttgtctttttataaaaagtaaattgtt

SEQ ID NO: 1676 - protein, 325 aa, Homo sapiens
MPITRMRMRPWLEMQINSNQIPGLIWINKEEMIFQIPWKHAAKHGWDINKDACLFRSWAIHTGRYKAGEKEPDPKTWKANFRCAMNSLPDIEEVKDQSRNKGSSAVRVYRMLPPLTKNQRKERKSKSSRDAKSKAKRKSCGDSSPDTFSDGLSSSTLPDDHSSYTVPGYMQDLEVEQALTPALSPCAVSSTLPDWHIPVEVVPDSTSDLYNFQVSPMPSTSEATTDEDEEGKLPEDIMKLLEQSEWQPTNVDGKGYLLNEPGVQPTSVYGDFSCKEEPEIDSPGGDIGLSLQRVFTDLKNMDATWLDSLLTPVRLPSIQAIPCAP

SEQ ID NO: 1677 - DNA, 1806 bp, Homo sapiens
gccgctcgctcggctccgctccctggctcggctccctgcctccgcgtcgcagcccccgccgtagccgcctccgagcccgccgccacatcctctgagaagatggctgtgccacccacgtatgccgatcttggcaaatctgccagggatgtcttcaccaagggctatggatttggcttaataaagcttgatttgaaaacaaaatctgagaatggattggaatttacaagctcaggctcagccaacactgagaccaccaaagtgacgggcagtctggaaaccaagtacagatggactgagtacggcctgacgtttacagagaaatggaataccgacaatacactaggcaccgagattactgtggaagatcagcttgcacgtggactgaagctgaccttcgattcatccttctcacctaacactgggaaaaaaaatgctaaaatcaagacagggtacaagcgggagcacattaacctgggctgcgacatggatttcgacattgctgggccttccatccggggtgctctggtgctaggttacgagggctggctggccggctaccagatgaattttgagactgcaaaatcccgagtgacccagagcaactttgcagttggctacaagactgatgaattccagcttcacactaatgtgaatgacgggacagagtttggcggctccatttaccagaaagtgaacaagaagttggagaccgctgtcaatcttgcctggacagcaggaaacagtaacacgcgcttcggaatagcagccaagtatcagattgaccctgacgcctgcttctcggctaaagtgaacaactccagcctgataggtttaggatacactcagactctaaagccaggtattaaactgacactgtcagctcttctggatggcaagaacgtcaatgctggtggccacaagcttggtctaggactggaatttcaagcataaatgaatactgtacaattgtttaattttaaactattttgcagcatagctaccttcagaatttagtgtatcttttaatgttgtatgtctgggatgcaagtattgctaaatatgttagccctccaggttaaagttgattcagctttaagatgttacccttccagaggtacagaagaaacctatttccaaaaaaggtcctttcagtggtagactcggggagaacttggtggcccctttgagatgccaggtttcttttttatctagaaatggctgcaagtggaagcggataatatgtaggcactttgtaaattcatattgagtaaatgaatgaaattgtgatttcctgagaatcgaaccttggttccctaaccctaattgatgagaggctcgctgcttgatggtgtgtacaaactcacctgaatgggacttttttagacagatcttcatgacctgttcccaccccagttcatcatcatctcttttacaccaaaaggtctgcagggtgtggtaactgtttcttttgtgccattttggggtggagaaggtggatgtgatgaagccaataattcaggacttattccttcttgtgttgtgtttttttttggcccttgcaccagagtatgaaatagcttccaggagctccagctataagcttggaagtgtctgtgtgattgtaatcacatggtgacaacactcagaatctaaattggacttctgttgtattctcaccactcaatttgttttttagcagtttaatgggtacattttagagtcttccattttgttggaattagatcctccccttcaaatgctgtaattaacaacacttaaaaaacttgaataaaatattgaaacctc

SEQ ID NO: 1678 - protein, 283 aa, Homo sapiens
MAVPPTYADLGKSARDVFTKGYGFGLIKLDLKTKSENGLEFTSSGSANTETTKVTGSLETKYRWTEYGLTFTEKWNTDNTLGTEITVEDQLARGLKLTFDSSFSPNTGKKNAKIKTGYKREHINLGCDMDFDIAGPSIRGALVLGYEGWLAGYQMNFETAKSRVTQSNFAVGYKTDEFQLHTNVNDGTEFGGSIYQKVNKKLETAVNLAWTAGNSNTRFGIAAKYQIDPDACFSAKVNNSSLIGLGYTQTLKPGIKLTLSALLDGKNVNAGGHKLGLGLEFQA

SEQ ID NO: 1679 - DNA, 595 bp, Homo sapiens
ctcttccttcgctaacgcctcccggctctcgtcagcctcccgccggccgtctccttaacaccgaacaccatgccttcaattaagttgcagagttctgatggagagatatttgaagttgatgtggaaattgccaaacaatctgtgactattaagaccatgttggaagatttgggaatggatgatgaaggagatgatgacccagttcctctaccaaatgtgaatgcagcaatattaaaaaaggtcattcagtggtgcacccaccacaaggatgaccctcctcctcctgaagatgatgagaacaaagaaaagcgaacagatgatatccctgtttgggaccaagaattcctgaaagttgaccaaggaacactttttgaactcattctggctgcaaactacttagacatcaaaggtttgcttgatgttacatgcaagactgttgccaatatgatcaaggggaaaactcctgaggagattcgcaagaccttcaatatcaaaaatgactttactgaagaggaggaagcccaggtacgcaaagagaaccagtggtgtgaagagaagtgaaatgttgtgcctgacactgtaacactgtaaggat

SEQ ID NO: 1680 - protein, 162 aa, Homo sapiens [sequence omitted]

SEQ ID NO: 1681 - DNA, 3740 bp, Homo sapiens
cgctgggatggccgccacagctgtaggtgctgctagtgtttagcgctggtctttgccgggcgttgagggcagctcagcctccttgtttgtccggttcgcctgtgcgtggtactcaagggcaccagtattcccgcggtcggcagcatgggtcgggagtcacgccactatcgaaaacgatcggcatcccggggtcgctctggaagtcggtctagaagtcgctcaccctcagacaaaagaagtaaacgtggagatgacagacggtctagaagtagagatagagataggaggagagagaggtctcgtagcagggataaaagaagatctcggtcaagggacaggaagcgtctgagacgttccagaagtagagagagagacagaagccgagagcgaagaagatctcgaagtagagacaggagacgctcaaggagtagaagccggggccggcgatcccgatcctccagtcctggaaataaaagcaagaaaactgagaatagatctaggtccaaagagaaaactgatggtggggaaagttctaaagagaagaaaaaagacaaagatgacaaggaggatgaaaaagaaaaagatgctggcaactttgaccagaataagctggaagaagaaatgagaaagcgaaaagaaagagtagaaaaatggcgagaagagcaacgtaaaaaggctatggaaaacataggagaactgaaaaaggaaatcgaagagatgaaacaagggaaaaagtggagtttagaggacgatgatgatgacgaagatgatcctgcagaagctgaaaaggagggaaatgaaatggagggtgaggagttagatccattagatgcttacatggaagaagtgaaagaggaagtaaaaaaatttaacatgagaagtgtaaaaggtggtgggggaaatgaaaagaagtctgggccaacggtcacaaaagttgtcactgttgtgacaaccaaaaaagcagttgtggattctgataagaagaaaggtgagctgatggagaatgaccaggatgccatggagtattcttcagaggaggaagaagttgatcttcagacagcccttacagggtatcaaacaaaacagcgaaagcttctagaaccagttgatcatggaaaaattgagtatgagccatttaggaaaaacttctatgttgaagttccagaactagcaaaaatgtctcaagaagaggtaaatgtgtttcgattggaaatggagggcattacagttaaaggaaaaggttgccccaaaccaattaaatcctgggtccagtgtggaatttccatgaagatcttaaattccctcaagaagcatggctatgaaaagcccacgcccatccaaacccaagctattcctgctataatgtctggacgagatttgattggcattgccaaaacaggaagtggaaagaccattgcttttctgttgcccatgtttagacacatcatggatcagaggtcattagaggaaggagaggggccaatagctgtcatcatgactccaactcgagaactggctttacagattactaaagagtgtaagaagttttccaagactttgggacttagagtggtctgtgtttacggaggaacaggaatcagtgagcagattgctgagctgaaaagaggtgctgaaattattgtttgcacacctggtcgaatgattgacatgttagccgctaacagtggtcgggtcacaaatcttcgaagagtgacatatgttgttttagatgaagcagacagaatgtttgacatgggttttgaaccccaggtcatgcgcatcgtggataatgttcgtcctgatcgacagacggttatgttttcagctactttccccagagctatggaggctttggctcgcaggatcctcagtaaacctattgaagtacaagttggaggcaggagtgtggtttgctcagatgtggagcaacaagtgattgtgattgaagaagaaaagaaattcttgaagttacttgagcttctaggccattatcaagagtcaggatctgtcattatatttgtggataagcaggaacatgctgatggtcttcttaaggatttaatgagagcatcttatccttgcatgtctcttcatggaggcattgatcaatatgacagagatagcatcataaatgactttaagaatgggacctgcaaacttcttgtggctacctctgttgctgcccgaggtctagatgtgaaacatctgattcttgtagtaaattatagctgccccaaccattatgaggattatgtacacagagcagggcggactggaagagcaggaaacaagggttatgcttatacttttatcacagaggatcaagctcgctatgctggtgacataattaaagctcttgaattgtcagggactgcagtacctcctgatttagagaaactgtggagtgatttcaaagatcagcagaaagctgaggggaaaataattaaaaagagtagtgggttctctggtaagggattcaagtttgatgaaacagaacaagctttggctaatgagaggaagaagttacaaaaagcagctcttggtctacaagattcagatgatgaggatgctgcagttgatattgatgagcaaattgaaagcatgtttaattcaaagaagagagtaaaggatatggctgctcctggaacatcaagtgttcctgctccaactgcaggaaatgctgagaaattagaaattgctaagagattggctcttagaatcaatgcccagaagaatttgggcatcgagtctcaggtagatgtgatgcagcaggccaccaatgcaattcttaggggtggcaccattctggctcccactgtttctgcaaaaaccattgcagaacaacttgctgaaaagatcaatgccaagctcaattatgtgccgttagagaaacaagaagaagagagacaggatggtggacagaatgaatcttttaagagatatgaagaagaattagagatcaatgacttcccacagactgctaggtggaaagttacctctaaggaagctctgcagagaatcagtgaatactctgaagccgcaattacaatcagaggaacctacttccctcctggcaaagaacccaaggaaggcgagcggaagatttacttggcaattgaaagtgccaatgaactggctgtgcagaaagcaaaggcagaaatcaccaggctcataaaagaagagctgatccggctgcaaaattcataccaaccaacaaataaaggaagatacaaagtcttatagacatccggaaaaaagatttttacctgtgctggtctatgatgtatgtggcagttgctgtctgcagtttacaatgtattgtaaatgaagattttttaaattctatcttgctgattttttttaaatataagaaactggtacttggtaaagaaatctgtccgtaagtacccccacaatcagtcaaactatatttaaagccagcctgttttcagagtatgatgtcctttaatgtaaactcaaatatcaatattttaaatgtccggataatattctagaggtttaaaaaatggaaatatttgaactttctattgaagacaataaagtacacaagtcgttaaggggctattcactttatcctgtactttcaatgaaattgtgatcatttcctaagaaaaggtaaaattcactatcatattttgtgtccccaccttgatgttacatgactctggaacaatatgaactggatttaagaatgttataatagaagtcttacaaaatgg

SEQ ID NO: 1682 - protein, 1032 aa, Homo sapiens
MGRESRHYRKRSASRGRSGSRSRSRSPSDKRSKRGDDRRSRSRDRDRRRERSRSRDKRRSRSRDRKRLRRSRSRERDRSRERRRSRSRDRRRSRSRSRGRRSRSSSPGNKSKKTENRSRSKEKTDGGESSKEKKKDKDDKEDEKEKDAGNFDQNKLEEEMRKRKERVEKWREEQRKKAMENIGELKKEIEEMKQGKKWSLEDDDDDEDDPAEAEKEGNEMEGEELDPLDAYMEEVKEEVKKFNMRSVKGGGGNEKKSGPTVTKVVTVVTTKKAVVDSDKKKGELMENDQDAMEYSSEEEEVDLQTALTGYQTKQRKLLEPVDHGKIEYEPFRKNFYVEVPELAKMSQEEVNVFRLEMEGITVKGKGCPKPIKSWVQCGISMKILNSLKKHGYEKPTPIQTQAIPAIMSGRDLIGIAKTGSGKTIAFLLPMFRHIMDQRSLEEGEGPIAVIMTPTRELALQITKECKKFSKTLGLRVVCVYGGTGISEQIAELKRGAEIIVCTPGRMIDMLAANSGRVTNLRRVTYVVLDEADRMFDMGFEPQVMRIVDNVRPDRQTVMFSATFPRAMEALARRILSKPIEVQVGGRSVVCSDVEQQVIVIEEEKKFLKLLELLGHYQESGSVIIFVDKQEHADGLLKDLMRASYPCMSLHGGIDQYDRDSIINDFKNGTCKLLVATSVAARGLDVKHLILVVNYSCPNHYEDYVHRAGRTGRAGNKGYAYTFITEDQARYAGDIIKALELSGTAVPPDLEKLWSDFKDQQKAEGKIIKKSSGFSGKGFKFDETEQALANERKKLQKAALGLQDSDDEDAAVDIDEQIESMFNSKKRVKDMAAPGTSSVPAPTAGNAEKLEIAKRLALRINAQKNLGIESQVDVMQQATNAILRGGTILAPTVSAKTIAEQLAEKINAKLNYVPLEKQEEERQDGGQNESFKRYEEELEINDFPQTARWKVTSKEALQRISEYSEAAITIRGTYFPPGKEPKEGERKIYLAIESANELAVQKAKAEITRLIKEELIRLQNSYQPTNKGRYKVL

SEQ ID NO: 1683 - DNA, 4807 bp, Homo sapiens
gctgcggctccgctctcgtcgcaacgagatctttcgagatcttctccgcccccgctaccggcgcctcctctgcggccactgagccggagccggcctgagcagcgctctcggttgcagtacccactggaaggacttaggcgctcgcgtggacaccgcaagcccctcagtagcctcggcccaagaggcctgctttccactcgctagccccgccgggggtccgtgtcctgtctcggtggccggacccgggcccgagcccgagcagtagccggcgccatgtcggtggtgggcatagacctgggcttccagagctgctacgtcgctgtggcccgcgccggcggcatcgagactatcgctaatgagtatagcgaccgctgcacgccggcttgcatttcttttggtcctaagaatcgttcaattggagcagcagctaaaagccaggtaatttctaatgcaaagaacacagtccaaggatttaaaagattccatggccgagcattctctgatccatttgtggaggcagaaaaatctaaccttgcatatgatattgtgcagttgcctacaggattaacaggtataaaggtgacatatatggaggaagagcgaaattttaccactgagcaagtgactgccatgcttttgtccaaactgaaggagacagccgaaagtgttcttaagaagcctgtagttgactgtgttgtttcggttccttgtttctatactgatgcagaaagacgatcagtgatggatgcaacacagattgctggtcttaattgcttgcgattaatgaatgaaaccactgcagttgctcttgcatatggaatctataagcaggatcttcctgccttagaagagaaaccaagaaatgtagtttttgtagacatgggccactctgcttatcaagtttctgtatgtgcatttaatagaggaaaactgaaagttctggccactgcatttgacacgacattgggaggtagaaaatttgatgaagtgttagtaaatcacttctgtgaagaatttgggaagaaatacaagctagacattaagtccaaaatccgtgcattattacgactctctcaggagtgtgagaaactcaagaaattgatgagtgcaaatgcttcagatctccctttgagcattgaatgttttatgaatgatgttgatgtatctggaactatgaatagaggcaaatttctggagatgtgcaatgatctcttagctagagtggagccaccacttcgtagtgttttggaacaaaccaagttaaagaaagaagatatttatgcagtggagatagttggtggtgctacacgaatccctgcggtaaaagagaagatcagcaaatttttcggtaaagaacttagtacaacattaaatgctgatgaagctgtcactcgaggctgtgcattgcagtgtgccatcttatcgcctgctttcaaagtcagagaattttctatcactgatgtagtaccatatccaatatctctgagatggaattctccagctgaagaagggtcaagtgactgtgaagtcttttccaaaaatcatgctgctcctttctctaaagttcttacattttatagaaaggaacctttcactcttgaggcctactacagctctcctcaggatttgccctatccagatcctgctatagctcagttttcagttcagaaagtcactcctcagtctgatggctccagttcaaaagtgaaagtcaaagttcgagtaaatgtccatggcattttcagtgtgtccagtgcatctttagtggaggttcacaagtctgaggaaaatgaggagccaatggaaacagatcagaatgcaaaggaggaagagaagatgcaagtggaccaggaggaaccacatgttgaagagcaacagcagcagacaccagcagaaaataaggcagagtctgaagaaatggagacctctcaagctggatccaaggataaaaagatggaccaaccaccccaagccaagaaggcaaaagtgaagaccagtactgtggacctgccaatcgagaatcagctattatggcagatagacagagagatgctcaacttgtacattgaaaatgagggtaagatgatcatgcaggataaactggagaaggagcggaatgatgctaagaacgcagtggaggaatatgtgtatgaaatgagagacaagcttagtggtgaatatgagaagtttgtgagtgaagatgatcgtaacagttttactttgaaactggaagatactgaaaattggttgtatgaggatggagaagaccagccaaagcaagtttatgttgataagttggctgaattaaaaaatctaggtcaacctattaagatacgtttccaggaatctgaagaacgaccaaaattatttgaagaactagggaaacagatccaacagtatatgaaaataatcagctctttcaaaaacaaggaggaccagtatgatcatttggatgctgctgacatgacaaaggtagaaaaaagcacaaatgaagcaatggagtggatgaataacaagctaaatctgcagaacaagcagagtttgaccatggatccagttgtcaagtcaaaagagattgaagctaaaattaaggagctgacaagtacttgtagccctataatttcaaagcccaaacccaaagtggaacctccaaaagaggaacaaaaaaatgcagagcagaatggaccagtggatggacaaggagacaacccaggcccccaggctgctgagcagggtacagacacagctgtgccttcggattcagacaagaagcttcctgaaatggacattgattgattccaacacttgtttctattaaaacagactattataaagctttaagttgtcaactttgttctaaatatcaactagcgcaagtgaatactgaagatttcttagtcagtttttaggggattttcggggaggggaaataggtaatgtatggagcattttcacttctaaatagttagatacagaaattaagtgcattgtatctttttcataatggtactatttagaagcccagttagtcttactgagcttatgcttcactcctttatgtttaaccatgtgtctacaagaataagtttgttttggaaagttgagctatagctacagctctagctatccagcagacttttcattatgacttacatggcaggagctctaattatgctttaaaaatctgttgtggagattgctttaaatgctccctgcctggtgtggggatggggtccccctctttgtgagggctggagcatggcacggcatggattaacacggcagaggaacaaaggtgtgctctgagcttcttcatatttcaccttcaccctcacctgtgttctcttccctctctcccaataaaagggctcccattataaatgccatgtacttctcttgggaaaatagacccccttgcctagagtaagttgttaactgagggctttaaacctggaggctcttcctgaaagtatgttcatgaataccccaagcatcaaggtctaaataattttcagaagattagaattgggtagatatactgttggatatagccatggtaaatttaactgaggaattaaatccttgttaattttggtgtaaagatttgtatcctggcctgtttattcaggtgggagatgttctgtataattttgaggtatagcttgaactcctagaacaagagttaaaagttctttttagctcattcacaatcacttgtgtgttaagtgttaatatctgtcatgaacctgccaatttgtacgtgttaagcagctgacagatgatgcaaaaaaaactaagatacactggattgtactggatgagtctgaaattagtgttaaagaagtgtggtgcctgatgttataacaacacctcattcttaactgtgtggccaatgtcaggtataccaaagcattcctctgactgctttttggggcagtgttgacaggagtgaggcattttggaaactccaagggaagcctgtgtttgaggccagagttggtacctgctttaagaaactgttacagggcttgttggtaatgttttgaatctttgtaaaaattgatattctgtataacagagtgcctctctgttacttttggcctatgttgttagaaataagatgctatcttgcatagttagaattaagcgtttgtccatctctagataacattgaaaagtttgagtgttacaggctctaaagtgcaatggagaacaattgcttaggaggaggaaggggaaagtatacttatgttggtgtgtaagcatgcatggaggcctcgaggcaccacaacaaggccaggttcttagcacatcctctgttctctacctgtcatgcttcaagagttccagctggcctgctgtgaagccagtagctattttaaaagtgctggctgcaggattaagccaaccctttacaactggcccagaccgtaatggccatttcttcttaaaaaaaaaaaaattttttttttttttttttttttttttttttttttttttggtgtgtgtgtgtgtgtgtgtggggaagggtgtgggtgctgggatgggggtgaatttcaagttgaaacacgatgatgtggtctgcttgctctctgcttagacaggctttaagaccaattggattttcatggaggccaggacagagagtggtaattgatggcttgtgtacagacaagcatttatccaggttgcgttatccaaactgatttgttaaagctccaggtcacgttcttacactaagaaaatcattcagtaaacatgagacaagtttaggaaaaactaataaaataaacctgtcttaaacttg

SEQ ID NO: 1684 - protein, 840 aa, Homo sapiens
MSVVGIDLGFQSCYVAVARAGGIETIANEYSDRCTPACISFGPKNRSIGAAAKSQVISNAKNTVQGFKRFHGRAFSDPFVEAEKSNLAYDIVQLPTGLTGIKVTYMEEERNFTTEQVTAMLLSKLKETAESVLKKPVVDCVVSVPCFYTDAERRSVMDATQIAGLNCLRLMNETTAVALAYGIYKQDLPALEEKPRNVVFVDMGHSAYQVSVCAFNRGKLKVLATAFDTTLGGRKFDEVLVNHFCEEFGKKYKLDIKSKIRALLRLSQECEKLKKLMSANASDLPLSIECFMNDVDVSGTMNRGKFLEMCNDLLARVEPPLRSVLEQTKLKKEDIYAVEIVGGATRIPAVKEKISKFFGKELSTTLNADEAVTRGCALQCAILSPAFKVREFSITDVVPYPISLRWNSPAEEGSSDCEVFSKNHAAPFSKVLTFYRKEPFTLEAYYSSPQDLPYPDPAIAQFSVQKVTPQSDGSSSKVKVKVRVNVHGIFSVSSASLVEVHKSEENEEPMETDQNAKEEEKMQVDQEEPHVEEQQQQTPAENKAESEEMETSQAGSKDKKMDQPPQAKKAKVKTSTVDLPIENQLLWQIDREMLNLYIENEGKMIMQDKLEKERNDAKNAVEEYVYEMRDKLSGEYEKFVSEDDRNSFTLKLEDTENWLYEDGEDQPKQVYVDKLAELKNLGQPIKIRFQESEERPKLFEELGKQIQQYMKIISSFKNKEDQYDHLDAADMTKVEKSTNEAMEWMNNKLNLQNKQSLTMDPVVKSKEIEAKIKELTSTCSPIISKPKPKVEPPKEEQKNAEQNGPVDGQGDNPGPQAAEQGTDTAVPSDSDKKLPEMDID

SEQ ID NO: 1685 - DNA, 1923 bp, Homo sapiens
gactgtctacattagtaattcccaacttgggtccgaaagtgaacttttgctgaagcgaagtagctaaccgcttccatgtgcaaggcaggttccagacttcggggtgaggaggattaactgaaggaccccaggggaaccggtgtgctcactgatccgcctccagggccaccgccatgtcgagccgcggtgggaagaagaagtccaccaagacgtccaggtctgccaaagcaggagtcatctttcccgtggggcggatgctgcggtacatcaagaaaggccaccccaagtacaggattggagtgggggcacccgtgtacatggccgccgtcctggaatacctgacagcggagattctggagctggctggcaatgcagcgagagacaacaagaagggacgggtcacaccccggcacatcctgctggctgtggccaatgatgaagagctgaatcagctgctaaaaggagtcaccatagccagtgggggtgtgttacccaacatccaccccgagttgctagcgaagaagcggggatccaaaggaaagttggaagccatcatcacaccacccccagccaaaaaggccaagtctccatcccagaagaagcctgtatctaaaaaagcaggaggcaagaaaggggcccggaaatccaagaagcagggtgaagtcagtaaggcagccagcgccgacagcacaaccgagggcacacctgccgacggcttcacagtcctctccaccaagagcctcttccttggccagaagctgaaccttattcacagtgaaatcagtaatttagccggctttgaggtggaggccataatcaatcctaccaatgctgacattgaccttaaagatgacctaggaaacacgctggagaagaaaggtggcaaggagtttgtggaagctgtcctggaactccggaaaaagaacgggcccttggaagtagctggagctgctgtcagcgcaggccatggcctgcctgccaagtttgtgatccactgtaatagtccagtttggggtgcagacaagtgtgaagaacttctggaaaagacagtgaaaaactgcttggccctggctgatgataagaagctgaaatccattgcatttccatccatcggcagcggcaggaacggttttccaaagcagacagcagctcagctgattctgaaggccatctccagttacttcgtgtctacaatgtcctcttccatcaaaacggtgtacttcgtgctttttgacagcgagagtataggcatctatgtgcaggaaatggccaagctggacgccaactaggctgagcaatgacagaaccagctgcaccatgtaccccaccttcagtttaaaagaaaaaaaaaatccccttcactcctactgggaggtgggacccctttcattttcagttttgctcatctagggaaaataaggctttggtttccagtttaattgtttttgaccttctaaaatgtttttatgttagcactgatagttggcattactgttgttaagcactgtgttccagaccgtgtctgacttagtgtaacctaggagattttatagttttattttaatgaaaccctgattgacgcacagcagtggggagaacagcgtcttttacctgtcaccgaagccaggaagccccgtttgtaagcgtgtgttgtggtgctttattgtacatcctccagtggcgttctttttactctaatgttcttttggtttcccccctcagaagaatcatgaatttgcaacagacctaatttttggttactttttgtcttattgatggatttgaaaatgaaagatttaataaggcaaagcagaatctgttgtccttaattatatttgcaatttggaatttgtgtgagttgatttagtaaaatgttaaaccgttaaaaaaaaaaaaaaaaaaaaaaaaaaaaaaaaaaaaaaa

SEQ ID NO: 1686 - protein, 371 aa, Homo sapiens
MSSRGGKKKSTKTSRSAKAGVIFPVGRMLRYIKKGHPKYRIGVGAPVYMAAVLEYLTAEILELAGNAARDNKKGRVTPRHILLAVANDEELNQLLKGVTIASGGVLPNIHPELLAKKRGSKGKLEAIITPPPAKKAKSPSQKKPVSKKAGGKKGARKSKKQGEVSKAASADSTTEGTPADGFTVLSTKSLFLGQKLNLIHSEISNLAGFEVEAIINPTNADIDLKDDLGNTLEKKGGKEFVEAVLELRKKNGPLEVAGAAVSAGHGLPAKFVIHCNSPVWGADKCEELLEKTVKNCLALADDKKLKSIAFPSIGSGRNGFPKQTAAQLILKAISSYFVSTMSSSIKTVYFVLFDSESIGIYVQEMAKLDAN

SEQ ID NO: 1687 - DNA, 1733 bp, Homo sapiens
ggacgaggggggagcggaggtggcggcggcggcggtagcggtggccttggttgtcttccagtctcctcggctcgccctttagccggcaccgctccccttccctcccccttcctctcttccttccttccctccccttccctttttcccttccccgtcggtgagcggcgggggtggctccagcaacggctgggcccaagctgtgtagaggccttaaccaacgataacggcggcgacggcgaaacctcggagctcgcagggcgggggcaaggcccgggccttggagatggagaattctcagttgtgtaagctgttcatcggcggcctcaatgtgcagacgagtgagtcgggcctgcgcggccactttgaggcctttgggactctgacggactgcgtggtggtggtgaatccccagaccaagcgctcccgttgctttggcttcgtgacctactccaatgtggaggaggcggacgccgccatggccgcctcgccccatgccgtggacggcaacactgtggagctgaagcgggcggtgtcccgggaggattcggcgcggcccggtgcccacgccaaggttaagaagctctttgtcggaggccttaaaggagacgtggctgagggcgacctgatcgagcacttctcgcagtttggcaccgtggaaaaggccgagattattgccgacaagcagtccggcaagaagcgtggattcggcttcgtgtatttccagaatcacgacgcggcagacaaggccgcggtggtcaagttccatccgattcagggccatcgcgtggaggtgaagaaagcagtccccaaggaggatatctactccggtgggggtggaggcggctcccgatcctcccggggcggccgaggcggccgggggcgcggcggtggtcgagaccagaacggcctttccaagggcggcggcggcggttacaacagctacggtggttacggcggcggcggaggcggcggctacaatgcctacggaggcggcggcggcggttcgtcctacggtgggagcgactacggtaacggcttcggcggcttcggcagctacagccagcatcagtcctcctatgggcccatgaagagcggcggcggcggcggcggtggaggcagtagctggggcggtcgcagtaatagtggaccttacagaggcggctatggcggtgggggtggctatggaggcagctccttctaaaagaaaatttaaaatgcctgggagtggctataggggtagctctttccaacagcccaagtggggtcaactcctaagccccaccccctcacacacaccgccttccctgttttgcccttgggggagccacttctaaggctgcttacccttgggggtgttcctctatttgcctgccacctctcttgtctctccctctgaagatggactcggccccacatacacatttttgtgttacagtcattgatggactctatttttttattattacttggaccttggtcgtttttatactagcaaaatgtcttgttttaatttgtgttttttggggggagggagggagtgaacttgctgattctgtagcaaaacctgggtgggggttggggtggggggtagtttactttgttgtaaggacttgataacctggctacagcgttttctatgaaatctacttggatcccatgcctgaaatttggaagcatatgtacacaaatcatttttacgttttatttttaataaatcattgtgtttgaccgta

SEQ ID NO: 1688 - protein, 305 aa, Homo sapiens
MENSQLCKLFIGGLNVQTSESGLRGHFEAFGTLTDCVVVVNPQTKRSRCFGFVTYSNVEEADAAMAASPHAVDGNTVELKRAVSREDSARPGAHAKVKKLFVGGLKGDVAEGDLIEHFSQFGTVEKAEIIADKQSGKKRGFGFVYFQNHDAADKAAVVKFHPIQGHRVEVKKAVPKEDIYSGGGGGGSRSSRGGRGGRGRGGGRDQNGLSKGGGGGYNSYGGYGGGGGGGYNAYGGGGGGSSYGGSDYGNGFGGFGSYSQHQSSYGPMKSGGGGGGGGSSWGGRSNSGPYRGGYGGGGGYGGSSF

SEQ ID NO: 1689 - DNA, 3132 bp, Homo sapiens
ccgcagaacttggggagccgccgccgccatccgccgccgcagccagcttccgccgccgcaggaccggcccctgccccagcctccgcagccgcggcgcgtccacgcccgcccgcgcccagggcgagtcggggtcgccgcctgcacgcttctcagtgttccccgcgccccgcatgtaacccggccaggcccccgcaacggtgtcccctgcagctccagccccgggctgcacccccccgccccgacaccagctctccagcctgctcgtccaggatggccgcggccaaggccgagatgcagctgatgtccccgctgcagatctctgacccgttcggatcctttcctcactcgcccaccatggacaactaccctaagctggaggagatgatgctgctgagcaacggggctccccagttcctcggcgccgccggggccccagagggcagcggcagcaacagcagcagcagcagcagcgggggcggtggaggcggcgggggcggcagcaacagcagcagcagcagcagcaccttcaaccctcaggcggacacgggcgagcagccctacgagcacctgaccgcagagtcttttcctgacatctctctgaacaacgagaaggtgctggtggagaccagttaccccagccaaaccactcgactgccccccatcacctatactggccgcttttccctggagcctgcacccaacagtggcaacaccttgtggcccgagcccctcttcagcttggtcagtggcctagtgagcatgaccaacccaccggcctcctcgtcctcagcaccatctccagcggcctcctccgcctccgcctcccagagcccacccctgagctgcgcagtgccatccaacgacagcagtcccatttactcagcggcacccaccttccccacgccgaacactgacattttccctgagccacaaagccaggccttcccgggctcggcagggacagcgctccagtacccgcctcctgcctaccctgccgccaagggtggcttccaggttcccatgatccccgactacctgtttccacagcagcagggggatctgggcctgggcaccccagaccagaagcccttccagggcctggagagccgcacccagcagccttcgctaacccctctgtctactattaaggcctttgccactcagtcgggctcccaggacctgaaggccctcaataccagctaccagtcccagctcatcaaacccagccgcatgcgcaagtatcccaaccggcccagcaagacgcccccccacgaacgcccttacgcttgcccagtggagtcctgtgatcgccgcttctcccgctccgacgagctcacccgccacatccgcatccacacaggccagaagcccttccagtgccgcatctgcatgcgcaacttcagccgcagcgaccacctcaccacccacatccgcacccacacaggcgaaaagcccttcgcctgcgacatctgtggaagaaagtttgccaggagcgatgaacgcaagaggcataccaagatccacttgcggcagaaggacaagaaagcagacaaaagtgttgtggcctcttcggccacctcctctctctcttcctacccgtccccggttgctacctcttacccgtccccggttactacctcttatccatccccggccaccacctcatacccatcccctgtgcccacctccttctcctctcccggctcctcgacctacccatcccctgtgcacagtggcttcccctccccgtcggtggccaccacgtactcctctgttccccctgctttcccggcccaggtcagcagcttcccttcctcagctgtcaccaactccttcagcgcctccacagggctttcggacatgacagcaaccttttctcccaggacaattgaaatttgctaaagggaaaggggaaagaaagggaaaagggagaaaaagaaacacaagagacttaaaggacaggaggaggagatggccataggagaggagggttcctcttaggtcagatggaggttctcagagccaagtcctccctctctactggagtggaaggtctattggccaacaatcctttctgcccacttccccttccccaattactattccctttgacttcagctgcctgaaacagccatgtccaagttcttcacctctatccaaagaacttgatttgcatggattttggataaatcatttcagtatcatctccatcatatgcctgaccccttgctcccttcaatgctagaaaatcgagttggcaaaatggggtttgggcccctcagagccctgccctgcacccttgtacagtgtctgtgccatggatttcgtttttcttggggtactcttgatgtgaagataatttgcatattctattgtattatttggagttaggtcctcacttgggggaaaaaaaaaaaaaaaagccaagcaaaccaatggtgatcctctattttgtgatgatgctgtgacaataagtttgaacctttttttttgaaacagcagtcccagtattctcagagcatgtgtcagagtgttgttccgttaacctttttgtaaatactgcttgaccgtactctcacatgtggcaaaatatggtttggtttttcttttttttttttgaaagtgttttttcttcgtccttttggtttaaaaagtttcacgtcttggtgccttttgtgtgatgccccttgctgatggcttgacatgtgcaattgtgagggacatgctcacctctagccttaaggggggcagggagtgatgatttgggggaggctttgggagcaaaataaggaagagggctgagctgagcttcggttctccagaatgtaagaaaacaaaatctaaaacaaaatctgaactctcaaaagtctatttttttaactgaaaatgtaaatttataaatatattcaggagttggaatgttgtagttacctactgagtaggcggcgatttttgtatgttatgaacatgcagttcattattttgtggttctattttactttgtacttgtgtttgcttaaacaaagtgactgtttggcttataaacacattgaatgcgctttattgcccatgggatatgtggtgtatatccttccaaaaaattaaaacgaaaataaagtagctgcgattggg

SEQ ID NO: 1690 - protein, 543 aa, Homo sapiens
MAAAKAEMQLMSPLQISDPFGSFPHSPTMDNYPKLEEMMLLSNGAPQFLGAAGAPEGSGSNSSSSSSGGGGGGGGGSNSSSSSSTFNPQADTGEQPYEHLTAESFPDISLNNEKVLVETSYPSQTTRLPPITYTGRFSLEPAPNSGNTLWPEPLFSLVSGLVSMTNPPASSSSAPSPAASSASASQSPPLSCAVPSNDSSPIYSAAPTFPTPNTDIFPEPQSQAFPGSAGTALQYPPPAYPAAKGGFQVPMIPDYLFPQQQGDLGLGTPDQKPFQGLESRTQQPSLTPLSTIKAFATQSGSQDLKALNTSYQSQLIKPSRMRKYPNRPSKTPPHERPYACPVESCDRRFSRSDELTRHIRIHTGQKPFQCRICMRNFSRSDHLTTHIRTHTGEKPFACDICGRKFARSDERKRHTKIHLRQKDKKADKSVVASSATSSLSSYPSPVATSYPSPVTTSYPSPATTSYPSPVPTSFSSPGSSTYPSPVHSGFPSPSVATTYSSVPPAFPAQVSSFPSSAVTNSFSASTGLSDMTATFSPRTIEIC

SEQ ID NO: 1691 - DNA, 282 bp, Homo sapiens
atggcaagaaaagctggcaacttctatgtacctgcagaacccaaattggcgtttgtcatcaggatcagaggcatcaatggtgtgagcccaaagccctacaaggcgcttcctcccggccccaggcccatacaaggcgcttccttcccggcgcggctggctggcggcccgcgggctgggagcccgcccggagcacagcacgccctgccggaggtctttcagcggccccagcccgggacctccagccacacgggcctccgagcctcgccggccgctctcccctga

SEQ ID NO: 1692 - protein, 93 aa, Homo sapiens
MARKAGNFYVPAEPKLAFVIRIRGINGVSPKPYKALPPGPRPIQGASFPARLAGGPRAGSPPGAQHALPEVFQRPQPGTSSHTGLRASPAALP

SEQ ID NO: 1693 - DNA, 2811 bp, Homo sapiens
ggcacgaggggagcgcttgtttgctgcctcgtactcctccatttatccgccatgataagtgccagccgagctgcagcagcccgtctcgtgggcgccgcagcctcccggggccctacggccgcccgccaccaggatagctggaatggccttagtcatgaggcttttagacttgtttcaaggcgggattatgcatcagaagcaatcaagggagcagttgttggtattgatttgggtactaccaactcctgcgtggcagttatggaaggtaaacgagcaaaggtgctggagaatgccgaaggtgccagaaccaccccttcagttgtggcctttacagcagatggtgagcgacttgttggaatgccggccaagcgacaggctgtcaccaacccaaacaatacattttatgctaccaagcgtctcattggccggcgatatgatgatcctgaagtacagaaagacattaaaaatgttccctttaaaattgtccgtgcctccaatggtgatgcctgggttgaggctcatgggaaattgtattctccgagtcagattggagcatttgtgttgatgaagatgaaagagactgcagaaaattacttggggcgcacagcaaaaaatgctgtgatcacagtcccagcttatttcaatgactcgcagagacaggccactaaagatgctggccagatatctggactgaatgtgcttcgggtgattaatgagcccacagctgctgctcttgcctatggtctagacaaatcagaagacaaagtcattgctgtatatgatttaggtggtggaacttttgatatttctatcctggaaattcagaaaggagtatttgaggtgaaatccacaaatggggataccttcttaggtggggaagactttgaccaggccttgctacggcacattgtgaaggagttcaagagagagacaggggttgatttgactaaagacaacatggcacttcagagggtacgggaagctgctgaaaaggctaagtgtgaactctcctcatctgtgcagactgacatcaatttgccctatcttacaatggattcttctggacccaagcatttgaatatgaagttgacccgtgctcaatttgaagggattgtcactgatctaatcagaaggactatcgctccatgccaaaaagctatgcaagatgcagaagtcagcaagagtgacataggagaagtgattcttgtgggtggcatgactaggatgcccaaggttcagcagactgtacaggatctttttggcagagccccaagtaaagctgtcaatcctgatgaggctgtggccattggagctgccattcagggaggtgtgttggccggcgatgtcacggatgtgctgctccttgatgtcactcccctgtctctgggtattgaaactctaggaggtgtctttaccaaacttattaataggaataccactattccaaccaagaagagccaggtattctctactgccgctgatggtcaaacgcaagtggaaattaaagtgtgtcagggtgaaagagagatggctggagacaacaaactccttggacagtttactttgattggaattccaccagcccctcgtggagttcctcagattgaagttacatttgacattgatgccaatgggatagtacatgtttctgctaaagataaaggcacaggacgtgagcagcagattgtaatccagtcttctggtggattaagcaaagatgatattgaaaatatggttaaaaatgcagagaaatatgctgaagaagaccggcgaaagaaggaacgagttgaagcagttaatatggctgaaggaatcattcacgacacagaaaccaagatggaagaattcaaggaccaattacctgctgatgagtgcaacaagctgaaagaagagatttccaaaatgagggagctcctggctagaaaagacagcgaaacaggagaaaatattagacaggcagcatcctctcttcagcaggcatcattgaagctgttcgaaatggcatacaaaaagatggcatctgagcgagaaggctctggaagttctggcactggggaacaaaaggaagatcaaaaggaggaaaaacagtaataatagcagaaattttgaagccagaaggacaacatatgaagcttaggagtgaagagacttcctgagcagaaatgggcgaacttcagtctttttactgtgtttttgcagtattctatatataatttccttaatttgtaaatttagtgaccattagctagtgatcatttaatggacagtgattctaacagtataaagttcacaatattctatgtccctagcctgtcatttttcagctgcatgtaaaaggaggtaggatgaattgatcattataaagatttaactattttatgctgaagtgaccatattttcaaggggtgaaaccatctcgcacacagcaatgaaggtagtcatccatagacttgaaatgagaccacatatggggatgagatccttctagttagcctagtactgctgtactggcctgtatgtacatggggtccttcaactgaggccttgcaagtcaagctggctgtgccatgtttgtagatggggcagaggaatctagaacaatgggaaacttagctatttatattaggtacagctattaaaacaaggtaggaatgaggctagacctttaacttccctaaggcatacttttctagctaccttctgccctgtgtctggcacctacatccttgatgattgttctcttacccattctggaattttttttttttttaaataaatacagaaagcatcttgaaaaaaaaaaaaaaaaaa

SEQ ID NO: 1694 - protein, 679 aa, Homo sapiens
MISASRAAAARLVGAAASRGPTAARHQDSWNGLSHEAFRLVSRRDYASEAIKGAVVGIDLGTTNSCVAVMEGKRAKVLENAEGARTTPSVVAFTADGERLVGMPAKRQAVTNPNNTFYATKRLIGRRYDDPEVQKDIKNVPFKIVRASNGDAWVEAHGKLYSPSQIGAFVLMKMKETAENYLGRTAKNAVITVPAYFNDSQRQATKDAGQISGLNVLRVINEPTAAALAYGLDKSEDKVIAVYDLGGGTFDISILEIQKGVFEVKSTNGDTFLGGEDFDQALLRHIVKEFKRETGVDLTKDNMALQRVREAAEKAKCELSSSVQTDINLPYLTMDSSGPKHLNMKLTRAQFEGIVTDLIRRTIAPCQKAMQDAEVSKSDIGEVILVGGMTRMPKVQQTVQDLFGRAPSKAVNPDEAVAIGAAIQGGVLAGDVTDVLLLDVTPLSLGIETLGGVFTKLINRNTTIPTKKSQVFSTAADGQTQVEIKVCQGEREMAGDNKLLGQFTLIGIPPAPRGVPQIEVTFDIDANGIVHVSAKDKGTGREQQIVIQSSGGLSKDDIENMVKNAEKYAEEDRRKKERVEAVNMAEGIIHDTETKMEEFKDQLPADECNKLKEEISKMRELLARKDSETGENIRQAASSLQQASLKLFEMAYKKMASEREGSGSSGTGEQKEDQKEEKQ

SEQ ID NO: 1695 - DNA, 3466 bp, Homo sapiens
gaaatgactgctgtccatgcaggcaacataaacttcaagtgggatcctaaaagtctagagatcaggactctggcagttgagagactgttggagcctcttgttacacaggttacaacccttgtaaacaccaatagtaaagggccctctaataagaagagaggtcgttctaagaaggcccatgttttggctgcatctgttgaacaagcaactgagaatttcttggagaagggggataaaattgcgaaggagagccagtttctcaaggaggagcttgtggctgctgtagaagatgttcgaaaacaaggtgatttgatgaaggctgctgcaggagagttcgcagatgatccctgctcttctgtgaagcgaggcaacatggttcgggcagctcgagctttgctctctgctgttacccggttgctgattttggctgacatggcagatgtctacaaattacttgttcagctgaaagttgtggaagatggtatcttgaagttgaggaatgctggcaatgaacaagacttaggaatccagtataaagccctaaaacctgaagtggataagctgaacattatggcagccaaaagacaacaggaattgaaagatgttggccatcgtgatcagatggctgcagctagaggaatcctgcagaagaacgttccgatcctctatactgcatcccaggcatgcctacagcaccctgatgtcgcagcctataaggccaacagggacctgatatacaagcagctgcagcaggcggtcacaggcatttccaatgcagcccaggccactgcctcagacgatgcctcacagcaccagggtggaggaggaggagaactggcatatgcactcaataactttgacaaacaaatcattgtggaccccttgagcttcagcgaggagcgctttaggccttccctggaggagcgtctggaaagcatcattagtggggctgccttgatggccgactcgtcctgcacgcgtgatgaccgtcgtgagcgaattgtggcagagtgtaatgctgtccgccaggccctgcaggacctgctttcggagtacatgggcaatgctggacgtaaagaaagaagtgatgcactcaattctgcaatagataaaatgaccaagaagaccagggacttgcgtagacagctccgcaaagctgtcatggaccacgtttcagattctttcctggaaaccaatgttccacttttggtattgattgaagctgcaaagaatggaaatgagaaagaagttaaggagtatgcccaagttttccgtgaacatgccaacaaattgattgaggttgccaacttggcctgttccatctcaaataatgaagaaggtgtaaagcttgttcgaatgtctgcaagccagttagaagccctctgtcctcaggttattaatgctgcactggctttagcagcaaaaccacagagtaaactggcccaagagaacatggatctttttaaagaacaatgggaaaaacaagtccgtgttctcacagatgctgtcgatgacattacttccattgatgacttcttggctgtctcagagaatcacattttggaagatgtgaacaaatgtgtcattgctctccaagagaaggatgtggatggcctggaccgcacagctggtgcaattcgaggccgggcagcccgggtcattcacgtagtcacctcagagatggacaactatgagccaggagtctacacagagaaggttctggaagccactaagctgctctccaacacagtcatgccacgttttactgagcaagtagaagcagccgtggaagccctcagctcggaccctgcccagcccatggatgagaatgagtttatcgatgcttcccgcctggtatatgatggcatccgggacatcaggaaagcagtgctgatgataaggacccctgaggagttggatgactctgactttgagacagaagattttgatgtcagaagcaggacgagcgtccagacagaagacgatcagctgatagctggccagagtgcccgggcgatcatggctcagcttccccaggagcaaaaagcgaagattgcggaacaggtggccagcttccaggaagaaaagagcaagctggatgctgaagtgtccaaatgggacgacagtggcaatgacatcattgtgctggccaagcagatgtgcatgattatgatggagatgacagactttacccgaggtaaaggaccactcaaaaatacatcggatgtcatcagtgctgccaagaaaattgctgaggcaggatccaggatggacaagcttggccgcaccattgcagaccattgccccgactcggcttgcaagcaggacctgctggcctacctgcaacgcatcgccctctactgccaccagctgaacatctgcagcaaggtcaaggccgaggtgcagaatctcggcggggagcttgttgtctctggggtggacagcgccatgtccctgatccaggcagccaagaacttgatgaatgctgtggtgcagacagtgaaggcatcctacgtcgcctctaccaaataccaaaagtcacagggtatggcttccctcaaccttcctgctgtgtcatggaagatgaaggcaccagagaaaaagccattggtgaagagagagaaacaggatgagacacagaccaagattaaacgggcatctcagaagaagcacgtgaacccggtgcaggccctcagcgagttcaaagctatggacagcatctaagtctgcccaggccggccgcccccacccctcggggctcctgaatatcagtcactgttcgtcactcaaatgaatttgctaaatacaacactgatactagattccacagggaaatgggcagactgaaccagtccaggtggtgaattttccaagaacatagtttaagttgattaaaaatgcttttagaatgcaggagcctacttctagctgtattttttgtatgcttaaataaaaataaaaattcataaccaaagagaatcccacattagcttgttagtaatgctctgaccaagccgagatgcccattctcttagtgatggcggcgttagggtttgagagaagggaatttggctcaacttcagttgagagggtgcagtccagacagcttgactgcttttaaatgaccaaagatgacctgtggtaagcaacctgggcatcttaggaagcagtccctggagaaggcatgttcccagaaaggtctctggagggacaaactcactcagtaaaacataatgtatcatgaagaaaactgattctctatgacatgaaatgaaaattttaatgcattgttataattactaatgtacgctgctgcaggacattaataaagttgcttttttaggctacagtgtctcgatgccataatcagaacacactttttttcctctttctcccagcttcaaatgcaaattcatcattgggctcacttctaataactgcagtgtttcccgccttgggcttgcag

SEQ ID NO: 1696 - protein, 906 aa, Homo sapiens
MTAVHAGNINFKWDPKSLEIRTLAVERLLEPLVTQVTTLVNTNSKGPSNKKRGRSKKAHVLAASVEQATENFLEKGDKIAKESQFLKEELVAAVEDVRKQGDLMKAAAGEFADDPCSSVKRGNMVRAARALLSAVTRLLILADMADVYKLLVQLKVVEDGILKLRNAGNEQDLGIQYKALKPEVDKLNIMAAKRQQELKDVGHRDQMAAARGILQKNVPILYTASQACLQHPDVAAYKANRDLIYKQLQQAVTGISNAAQATASDDASQHQGGGGGELAYALNNFDKQIIVDPLSFSEERFRPSLEERLESIISGAALMADSSCTRDDRRERIVAECNAVRQALQDLLSEYMGNAGRKERSDALNSAIDKMTKKTRDLRRQLRKAVMDHVSDSFLETNVPLLVLIEAAKNGNEKEVKEYAQVFREHANKLIEVANLACSISNNEEGVKLVRMSASQLEALCPQVINAALALAAKPQSKLAQENMDLFKEQWEKQVRVLTDAVDDITSIDDFLAVSENHILEDVNKCVIALQEKDVDGLDRTAGAIRGRAARVIHVVTSEMDNYEPGVYTEKVLEATKLLSNTVMPRFTEQVEAAVEALSSDPAQPMDENEFIDASRLVYDGIRDIRKAVLMIRTPEELDDSDFETEDFDVRSRTSVQTEDDQLIAGQSARAIMAQLPQEQKAKIAEQVASFQEEKSKLDAEVSKWDDSGNDIIVLAKQMCMIMMEMTDFTRGKGPLKNTSDVISAAKKIAEAGSRMDKLGRTIADHCPDSACKQDLLAYLQRIALYCHQLNICSKVKAEVQNLGGELVVSGVDSAMSLIQAAKNLMNAVVQTVKASYVASTKYQKSQGMASLNLPAVSWKMKAPEKKPLVKREKQDETQTKIKRASQKKHVNPVQALSEFKAMDSI

SEQ ID NO: 1697 - DNA, 1769 bp, Homo sapiens
gaattcgggcggggtttgtactatcctcggtgctgtggtgcagagctagttcctctccagctcagccgcgtaggtttggacatatttactcttttccccccaggttgaattgaccaaagcaatggtgatggagaagcctagtcccctgctggtcgggcgggaatttgtgagacagtattacacactgctgaaccaggccccagacatgctgcatagattttatggaaagaactcttcttatgtccatgggggattggattcaaatggaaagccagcagatgcagtctacggacagaaagaaatccacaggaaagtgatgtcacaaaacttcaccaactgccacaccaagattcgccatgttgatgctcatgccacgctaaatgatggtgtggtagtccaggtgatggggcttctctctaacaacaaccaggctttgaggagattcatgcaaacgtttgtccttgctcctgaggggtctgttgcaaataaattctatgttcacaatgatatcttcagataccaagatgaggtctttggtgggtttgtcactgagcctcaggaggagtctgaagaagaagtagaggaacctgaagaaagacagcaaacacctgaggtggtacctgatgattctggaactttctatgatcaggcagttgtcagtaatgacatggaagaacatttagaggagcctgttgctgaaccagagcctgatcctgaaccagaaccagaacaagaacctgtatctgaaatccaagaggaaaagcctgagccagtattagaagaaactgcccctgaggatgctcagaagagttcttctccagcacctgcagacatagctcagacagtacaggaagacttgaggacattttcttgggcatctgtgaccagtaagaatcttccacccagtggagctgttccagttactgggataccacctcatgttgttaaagtaccagcttcacagccccgtccagagtctaagcctgaatctcagattccaccacaaagacctcagcgggatcaaagagtgcgagaacaacgaataaatattcctccccaaaggggacccagaccaatccgtgaggctggtgagcaaggtgacattgaaccccgaagaatggtgagacaccctgacagtcaccaactcttcattggcaacctgcctcatgaagtggacaaatcagagcttaaagatttctttcaaagttatggaaacgtggtggagttgcgcattaacagtggtgggaaattacccaattttggttttgttgtgtttgatgattctgagcctgttcagaaagtccttagcaacaggcccatcatgttcagaggtgaggtccgtctgaatgtcgaagagaagaagactcgagctgccagggaaggcgaccgacgagataatcgccttcggggacctggaggccctcgaggtgggctgggtggtggaatgagaggccctccccgtggaggcatggtgcagaaaccaggatttggagtgggaagggggcttgcgccacggcagtaatcttcatggatcttcatgcagccatacaaaccctggttccaacagaatggtgaattttcgacagcctttggtatcttggagtatgaccccagtctgttataaactgcttaagtttgtataattttactttttttgtgtgttaatggtgtgtgctccctctccctctcttccctttcctgacctttagtctttcacttccaattttgtggaatgatattttaggaataacggacttttacccgaattc

SEQ ID NO: 1698 - protein, 466 aa, Homo sapiens
MVMEKPSPLLVGREFVRQYYTLLNQAPDMLHRFYGKNSSYVHGGLDSNGKPADAVYGQKEIHRKVMSQNFTNCHTKIRHVDAHATLNDGVVVQVMGLLSNNNQALRRFMQTFVLAPEGSVANKFYVHNDIFRYQDEVFGGFVTEPQEESEEEVEEPEERQQTPEVVPDDSGTFYDQAVVSNDMEEHLEEPVAEPEPDPEPEPEQEPVSEIQEEKPEPVLEETAPEDAQKSSSPAPADIAQTVQEDLRTFSWASVTSKNLPPSGAVPVTGIPPHVVKVPASQPRPESKPESQIPPQRPQRDQRVREQRINIPPQRGPRPIREAGEQGDIEPRRMVRHPDSHQLFIGNLPHEVDKSELKDFFQSYGNVVELRINSGGKLPNFGFVVFDDSEPVQKVLSNRPIMFRGEVRLNVEEKKTRAAREGDRRDNRLRGPGGPRGGLGGGMRGPPRGGMVQKPGFGVGRGLAPRQ

SEQ ID NO: 1699 - DNA, 446 bp, Homo sapiens
gagaggcgctgctgacaccgccgccacaccgccgccacaccgccgctgcctcagtcatgccgaagcacgagttctctgtggacatgacctgtggaggctgtgctgaagctgtctctcgggtcctcaataagcttggaggagttaagtatgacattgacctgcccaacaagaaggtctgcattgaatctgagcacagcatggacactctgcttgcaaccctgaagaaaacaggaaagactgtttcctaccttggccttgagtagcaggggcctggtccccacagcccacaggatggaccaaagggggcaggatgctgatcctcccgctggcttccagacagacctgggacttggcagtcatgccgggtgatggtgttcctgcggagaccctcagttgtcctattccttcctagcttccctgcaataaaatcaagctgcttttgttgg

SEQ ID NO: 1700 - DNA, 2101 bp, Homo sapiens
ggagagcgcgctctgcctgccgcctgcctgcctgccactgagggttcccagcaccatgagggcctggatcttctttctcctttgcctggccgggagggccttggcagcccctcagcaagaagccctgcctgatgagacagaggtggtggaagaaactgtggcagaggtgactgaggtatctgtgggagctaatcctgtccaggtggaagtaggagaatttgatgatggtgcagaggaaaccgaagaggaggtggtggcggaaaatccctgccagaaccaccactgcaaacacggcaaggtgtgcgagctggatgagaacaacacccccatgtgcgtgtgccaggaccccaccagctgcccagcccccattggcgagtttgagaaggtgtgcagcaatgacaacaagaccttcgactcttcctgccacttctttgccacaaagtgcaccctggagggcaccaagaagggccacaagctccacctggactacatcgggccttgcaaatacatccccccttgcctggactctgagctgaccgaattccccctgcgcatgcgggactggctcaagaacgtcctggtcaccctgtatgagagggatgaggacaacaaccttctgactgagaagcagaagctgcgggtgaagaagatccatgagaatgagaagcgcctggaggcaggagaccaccccgtggagctgctggcccgggacttcgagaagaactataacatgtacatcttccctgtacactggcagttcggccagctggaccagcaccccattgacgggtacctctcccacaccgagctggctccactgcgtgctcccctcatccccatggagcattgcaccacccgctttttcgagacctgtgacctggacaatgacaagtacatcgccctggatgagtgggccggctgcttcggcatcaagcagaaggatatcgacaaggatcttgtgatctaaatccactccttccacagtaccggattctctctttaaccctccccttcgtgtttcccccaatgtttaaaatgtttggatggtttgttgttctgcctggagacaaggtgctaacatagatttaagtgaatacattaacggtgctaaaaatgaaaattctaacccaagacatgacattcttagctgtaacttaactattaaggccttttccacacgcattaatagtcccatttttctcttgccatttgtagctttgcccattgtcttattggcacatgggtggacacggatctgctgggctctgccttaaacacacattgcagcttcaacttttctctttagtgttctgtttgaaactaatacttaccgagtcagactttgtgttcatttcatttcagggtcttggctgcctgtgggcttccccaggtggcctggaggtgggcaaagggaagtaacagacacacgatgttgtcaaggatggttttgggactagaggctcagtggtgggagagatccctgcagaacccaccaaccagaacgtggtttgcctgaggctgtaactgagagaaagattctggggctgtgttatgaaaatatagacattctcacataagcccagttcatcaccatttcctcctttacctttcagtgcagtttcttttcacattaggctgttggttcaaacttttgggagcacggactgtcagttctctgggaagtggtcagcgcatcctgcagggcttctcctcctctgtcttttggagaaccagggctcttctcaggggctctagggactgccaggctgtttcagccaggaaggccaaaatcaagagtgagatgtagaaagttgtaaaatagaaaaagtggagttggtgaatcggttgttctttcctcacatttggatgattgtcataaggtttttagcatgttcctccttttcttcaccctccccttttttcttctattaatcaagagaaacttcaaagttaatgggatggtcggatctcacaggctgagaactcgttcacctccaagcatttcatgaaaaagctgcttcttattaatcatacaaactctcaccatgatgtgaagagtttcacaaatccttcaaaataaaaagtaatgacttagaaactg

SEQ ID NO: 1701 - DNA, 2538 bp, Homo sapiens
gccacgtgtccggctcggagcccacggctgtcctcccggtccgccccgcgctgcggttgctgctgggctaacgggctccgatccagcgagcgctgcgtcctcgagtccctgcgcccgtgcgtccgtctgcgacccgaggcctccgctgcgcgtggattctgctgcgaaccggagaccatggccaaaccagcacagggtgccaagtaccggggctccatccatgacttcccaggctttgaccccaaccaggatgccgaggctctgtacactgccatgaagggctttggcagtgacaaggaggccatactggacataatcacctcacggagcaacaggcagaggcaggaggtctgccagagctacaagtccctctacggcaaggacctcattgctgatttaaagtatgaattgacgggcaagtttgaacggttgattgtgggcctgatgaggccacctgcctattgtgatgccaaagaaattaaagatgccatctcgggcattggcactgatgagaagtgcctcattgagatcttggcttcccggaccaatgagcagatgcaccagctggtggcagcatacaaagatgcctacgagcgggacctggaggctgacatcatcggcgacacctctggccacttccagaagatgcttgtggtcctgctccagggaaccagggaggaggatgacgtagtgagcgaggacctggtacaacaggatgtccaggacctatacgaggcaggggaactgaaatggggaacagatgaagcccagttcatttacatcttgggaaatcgcagcaagcagcatcttcggttggtgttcgatgagtatctgaagaccacagggaagccgattgaagccagcatccgaggggagctgtctggggactttgagaagctaatgctggccgtagtgaagtgtatccggagcaccccggaatattttgctgaaaggctcttcaaggctatgaagggcctggggactcgggacaacaccctgatccgcatcatggtctcccgtagtgagttggacatgctcgacattcgggagatcttccggaccaagtatgagaagtccctctacagcatgatcaagaatgacacctctggcgagtacaagaagactctgctgaagctgtctgggggagatgatgatgctgctggccagttcttcccggaggcagcgcaggtggcctatcagatgtgggaacttagtgcagtggcccgagtagagctgaagggaactgtgcgcccagccaatgacttcaaccctgacgcagatgccaaagcgctgcggaaagccatgaagggactcgggactgacgaagacacaatcatcgatatcatcacgcaccgcagcaatgtccagcggcagcagatccggcagaccttcaagtctcactttggccgggacttaatgactgacctgaagtctgagatctctggagacctggcaaggctgattctggggctcatgatgccaccggcccattacgatgccaagcagttgaagaaggccatggagggagccggcacagatgaaaaggctcttattgaaatcctggccactcggaccaatgctgaaatccgggccatcaatgaggcctataaggaggactatcacaagtccctggaggatgctctgagctcagacacatctggccacttcaggaggatcctcatttctctggccacggggcatcgtgaggagggaggagaaaacctggaccaggcacgggaagatgcccaggtggctgctgagatcttggaaatagcagacacacctagtggagacaaaacttccttggagacacgtttcatgacgatcctgtgtacccggagctatccgcacctccggagagtcttccaggagttcatcaagatgaccaactatgacgtggagcacaccatcaagaaggagatgtctggggatgtcagggatgcatttgtggccattgttcaaagtgtcaagaacaagcctctcttctttgccgacaaactttacaaatccatgaagggtgctggcacagatgagaagactctgaccaggatcatggtatcccgcagtgagattgacctgctcaacatccggagggaattcattgagaaatatgacaagtctctccaccaagccattgagggtgacacctccggagacttcctgaaggccttgctggctctctgtggtggtgaggactagggccacagctttggcgggcacttctgccaagaaatggttatcagcaccagccgccatggccaagcctgattgttccagctccagagactaaggaaggggcaggggtggggggaggggttgggttgggctcttatcttcagtggagcttaggaaacgctcccactcccacgggccatcgagggcccagcacggctgagcggctgaaaaaccgtagccatagatcctgtccacctccactcccctctgaccctcaggctttcccagcttcctccccttgctacagcctctgccctggtttgggctatgtcagatccaaaaacatcctgaacctctgtctgt

SEQ ID NO: 1702 - DNA, 2921 bp, Homo sapiens
gtcgacccacgcgtccgtgccagtctccggggactttcccaggggtggggcggcgtgtccgggcccccggcacttcctcgtcctcggcccgggtgccctgcccccgtccaggagccctaggagtgctacggggggccggagccttgcccgggccgctgccccgtccctggattcggggctggacgcagcaagcggggcgctgtgtccccaagctccccgtcctcgcagcgggcacaggcaggggctgagctaccctcatggaagggagaggaccgtaccggatctacgaccctgggggcagcgtgccctcaggagaggcatccgcagcttttgagcgcctagtgaaggagaattcccggctgaaggaaaaaatgcaagggataaagatgttaggggagcttttggaagagtcccagatggaagcgaccaggctccggcagaaggcagaggagctagtgaaggacaacgagctgctcccaccaccttctccctccttgggctccttcgaccccctggctgagctcacaggaaaggactcaaatgtcacagcatctcccacagcccctgcatgccccagtgacaagccagcaccagtccagaagcctccatccagtggcacctcctctgaatttgaagtggtcactcctgaggagcagaattcaccagagagcagcagccatgccaatgcgatggcgctgggccccctgccccgtgaggacggcaacctgatgctgcacctgcagcgcctggagaccacgctgagtgtgtgtgccgaggagccggaccacggccagctcttcacccacctgggccgcatggccctggagttcaaccgactggcatccaaggtgcacaagaatgagcagcgcacctccattctgcagaccctgtgtgagcagcttcggaaggagaacgaggctctgaaggccaagttggataagggcctggaacagcgggatcaggctgccgagaggctgcgggaggaaaatttggagctcaagaagttgttgatgagcaatggcaacaaagagggtgcgtctgggcggccaggctcaccgaagatggaagggacaggcaagaaggcagtggctggacagcagcaggctagtgtgacggcaggtaaggtcccagaggtggtggccttgggcgcacccgagaagaaggtgaagatgctggagcagcagcgcagtgagctgctggaagtgaacaagcagtgggaccagcatttccggtccatgaagcagcagtatgagcagaagatcactgagctgcgtcagaagctggctgatttgcagaagcaggtgactgacctggaggccgagcgggagcagaagcagcgtgactttgaccgcaagctcctcctggccaagtccaagattgaaatggaggagaccgacaaggagcagctgacagcagaggccaaggagctgcgccaaaaggtcaagtacctgcaggatcagctgagcccactcacccgacagcgtgagtaccaggaaaaggagatccagcggctcaacaaggccctggaggaagcactgagcatccaaaccccgccatcatctccaccaacagcatttgggagcccagaaggagcaggggccctcctaaggaaacaggagctggtcacgcagaatgagttgctgaaacagcaggtgaagatcttcgaggaggacttccagagggagcgcagtgatcgtgagcgcatgaatgaggagaaggaagagctgaagaagcaagtggagaagctgcaggcccaggtcaccctgtcaaatgcccagctaaaagcattcaaagatgaggagaaggcaagagaagccctcagacagcagaagaggaaagcaaaggcctcaggagagcgttaccatgtggagccccacccagaacatctctgcggggcctacccctacgcctacccgcccatgccagccatggtgccacaccatggcttcgaggactggtcccagatccgctacccccctccccccatggccatggagcacccgcccccactccccaactcgcgcctcttccatctgccggaatacacctggcgtctaccctgtggaggggttcgaaatccaaatcagagctcccaagtgatggaccctcccacagccaggcctacagaaccagagtctccaaaaaatgaccgtgaggggcctcagtgagaccagattgtgtcatttggctccaccttcatcttgcagagccagctgatctcaattgccaaaaactagaagccacttgcacggtgtggccagagcctcagctggatgagaggctgagatgggtggccagcttgtacaccagtccctgaactgagctgtttacaggactggggaggctccacccagaaggctttcatttgtactctgctgggagtgactgggaaaaactccttccctgctgctgagtggagagaggcctcatccggctttgacccccatccttgcagaagcctccaggagcagcaatcctaagagtgggaggcagccaagacccccttccttcaaaacctcccggaagtggtttcaggccctctagttgccatgaccaatttgtgtgtgtgtttaatttttgcttcaagctctgtagcaggacctgccccacgcacacccctacccctctgtgaggagctgtgggaagtgtgggtttgtctccagaacagaagagaatgatggatattctggctctggggccctctccaccaccactcacagtagccttgctgaagccatcacagatgggagaaggccatgccagccacgtccgccgaggggcgccagcctgaagctgccaggccctgaggttcagaccctggaccccatagctggaggcctgtggtgccagaagcccagattagggtggctgtccatccctggatagctatttgcacgaatcatggacataaatccaagttg

SEQ ID NO: 1703 - protein, 636 aa, Homo sapiens
MEGRGPYRIYDPGGSVPSGEASAAFERLVKENSRLKEKMQGIKMLGELLEESQMEATRLRQKAEELVKDNELLPPPSPSLGSFDPLAELTGKDSNVTASPTAPACPSDKPAPVQKPPSSGTSSEFEVVTPEEQNSPESSSHANAMALGPLPREDGNLMLHLQRLETTLSVCAEEPDHGQLFTHLGRMALEFNRLASKVHKNEQRTSILQTLCEQLRKENEALKAKLDKGLEQRDQAAERLREENLELKKLLMSNGNKEGASGRPGSPKMEGTGKKAVAGQQQASVTAGKVPEVVALGAPEKKVKMLEQQRSELLEVNKQWDQHFRSMKQQYEQKITELRQKLADLQKQVTDLEAEREQKQRDFDRKLLLAKSKIEMEETDKEQLTAEAKELRQKVKYLQDQLSPLTRQREYQEKEIQRLNKALEEALSIQTPPSSPPTAFGSPEGAGALLRKQELVTQNELLKQQVKIFEEDFQRERSDRERMNEEKEELKKQVEKLQAQVTLSNAQLKAFKDEEKAREALRQQKRKAKASGERYHVEPHPEHLCGAYPYAYPPMPAMVPHHGFEDWSQIRYPPPPMAMEHPPPLPNSRLFHLPEYTWRLPCGGVRNPNQSSQVMDPPTARPTEPESPKNDREGPQ

SEQ ID NO: 1704 - DNA, 1856 bp, Homo sapiens
  unsure 517: unknown base
agccaaaagaggaagggaccggcctcccacgtccacagggacctgacttccacctctctgcccagatttgcttatgtcactgtcgccccgggacggggaggtggggagctgagggcaagtcgcgcccgcccctgaaatcccagccgcctagcgattggctgcaagggtctcggcttggccgcggattaatcacacccgagggcttgaaaggtggctgggagcgccggacacctcagacggacggtggccagggatcaggcagcggctcaggcgaccctgagtgtgcccccaccccgccatggcccggctgctgcaggcgtcctgcctgctttccctgctcctggccggcttcgtctcgcagagccggggacaagagaagtcgaagatggactgccatggtggcataagtggcaccatttacgagtacggagccctcaccattgatggggaggagtacatccccttcaagcagtatgctggcaaatacgtcctctttgtcaacgtggccagctactgnggcctgacgggccagtacattgaactgaatgcactacaggaagagcttgcaccattcggtctggtcattctgggctttccctgcaaccaatttggaaaacaggaaccaggagagaactcagagatccttcctaccctcaagtatgtccgaccaggtggaggctttgtccctaatttccagctctttgagaaaggggatgtcaatggagagaaagagcagaaattctacactttcctaaagaactcctgtcctcccacctcggagctcctgggtacatctgaccgcctcttctgggaacccatgaaggttcacgacatccgctggaactttgagaagttcctggtggggccagatggtatacccatcatgcgctggcaccaccggaccacggtcagcaacgtcaagatggacatcctgtcctacatgaggcggcaggcagccctgggggtcaagaggaagtaactgaaggccgtctcatcccatgtccaccatgtaggggagggactttgttcaggaagaaatccgtgtctccaaccacactatctacccatcacagacccctttcctatcactcaaggccccagcctggcacaaatggatgcatacagttctgtgtactgccaggcatgtgggtgtgggtgcaatgtgggtgtttacacacatgcctacaggtatgcgtgattgtgtgtgtgtgcatgggtgtacagccacgtgtctacctatgtgtctttctgggaatgtgtaccatctgtgtgcctgcagctgtgtagtgctggacagtgacaaccctttctctccagttctccactccaatgataatagttcacttatacctaaacccaaaggaaaaaccagctctaggtccaattgttctgctctaactgatacctcaaccttggggccagcatctcccactgcctccaaatattagtaactatgactgacgtccccagaagtttctgggtctaccacactccccaaccccccactcctacttcctgaagggccctcccaaggctacatccccaccccacagttctccctgagagagatcaacctccctgagatcaaccaaggcagatgtgacagcaagggccacggaccccatggcaggggtggcgtcttcatgagggaggggcccaaagcccttgtgggcggacctcccctgagcctgtctgaggggccagcccttagtgcattcaggctaaggcccctgggcagggatgccacccctgctccttcggaggacgtgccctcacccctcactggtccactggcttgagactcaccccgtctgcccagtaaaagcctttctgcagcaaaaaaaaaaaaaaaaaaa

SEQ ID NO: 1705 - protein, 226 aa, Homo sapiens
MARLLQASCLLSLLLAGFVSQSRGQEKSKMDCHGGISGTIYEYGALTIDGEEYIPFKQYAGKYVLFVNVASYEGLTGQYIELNALQEELAPFGLVILGFPCNQFGKQEPGENSEILPTLKYVRPGGGFVPNFQLFEKGDVNGEKEQKFYTFLKNSCPPTSELLGTSDRLFWEPMKVHDIRWNFEKFLVGPDGIPIMRWHHRTTVSNVKMDILSYMRRQAALGVKRK

SEQ ID NO: 1706 - DNA, 2297 bp, Homo sapiens
agcctcggggcttgacgggattgtggcggtcctctctcccaattcggaagctacagctacctccggacgctctcaagatggcgacctctctgggttccaacacctacaacaggcagaactgggaggatgcggacttccccattctgtgccagacatgtcttggagaaaacccatatatccgaatgaccaaagaaaagtatgggaaggaatgcaaaatctgtgccaggccattcacagtgtttcgctggtgccctggagtccgcatgcgtttcaagaagactgaagtgtgccaaacctgcagtaaattgaagaatgtctgtcagacctgcctcttagacctagagtatggcctgcccatccaggttcgtgacgcaggattgtcttttaaagatgacatgccaaagtcagatgtcaacaaagagtactatacacagaatatggagagagagatttctaactctgatggaacacggccagttggcatgctggggaaagccacatctaccagtgacatgctgctcaaactggcccggaccacaccctactacaaaaggaatcgaccccacatttgctccttctgggtgaaaggagagtgtaagagaggagaggaatgtccatacagacatgagaagcctacagatccagatgacccccttgctgatcagaatattaaagaccgttattacggaatcaatgatcctgtagctgacaagcttctaaagcgggcttcaacaatgcctcggctggacccaccagaggataaaactatcaccacactatatgttggtggtctaggtgataccattactgagacagatttaagaaatcatttctaccagttcggagagatccggacgatcactgttgtgcagagacagcagtgtgctttcatccagtttgccacacggcaggctgcagaagtggctgctgagaagtcctttaataagttgattgtaaatggccgcagactgaatgtgaaatggggaagatcccaggcagccagaggaaaagaaaaagagaaagatggaactacagactctgggatcaaactagaacctgttccaggattgccaggagctcttcctcctcctcctgcagcagaagaagaagcctctgccaactacttcaacttgcccccaagtggtcctccagctgtggtgaacattgctctgccaccgccccctggcattgctccacccccacccccaggttttgggccacacatgttccacccaatgggaccaccccctcctttcatgcgggctccaggaccaatccactatccttctcaggaccctcagaggatgggagctcatgctggaaaacacagcagcccctagcaccttgtcaccactctggggctctgtggaagaaagggcacttaaaactcccagtaaatcttggaataaatatatttttccttcccttgtagtttccatggtagctgaatgtgctcagatgtgagcagtcagagactgacagccatgctttcctatacttgttcaaaggatcgatggaccgtaaataagctgccattaacacatctggttactgctgtaacatgactaataaaaccgaacgcctgttccccttacccgtgtgggggacacgcagatgagtgaattggaatgtccagcagagttaccctcccaattatatgttcattttgtatattttttggtcgggggaaaaattgacctgcagtaaaaaaacctttgaccatttttatgtccattggatactttcctttttatcatcttaaaaaaagataactagtactaatcattgtagtggcctaagtgtgatttaactcttgaagtcacaccctccgaaagatgagtagaaaccagcaccagcacagcccagatcttctctttcctctccttttcctcatttattcctaaaggaatctgaccattttacgtctctacggcccaaaaaaagacaaaaataaaaattcctttttattcctgtcaactggatggaaacacaaatttcatggagctgtgtaccatcgaagaaacctggtgtctggcatgaaattactgtaaagaacttcctgtaaaacacgttctttaacaaactgaaatgaaaagcattggagcgtctgaatgaaagacgtgacctcctgctgggactctgatggtcttcagcattcaccttcgtgtgtcttcagtgtctcattgtcatccctgcttctgtttggtcttagagtgtttggatataactgaattgtagatggtaaaggaaatttgatgtgttttttgtttttaaataattaaaacgggtcaattttt

SEQ ID NO: 1707 - protein, 420 aa, Homo sapiens
MATSLGSNTYNRQNWEDADFPILCQTCLGENPYIRMTKEKYGKECKICARPFTVFRWCPGVRMRFKKTEVCQTCSKLKNVCQTCLLDLEYGLPIQVRDAGLSFKDDMPKSDVNKEYYTQNMEREISNSDGTRPVGMLGKATSTSDMLLKLARTTPYYKRNRPHICSFWVKGECKRGEECPYRHEKPTDPDDPLADQNIKDRYYGINDPVADKLLKRASTMPRLDPPEDKTITTLYVGGLGDTITETDLRNHFYQFGEIRTITVVQRQQCAFIQFATRQAAEVAAEKSFNKLIVNGRRLNVKWGRSQAARGKEKEKDGTTDSGIKLEPVPGLPGALPPPPAAEEEASANYFNLPPSGPPAVVNIALPPPPGIAPPPPPGFGPHMFHPMGPPPPFMRAPGPIHYPSQDPQRMGAHAGKHSSP

SEQ ID NO: 1708 - DNA, 589 bp, Homo sapiens
ctccgccctctcccactctctctttccggtgtggagtctggagacgacgtgcagaaatggcacctcgaaaggggaaggaaaagaaggaagaacaggtcatcagcctcggacctcaggtggctgaaggagagaatgtatttggtgtctgccatatctttgcatccttcaatgacacttttgtccatgtcactgatctttctggcaaggaaaccatctgccgtgtgactggtgggatgaaggtaaaggcagaccgagatgaatcctcaccatatgctgctatgttggctgcccaggatgtggcccagaggtgcaaggagctgggtatcaccgccctacacatcaaactccgggccacaggaggaaataggaccaagacccctggacctggggcccagtcggccctcagagcccttgcccgctcgggtatgaagatcgggcggattgaggatgtcacccccatcccctctgacagcactcgcaggaaggggggtcgccgtggtcgccgtctgtgaacaagattcctcaaaatattttctgttaataaattgccttcatgtaaaaaaaaaaaaaaaaaaaaaaaaaaaaaaaa

SEQ ID NO: 1709 - protein, 151 aa, Homo sapiens [sequence omitted]

SEQ ID NO: 1710 - DNA, 1579 bp, Homo sapiens
accaagtgggcggagtggccttctgtggacgaatcagattcctctccagcaccgactttaagaggcgagccggggggtcagggtcccagatgcacaggaggagaagcaggagctgtcgggaagatcagaagccagtcatggatgaccagcgcgaccttatctccaacaatgagcaactgcccatgctgggccggcgccctggggccccggagagcaagtgcagccgcggagccctgtacacaggcttttccatcctggtgactctgctcctcgctggccaggccaccaccgcctacttcctgtaccagcagcagggccggctggacaaactgacagtcacctcccagaacctgcagctggagaacctgcgcatgaagcttcccaagcctcccaagcctgtgagcaagatgcgcatggccaccccgctgctgatgcaggcgctgcccatgggagccctgccccaggggcccatgcagaatgccaccaagtatggcaacatgacagaggaccatgtgatgcacctgctccagaatgctgaccccctgaaggtgtacccgccactgaaggggagcttcccggagaacctgagacaccttaagaacaccatggagaccatagactggaaggtctttgagagctggatgcaccattggctcctgtttgaaatgagcaggcactccttggagcaaaagcccactgacgctccaccgaaagtactgaccaagtgccaggaagaggtcagccacatccctgctgtccacccgggttcattcaggcccaagtgcgacgagaacggcaactatctgccactccagtgctatgggagcatcggctactgctggtgtgtcttccccaacggcacggaggtccccaacaccagaagccgcgggcaccataactgcagtgagtcactggaactggaggacccgtcttctgggctgggtgtgaccaagcaggatctgggcccagtccccatgtgagagcagcagaggcggtcttcaacatcctgccagccccacacagctacagctttcttgctcccttcagcccccagcccctcccccatctcccaccctgtacctcatcccatgagaccctggtgcctggctctttcgtcacccttggacaagacaaaccaagtcggaacagcagataacaatgcagcaaggccctgctgcccaatctccatctgtcaacaggggcgtgaggtcccaggaagtggccaaaagctagacagatccccgttcctgacatcacagcagcctccaacacaaggctccaagacctaggctcatggacgagatgggaaggcacagggagaagggataaccctacacccagaccccaggctggacatgctgactgtcctctcccctccagcctttggccttggcttttctagcctatttacctgcaggctgagccactctcttccctttccccagcatcactccccaaggaagagccaatgttttccacccataatcctttctgccgacccctagttccctctgctcagccaagcttgttatcagctttcagggccatggttcacattagaataaaaggtagtaattag

SEQ ID NO: 1711 - DNA, 428 bp, Homo sapiens
ataagatctgtcccccaactctcccagatctgtgaccccacattctctctccataggtggaaaagaggctgcttcaggcaccacacctcagaagtcccggaagcccaagaaaggggctgggaacccccaagcctcaaccctggcgctgcaaagcaacatcacccagagcaagaagaagaagaagctgggggccggggaaggtggggaggcctctgtttccccagaaaagacctccacgacttccaaggggaaagcaaagagagacaaagcaagtggtgatgtcaaggagaagaaagggaaggggtctcttggctcccaaggggccaaggacgagccagaagaggagcttcagaaggggatggggacggttgaaggtggagatcaaagcaacccaaagagcaagaaggagaagaagaaatccgacaaga

SEQ ID NO: 1712 - DNA, 3984 bp, Homo sapiens
gaagggcagacagagtgtccaaaagcgtgagagcacgaagtgaggagaaggtggagaagagagaagaggaagaggaagaggaagagaggaagcggagggaactgcggccaggctaaaaggggaagaagaggatcagcccaaggaggaggaagaggaaaacaagacaaacagccagtgcagaggagaggaacgtgtgtccagtgtcccgatccctgcggagctagtagctgagagctctgtgccctgggcaccttgcagccctgcacctgcctgccacttccccaccgaggccatgggcccaggagttctgctgctcctgctggtggccacagcttggcatggtcagggaatcccagtgatagagcccagtgtccctgagctggtcgtgaagccaggagcaacggtgaccttgcgatgtgtgggcaatggcagcgtggaatgggatggccccccatcacctcactggaccctgtactctgatggctccagcagcatcctcagcaccaacaacgctaccttccaaaacacggggacctatcgctgcactgagcctggagaccccctgggaggcagcgccgccatccacctctatgtcaaagaccctgcccggccctggaacgtgctagcacaggaggtggtcgtgttcgaggaccaggacgcactactgccctgtctgctcacagacccggtgctggaagcaggcgtctcgctggtgcgtgtgcgtggccggcccctcatgcgccacaccaactactccttctcgccctggcatggcttcaccatccacagggccaagttcattcagagccaggactatcaatgcagtgccctgatgggtggcaggaaggtgatgtccatcagcatccggctgaaagtgcagaaagtcatcccagggcccccagccttgacactggtgcctgcagagctggtgcggattcgaggggaggctgcccagatcgtgtgctcagccagcagcgttgatgttaactttgatgtcttcctccaacacaacaacaccaagctcgcaatccctcaacaatctgactttcataataaccgttaccaaaaagtcctgaccctcaacctcgatcaagtagatttccaacatgccggcaactactcctgcgtggccagcaacgtgcagggcaagcactccacctccatgttcttccgggtggtagagagtgcctacttgaacttgagctctgagcagaacctcatccaggaggtgaccgtgggggaggggctcaacctcaaagtcatggtggaggcctacccaggcctgcaaggttttaactggacctacctgggacccttttctgaccaccagcctgagcccaagcttgctaatgctaccaccaaggacacatacaggcacaccttcaccctctctctgccccgcctgaagccctctgaggctggccgctactccttcctggccagaaacccaggaggctggagagctctgacgtttgagctcacccttcgataccccccagaggtaagcgtcatatggacattcatcaacggctctggcacccttttgtgtgctgcctctgggtacccccagcccaacgtgacatggctgcagtgcagtggccacactgataggtgtgatgaggcccaagtgctgcaggtctgggatgacccataccctgaggtcctgagccaggagcccttccacaaggtgacggtgcagagcctgctgactgttgagaccttagagcacaaccaaacctacgagtgcagggcccacaacagcgtggggagtggctcctgggccttcatacccatctctgcaggagcccacacgcatcccccggatgagttcctcttcacaccagtggtggtcgcctgcatgtccatcatggccttgctgctgctgctgctcctgctgctattgtacaagtataagcagaagcccaagtaccaggtccgctggaagatcatcgagagctatgagggcaacagttatactttcatcgaccccacgcagctgccttacaacgagaagtgggagttcccccggaacaacctgcagtttggtaagaccctcggagctggagcctttgggaaggtggtggaggccacggcctttggtctgggcaaggaggatgctgtcctgaaggtggctgtgaagatgctgaagtccacggcccatgctgatgagaaggaggccctcatgtccgagctgaagatcatgagccacctgggccagcacgagaacatcgtcaaccttctgggagcctgtacccatggaggccctgtactggtcatcacggagtactgttgctatggcgacctgctcaactttctgcgaaggaaggctgaggccatgctgggacccagcctgagccccggccaggaccccgagggaggcgtcgactataagaacatccacctcgagaagaaatatgtccgcagggacagtggcttctccagccagggtgtggacacctatgtggagatgaggcctgtctccacttcttcaaatgactccttctctgagcaagacctggacaaggaggatggacggcccctggagctccgggacctgcttcacttctccagccaagtagcccagggcatggccttcctcgcttccaagaattgcatccaccgggacgtggcagcgcgtaacgtgctgttgaccaatggtcatgtggccaagattggggacttcgggctggctagggacatcatgaatgactccaactacattgtcaagggcaatgcccgcctgcctgtgaagtggatggccccagagagcatctttgactgtgtctacacggttcagagcgacgtctggtcctatggcatcctcctctgggagatcttctcacttgggctgaatccctaccctggcatcctggtgaacagcaagttctataaactggtgaaggatggataccaaatggcccagcctgcatttgccccaaagaatatatacagcatcatgcaggcctgctgggccttggagcccacccacagacccaccttccagcagatctgctccttccttcaggagcaggcccaagaggacaggagagagcgggactataccaatctgccgagcagcagcagaagcggtggcagcggcagcagcagcagtgagctggaggaggagagctctagtgagcacctgacctgctgcgagcaaggggatatcgcccagcccttgctgcagcccaacaactatcagttctgctgaggagttgacgacagggagtaccactctcccctcccacaaacttcaactcctccatggatggggcgacacggggagaacatacaaactctgccttcggtcatttcactcaacagctcggcccagctctgaaacttgggaaggtgagggattcaggggaggtcagaggatcccacttcctgagcatgggccatcactgccagtcaggggctgggggctgagccctcacccccccctcccctactgttctcatggtgttggcctcgtgtttgctatgccaactagtagaaccttctttcctaatccccttatcttcatggaaatggactgactttatgcctatgaagtccccaggagctacactgatactgagaaaaccaggctctttggggctagacagactggcagagagtgagatctccctctctgagaggagcagcagatgctcacagaccacactcagctcaggccccttggagcaggatggctcctctaagaatctcacaggacctcttagtctctgccctatacgccgccttcactccacagcctcacccctcccacccccatactggtactgctgtaatgagccaagtggcagctaaaagttgggggtgttctgcccagtcccgtcattctgggctagaaggcaggggaccttggcatgtggctggccacaccaagcaggaagcacaaactcccccaagctgactcatcctaactaacagtcacgccgtgggatgtctctgtccacattaaactaacagcattaatgc

SEQ ID NO: 1713 - DNA, 828 bp, Homo sapiens
tttttccggctggaaccatggagggtgtagaagagaagaagaaggaggttcctgctgtgccagaaacccttaagaaaaagcgaaggaatttcgcagagctgaagatgaagcgcctgagaaagaagtttgcccaaaagatgcttcgaaaggcaaggaggaagcttatctatgaaaaagcaaagcactatcacaaggaatataggcagatgtacaggactgaaattcgaatggcgaggatggcaagaaaagctggcaacttctatgtacctgcagaacccaaattggcgtttgtcatcagaatcagaggtatcaatggagtgagcccaaaggttcgaaaggtgttgcagcttcttcgccttcgtcaaatcttcaatggaacctttgtgaagctcaacaaggcttcgattaacatgctgaggattgtagagccatatattgcatgggggtaccccaatctgaagtcagtaaatgaactaatctacaagcgtggttatggcaaaatcaataagaagcgaattgctttgacagataacgctttgattgctcgatctcttggtaaatacggcatcatctgcgtggaggatttgattcatgagatctatactgttggaaaacgcttcaaagaggcaaataacttcctgtggcccttcaaattgtcttctccacgaggtggaatgaagaaaaagaccacccattttgtagaaggtggagatgctggcaacagggaggaccagatcaacaggcttattagaagaatgaactaaggtgtctaccatgattatttttctaagctggttggttaataaacagtacctgctctcaaattgg

SEQ ID NO: 1714 - DNA, 2697 bp, Homo sapiens
atggccgaggccaggaagcggcgggagctacttcccctgatctaccaccatctgctgcgggctggctatgtgcgtgcggcgcgggaagtgaaggagcagagcggccagtgggttgggccagaaagtgtgctcgcaggggccgaactttgtaattcccgcttcccttacctccacgcccttcctggtagcgggtattttaagtttcctaagtctcccgccacgtggctaggctctgcgcggccccccctggggcaaggaggttgctgcgagtctcgggggtggattgcgaccagcccctcgggggagcgcctggaaaagggaccctacagcctcttagttgagctggaactcaggcctttagcgattgtctgtactgagacggtcagctttggtactcgaactcgtggtacagtcatttcttacttgattaattcaactgttaatccggtactcagggtgcttcctggtgttcgaatgaagtgtttcctggctcagcccgtaacccttctggacatctatacacactggcaacaaacctcagagcttggtcggaagcggaaggcagaggaagatgcggcactgcaagctaagaaaacccgtgtgtcagaccccatcagcacctcggagagctcggaagaggaggaagaagcagaagccgaaaccgccaaagccagtaagagccttgcagctttgggaacaggctatggaatattgattgttctaggtttctatgaccccttctctcctactttctatgaaatgggggaagcccaaaggtcccagtctcctaactcctggtgttacggattgaattgtgtttccccaaaaggtgttgtgctgagcctctggctgacagctgtgttttctctgctcagcaaaggctttaaccataaacaggagaaatcggcccagacagttgctggtactttctgcccagtactacttcacagagtcagtgtccagcttccgaacagcatggaggcagctctgagtcatccgaatcccagtggcccccacagcctgctcagcttcggctacctgtcctgggactgggccaagccgagcttcgtggccgacgggcccggggaggctggcgagcagccctcggccgctccgccccagcctccccacatcatcttcatcctcacggacgaccaaggctaccacgacgtgggctaccatggttcagatatcgagacccctacgctggacaggctggcggccaagggggtcaagttggagaattattacatccagcccatctgcacgccttcgcggagccagctcctcactggcaggtaccagatccacacaggactccagcattccatcatccgcccacagcagcccaactgcctgcccctggaccaggtgacactgccacagaagctgcaggaggcaggttattccacccatatggtgggcaagtggcacctgggcttctaccggaaggagtgtctgcccacccgtcggggcttcgacaccttcctgggctcgctcacgggcaatgtggactattacacctatgacaactgtgatggcccaggcgtgtgcggcttcgacctgcacgagggtgagaatgtggcctgggggctcagcggccagtactccactatgctttatgcccagcgcgccagccatatcctggccagccacagccctcagcgtcccctcttcctctatgtggccttccaggcagtacacacacccctgcagtcccctcgtgagtacctgtaccgctaccgcaccatgggcaatgtggcccggcggaagtacgcggccatggtgacctgcatggatgaggctgtgcgcaacatcacctgggccctcaagcgctacggtttctacaacaacagtgtcatcatcttctccagtgacaatggtggccagactttctcggggggcagcaactggccgctccgaggacgcaagggcacttattgggaaggtggcgtgcggggcctaggctttgtccacagtcccctgctcaagcgaaagcaacggacaagccgggcactgatgcacatcactgactggtacccgaccctggtgggtctggcaggtggtaccacctcagcagccgatgggctagatggctacgacgtgtggccggccatcagcgagggccgggcctcaccacgcacggagatcctgcacaacattgacccactctacaaccatgcccagcatggctccctggagggcggctttggcatctggaacaccgccgtgcaggctgccatccgcgtgggtgagtggaagctgctgacaggagaccccggctatggcgattggatcccaccgcagacactggccaccttcccgggtagctggtggaacctggaacgaatggccagtgtccgccaggccgtgtggctcttcaacatcagtgctgacccttatgaacgggaggacctggctggccagcggcctgatgtggtccgcaccctgctggctcgcctggccgaatataaccgcacagccatcccggtacgctacccagctgagaacccccgggctcatcctgactttaatgggggtgcttgggggccctgggccagtgatgaggaagaggaggaagaggaagggagggctcgaagcttctcccggggtcgtcgcaagaaaaaatgcaagatttgcaagcttcgatcctttttccgtaaactcaacaccaggctaatgtcccaacggatctga

SEQ ID NO: 1715 - protein, 177 aa, Homo sapiens
LDRLAAKGVKLENYYIQPICTPSRSQLLTGRYQIHTGLQHSIIRPQQPNCLPLDQVTLPQKLQEAGYSTHMVGKWHLGFYRKECLPTRRGFDTFLGSLTGNVDYYTYDNCDGPGVCGFDLHEGENVAWGLSGQYSTMLYAQRASHILASHSPQRPLFLYVAFQAVHTPLQSPREYLY

SEQ ID NO: 1716 - DNA, 1155 bp, Homo sapiens
atggggataatcaggcacaggtctttccgccaatgcgttatgatgattaaagaagttgtcatatttgtgaactcgcggcaaatctggcctctctgtgatttcatcactgtgcacactcctctcctgccctccacgacaggcttgctgaatgacaacacctttgcccagtgcaagaagggggtgcgtgtggtgaactgtgcccgtggagggatcgtggacgaaggcgccctgctccgggccctgcagtctggccagtgtgccggggctgcactggacgtgtttacggaagtaagtgcctggcagcctcagcgtcaggaggacgggagagatagggagcagagaggcccatggcagggaaagcctggcgttttacagaaagcctatagcttattgtctctttcatccatggtaaaaggagaaaactgtgttgccaaaaacacacctttgtggtttgaggagtccttgcggagcctgtacctgcttcttgcccgaggtgtggctgtgcagaggggctcccctaactgcatcctgagggtgctcccactatgcaccctgtgccaagcctggacacctgagggatctgtgcccaatgctactggagccaaggctggggctacctttagtgatagtgttattattgtaattattgtaaccattgtcacagaatgtccagactggtatgcaggtatagctcattaccaggaggaaaacacagaaggtctttgtgcagttgctgtggttttgagtttctctgggatagcttgtattttgccagcaaatgaaagctttggacctctgcagatgtcacttggaggagcagtcaaagacatcttcaggttcatggtcatattcattatggtgtttgtggcctttatgattggaacgtacaacttctactcctactacattggtgcaaaacaaaatgaagccttcacaacagttgaagagagttttaagacactgttctgggctatatttggacttgctgaagtgaaatcagtggtcatcaactataaccacaaattcattgaaaatattggttatgttcgttatggagtctataatgttacagtggtcattgttttgctaaatgtgttaattgccatgatcaacaattcattccaggaaattgaggatgatgctgatgtggagtag

SEQ ID NO: 1717 - protein, 198 aa, Homo sapiens
MGIIRHRSFRQCVMMIKEATFSDSVIIVIIVTIVTECPDWYAGIAHYQEENTEGLCAVAVVLSFSGIACILPANESFGPLQMSLGGAVKDIFRFMVIFIMVFVAFMIGTYNFYSYYIGAKQNEAFTTVEESFKTLFWAIFGLAEVKSVVINYNHKFIENIGYVRYGVYNVTVVIVLLNVLIAMINNSFQEIEDDADVE

SEQ ID NO: 1718 - DNA, 2509 bp, Homo sapiens
atggcgactgcgacccccgtgccgccgcggatgggcagccgcgctggcggccccaccacgccgctgagccccacgcgcctgtcgcggctccaggagaaggaggagctgcgcgagctcaatgaccggctggcggtgtacatcgacaaggtgcgcagcctggagacggagaacagcgcgctgcagctgcaggtgacggagcgcgaggaggtgcgcggccgtgagctcaccggcctcaaggcgctctacgagaccgagctggccgacgcgcgacgcgcgctcgacgacacggcccgcgagcgcgccaagctgcagatcgagctgggcaagtgcaaggcggaacacgaccagctgctcctcaactatgctaagaaggaatctgatcttaatggcgcccagatcaagcttcgagaatatgaagcagcactgaattcgaaagatgcagctcttgctactgcacttggtgacaaaaaaagtttagagggagatttggaggatctgaaggatcagattgcccagttggaagcctccttagctgcagccaaaaaacagttagcagatgaaactttacttaaagtagatttggagaatcgttgtcagagccttactgaggacttggagtttcgcaaaagcatgtatgaagaggagattaacgagaccagaaggaagcatgaaacgcgcttggtagaggtggattctgggcgtcaaattgagtatgagtacaagctggcgcaagcccttcatgagatgagagagcaacatgatgcccaagtgaggctgtataaggaggagctggagcagacttaccatgccaaacttgagaatgccagactgtcatcagagatgaatacttctactgtcaacagtgccagggaagaactgatggaaagccgcatgagaattgagagcctttcatcccagctttctaatctacagaaagagtctagagcatgtttggaaaggattcaagaattagaggacttgcttgctaaagaaaaagacaactctcgtcgcatgctgacagacaaagagagagagatggcggaaataagggatcaaatgcagcaacagctgaatgactatgaacagcttcttgatgtaaagttagccctggacatggaaatcagtgcttacaggaaactcttagaaggcgaagaagagaggttgaagctgtctccaagcccttcttcccgtgtgacagtatcccgagcatcctcaagtcgtagtgtacgtacaactagaggaaagcggaagagggttgatgtggaagaatcagaggcgagtagtagtgttagcatctctcattccgcctcagccactggaaatgtttgcatcgaagaaattgatgttgatgggaaatttatccgcttgaagaacacttctgaacaggatcaaccaatgggaggctgggagatgatcagaaaaattggagacacatcagtcagttataaatatacctcaagatatgtgctgaaggcaggccagactgttacaatttgggctgcaaacgctggtgtcacagccagccccccaactgacctcatctggaagaaccagaactcgtggggcactggcgaagatgtgaaggttatattgaaaaattctcagggagaggaggttgctcaaagaagtacagtctttaaaacaaccatacctgaagaagaggaggaggaggaagaagcagctggagtggttgttgaggaagaacttttccaccagcagggaaccccaagagcatccaatagaagctgtgcaattatgtaaaattttcaactgtcttcctcaaaataaagaagtatggtaatctttacctgtatacagtgcagagccttctcagaagcacagaatatttttatatttcctttatgtgaatttttaagctgcaaatctgatggccttaatttcctttttgacactgaaagttttgtaaaagaaatcatgtccatacactttgttgcaagatgtgaattattgacactgaacttaataactgtgtactgttcggaaggggttcctcaaattttttgactttttttgtatgtgtgttttttctttttttttaagttcttatgaggaggggagggtaaataaaccactgtgcgtcttggtgtaatttgaagattgccccatctagactagcaatctcttcattattctctgctatatataaaacggtgctgtgagggaggggaaaagcatttttcaatatattgaacttttgtactgaatttttttgtaataagcaatcaaggttataattttttttaaaatagaaattttgtaagaaggcaatattaacctaatcaccatgtaagcactctggatgatggattccacaaaacttggttttatggttacttcttctcttagattcttaattcatgaggagggtgggggagggaggtggagggagggaagggtttctctattaaaatgcattcgttgtgttttttaagatagtgtaacttgcttaaatttcttatgtgacattaacaaataaaaaagctctttt

SEQ ID NO: 1719 - protein, 586 aa, Homo sapiens
MATATPVPPRMGSRAGGPTTPLSPTRLSRLQEKEELRELNDRLAVYIDKVRSLETENSALQLQVTEREEVRGRELTGLKALYETELADARRALDDTARERAKLQIELGKCKAEHDQLLLNYAKKESDLNGAQIKLREYEAALNSKDAALATALGDKKSLEGDLEDLKDQIAQLEASLAAAKKQLADETLLKVDLENRCQSLTEDLEFRKSMYEEEINETRRKHETRLVEVDSGRQIEYEYKLAQALHEMREQHDAQVRLYKEELEQTYHAKLENARLSSEMNTSTVNSAREELMESRMRIESLSSQLSNLQKESRACLERIQELEDLLAKEKDNSRRMLTDKEREMAEIRDQMQQQLNDYEQLLDVKLALDMEISAYRKLLEGEEERLKLSPSPSSRVTVSRASSSRSVRTTRGKRKRVDVEESEASSSVSISHSASATGNVCIEEIDVDGKFIRLKNTSEQDQPMGGWEMIRKIGDTSVSYKYTSRYVLKAGQTVTIWAANAGVTASPPTDLIWKNQNSWGTGEDVKVILKNSQGEEVAQRSTVFKTTIPEEEEEEEEAAGVVVEEELFHQQGTPRASNRSCAIM

SEQ ID NO: 1720 - DNA, 1701 bp, Homo sapiens
ggtctctggtctcccctctctgagcactctgaggtccttatgtcgtcagaagatcgagaagctcaggaggatgaattgctggccctggcaagtatttacgatggagatgaatttagaaaagcagagtctgtccaaggtggagaaaccaggatctatttggatttgccacagaatttcaagatatttgtgagcggcaattcaaatgagtgtctccagaatagtggctttgaatacaccatttgctttctgcctccacttgtgctgaactttgaactgccaccagattatccatcctcttccccaccttcattcacacttagtggcaaatggctgtcaccaactcagctatctgctctatgcaagcacttagacaacctatgggaagaacaccgtggcagcgtggtcctgtttgcctggatgcaatttcttaaggaagagaccctagcatacttgaatattgtctctccttttgagctcaagattggttctcagaaaaaagtgcagagaaggacagctcaagcttctcccaacacagagctagattttggaggagctgctggatctgatgtagaccaagaggaaattgtggatgagagagcagtgcaggatgtggaatcactgtcaaatctgatccaggaaatcttggactttgatcaagctcagcagataaaatgctttaatagtaaattgttcctgtgcagtatctgtttctgtgagaagctgggtagtgaatgcatgtacttcttggagtgcaggcatgtgtactgcaaagcctgtctgaaggactactttgaaatccagatcagagatggccaggttcaatgcctcaactgcccagaaccaaagtgcccttcggtggccactcctggtcaggtcaaagagttagtggaagcagagttatttgcccgttatgaccgccttctcctccagtcctccttggacctgatggcagatgtggtgtactgcccccggccgtgctgccagctgcctgtgatgcaggaacctggctgcaccatgggtatctgctccagctgcaattttgccttctgtactttgtgcaggttgacctaccatggggtctccccatgtaaggtgactgcagagaaattaatggacttacgaaatgaatacctgcaagcggatgaggctaataaaagacttttggatcaaaggtatggtaagagagtgattcagaaggcactggaagagatggaaagtaaggagtggctagagaagaactcaaagagctgcccatgttgtggaactcccatagagaaattagacggatgtaacaagatgacatgtactggctgtatgcaatatttctgttggatttgcatgggttctctctctagagcaaacccttacaaacatttcaatgaccctggttcaccatgttttaaccggctgttttatgctgtggatgttgacgacgatatttgggaagatgaggtagaagactagttaactactgctcaagatatggaagtggattgtttttccctaatcttccgtcaagtacacaaagtaactttgcgggatatttagggtactattcattcactcttcctgcgtagaagatatggaagaacgaggtttatattttcatgtggtactactgaagaaggtgcattgatacatttttaaatgtaagttgagaaaaatttataagccaaaggttcagaaaattaaactacagaa

SEQ ID NO: 1721 - DNA, 3020 bp, Homo sapiens
cgcggcggcctttctagccgctgtcccaagggttggtctcgcgctttcggctgcgagctctctgtggtgctggcagcgacatgtggcgcctcccgggactcctgggccgagctcttccccgtacactgggacctagcctctggagggtgactcctaagtccaccagcccagatgggcctcagactacctcctccactttgctggttcctgtgcctaacctcgacaggtcaggtccccatggcccaggcacgagcgggggtccaaggtcccatggatggaaggatgccttccaatggatgtcttcccgtgtctccccgaacaccctatgggatgccatatcttggggcactctggccgtgctggccctgcagctggcaaggcagatccacttccaggcatccctgccagcaggacctcagcgggtagaacactgctcctggcacagtcccctggaccgtttcttctcatctcccttgtggcacccatgctcctcactgcgacaacacatcctccccagccccgatggcccagctcccaggcacactggcctcagggaacccaggcttggccaggaagaagcctcagctcagccccggaacttctcacacaactctttgagaggagctcgtcctcaggacccctctgaggaaggtcccggtgattttggcttcctgcatgccagtagtagcatcgagtccgaggcaaaaccagcccagcctcagcccactggtgaaaaggaacaagataaatcaaaaactctttcccttgaggaggctgtgacttccattcagcagctcttccagctcagtgtttccatcgctttcaacttcctgggaacagagaacatgaagagtggcgaccacacggcagccttttcttacttccagaaagctgcagcccgcggctacagcaaagcgcagtacaatgcgggcttgtgtcatgagcatggcagaggcacccccagggacattagcaaggcggtcctttattatcagttggctgccagccagggccacagcctggctcagtaccgctatgccaggtgcctactacgagacccagcctcttcgtggaaccctgagcggcagagggcagtgtccttgctgaagcaggctgcagactcaggcttgagagaggcccaagctttcctcggggtgcttttcaccaaggagccctacctggatgagcagagagctgtgaaatatctttggcttgcagccaacaatggggactcacagagcaggtaccaccttggaatttgctatgagaaaggccttggtgtgcagaggaatctgggagaggccttgagatgttaccagcagtcagccgctctgggaaatgaggccgcccaggagaggctgcgagccctcttttccatgggggctgcagccccggggcccagcgacctgacagttacaggactgaagtctttctccagcccctccctctgcagcttgaacaccctgctagcaggaacctcacgcctaccacatgcctcgagcacaggcaaccttggcctcctctgcagaagtgggcatctcggagccagcctggaagcctccagcagggctattcccccacacccctacccactggaaaggagtgttgtaagactaggttttggctaaggtgagataaaacatagtccctggtgcctcttaggggccagagcgggcaggaggttggataacaaaaatagagcatcagcaaccctttccaggtagaaattccagcgggagttcaggttcccaagcaatttcacgtacatggctggtaagtgactgatctttccccccgcttggtagcctcacagatgagtcttggatgcattcacagtcatttctggtctgtgcaccaaaggatgcattcagtgacctatgaaaaaccctactgaagggtccagagaccctggtgctcaccttagcctttgtctttgagcaaataacttaccttcttccttcttatgcctgggttttctcacacttaaatctgtactactgtttgccaatgtctgatgtgtgtatccctggttcacaagaagattttagatggtattcaaattaatattttctatttagttatatatttaatgtataatataaaaatatgattagcatattgacctgtagtttgatagatgttctgtctaggataaagctaactgtaaaaaaaaatagtgaatcagtttaaagaaaaacataacgtaaaagtgggcacagatccagagaggtagcaaaaatcacaggggtggttccatgaatggctgacacttaggaaactctgaattaggccatcctcgagactagcccaccattcacctctgttcatcccccgtgggctcataatcgttttcatttcacctttgatttggaaggaagaagtttcttgcccaaatgcctggatgtgtctgcttgactttcagaacttctcacctcagccctaaagagggagcctgtgggttctcagagagatatcacaatttgagtcccaaagaagaggccagatacccacccaccttcccccaaatcttaagcacctgcgccagtacagtcaagaagaggaaagtgtgtgaagacccaggtctggctctgccacttgcctggccatgtcaccttgaagctgtgacctgactccctatattgtttcctcagttgtagaccaaaggcaatggtgtctgccctcctaccttagaagacaaatgcaagggcatttcaccacagagaggacctttgtgctcactttggcccaggaggcagtgatgctcatggttgcatgactttatgagtcgctgggccagggtgaggacctgggcctcctgactcctggcccagagttcttgtccatcagttcatactgcaattttatgtgaaagcattatgactgtcctacccatgggagagtaaatgtagattgaatgctaggagtcttaaagctggagagtatagattttgaggtccccatttgggaaacatgtgccagaaatgtctaggtgtttaataaaacagatattggattatctc

SEQ ID NO: 1722 - protein, 515 aa, Homo sapiens
MWRLPGLLGRALPRTLGPSLWRVTPKSTSPDGPQTTSSTLLVPVPNLDRSGPHGPGTSGGPRSHGWKDAFQWMSSRVSPNTLWDAISWGTLAVLALQLARQIHFQASLPAGPQRVEHCSWHSPLDRFFSSPLWHPCSSLRQHILPSPDGPAPRHTGLREPRLGQEEASAQPRNFSHNSLRGARPQDPSEEGPGDFGFLHASSSIESEAKPAQPQPTGEKEQDKSKTLSLEEAVTSIQQLFQLSVSIAFNFLGTENMKSGDHTAAFSYFQKAAARGYSKAQYNAGLCHEHGRGTPRDISKAVLYYQLAASQGHSLAQYRYARCLLRDPASSWNPERQRAVSLLKQAADSGLREAQAFLGVLFTKEPYLDEQRAVKYLWLAANNGDSQSRYHLGICYEKGLGVQRNLGEALRCYQQSAALGNEAAQERLRALFSMGAAAPGPSDLTVTGLKSFSSPSLCSLNTLLAGTSRLPHASSTGNLGLLCRSGHLGASLEASSRAIPPHPYPLERSVVRLGFG

SEQ ID NO: 1723 - DNA, 4192 bp, Homo sapiens
gccctcctgattctggggcctcccaggatggagcacctgaggcacagcccaggccctggggggcaacggctactgctgccctccatgctgctagcactgctgctcctgctggctccatccccaggccacgccactcgggtagtgtacaaggtgccggaggaacagccacccaacaccctcattgggagcctcgcagccgactatggttttccagatgtggggcacctgtacaagctagaggtgggtgccccgtaccttcgcgtggatggcaagacaggtgacattttcaccaccgagacctccatcgaccgtgaggggctccgtgaatgccagaaccagctccctggtgatccctgcatcctggagtttgaggtatctatcacagacctcgtgcagaatggcagcccccggctgctagagggccagatagaagtacaagacatcaatgacaacacacccaacttcgcctcaccagtcatcactctggccatccctgagaacaccaacatcggctcactcttccccatcccgctggcttcagaccgtgatgctggtcccaacggtgtggcatcctatgagctgcaggtggcagaggaccaggaggagaagcaaccacagctcattgtgatgggcaacctggaccgtgagcgctgggactcctatgacctcaccatcaaggtgcaggatggcggcagccccccacgcgccagcagtgccctgctgcgtgtcaccgtgcttgacaccaatgacaacgcccccaagtttgagcggccctcctatgaggccgaactatctgagaatagccccataggccactcggtcatccaggtgaaggccaatgactcagaccaaggtgccaatgcagaaatcgaatacacattccaccaggcgcccgaagttgtgaggcgtcttcttcgactggacaggaacactggacttatcactgttcagggcccggtggaccgtgaggacctaagcaccctgcgcttctcagtgcttgctaaggaccgaggcaccaaccccaagagtgcccgtgcccaggtggttgtgaccgtgaaggacatgaatgacaatgcccccaccattgagatccggggcatagggctagtgactcatcaagatgggatggctaacatctcagaggatgtggcagaggagacagctgtggccctggtgcaggtgtctgaccgagatgagggagagaatgcagctgtcacctgtgtggtggcaggtgatgtgcccttccagctgcgccaggccagtgagacaggcagtgacagcaagaagaagtatttcctgcagactaccaccccgctagactacgagaaggtcaaagactacaccattgagattgtggctgtggactctggcaaccccccactctccagcactaactccctcaaggtgcaggtggtggacgtcaatgacaacgcacctgtcttcactcagagtgtcactgaggtcgccttcccggaaaacaacaagcctggtgaagtgattgctgagatcactgccagtgatgctgactctggctctaatgctgagctggtttactctctggagcctgagccggctgctaagggcctcttcaccatctcacccgagactggagagatccaggtgaagacatctctggatcgggaacagcgggagagctatgagttgaaggtggtggcagctgaccggggcagtcctagcctccagggcacagccactgtccttgtcaatgtgctggactgcaatgacaatgaccccaaatttatgctgagtggctacaacttctcagtgatggagaacatgccagcactgagtccagtgggcatggtgactgtcattgatggagacaagggggagaatgcccaggtgcagctctcagtggagcaggacaacggtgactttgttatccagaatggcacaggcaccatcctatccagcctgagctttgatcgagagcaacaaagcacctacaccttccagctgaaggcagtggatggtggcgtcccacctcgctcagcttacgttggtgtcaccatcaatgtgctggacgagaatgacaacgcaccctatatcactgccccttctaacacctctcacaagctgctgaccccccagacacgtcttggtgagacggtcagccaggtggcagccgaggactttgactctggtgtcaatgctgagctgatctacagcattgcaggtggcaacccttatggactcttccagattgggtcacattcaggtgccatcaccctggagaaggagattgagcggcgccaccatgggctacaccgcctggtggtgaaggtcagtgaccgcggcaagcccccacgctatggcacagccttggtccatctttatgtcaatgagactctggccaaccgcacgctgctggagaccctcctgggccacagcctggacacgccgctggatattgacattgctggggatccagaatatgagcgctccaagcagcgtggcaacattctctttggtgtggtggctggtgtggtggccgtggccttgctcatcgccctggcggttcttgtgcgctactgcagacagcgggaggccaaaagtggttaccaggctggtaagaaggagaccaaggacctgtatgcccccaagcccagtggcaaggcctccaagggaaacaaaagcaaaggcaagaagagcaagtccccaaagcccgtgaagccagtggaggacgaggatgaggccgggctgcagaagtccctcaagttcaacctgatgagcgatgcccctggggacagtccccgcatccacctgcccctcaactacccaccaggcagccctgacctgggccgccactatcgctctaactccccactgccttccatccagctgcagccccagtcaccctcagcctccaagaagcaccaggtggtacaggacctgccacctgcaaacacattcgtgggcaccggggacaccacgtccacgggctctgagcagtactccgactacagctaccgcaccaacccccccaaataccccagcaagcagttacctcaccgccgcgtcaccttctcggccaccagccaggcccaggagctgcaggacccatcccagcacagttactatgacagtggcctggaggagtctgagacgccgtccagcaagtcatcctcagggcctcgactcggtcccctggccctgcctgaggatcactatgagcgcaccacccctgatggcagcataggagagatggagcaccccgagaatgaccttcgccctttgcctgatgtcgccatgacaggcacatgtacccgggagtgcagtgagtttggccactctgacacatgctggatgcctggccagtcatctcccagccgccggaccaagagcagcgccctcaaactctccaccttcgtgccttaccaggaccgaggagggcaggagcctgcgggcgccggcagccccagccccccggaagaccggaacaccaaaacggcccccgtgcgcctcctgccctcctacagtgccttctcccacagtagccatgattcctgcaaggactcggccaccttggaggaaatccccctgacccagacctcggacttcccacccgcagccacaccggcatctgcccagacggccaagcgcgagatctacctgtgagccccctactggccggccggcccccctcccccagccgccggccagctcccaaatggcccattccagggcctcactctccaccccttcagcgtggacttcctggccagggccccaagtgggggtatcactgacctcatgaccacgctggcccttctcccatgcagggtccaggtcctctcccctcatttccatctcccagcccccaggggccccttcccctttatggggcttcccccatctgatgcccaagagggctcctctgcaatgactgggctccttcccttgacttccagggagcaccccctcgatttgggcagatggtggagtcaagggtgggcagcgtacttctaactcattgtttccctcatggccgaccagggcggggatagcatgcccaattttagccctgaagcagggctgaactggggagcccctttccctgggagctcccagaggaaactcttgaccaccagtggctccctgaagggcttttgttaccaaaggtggggtagggacgggggtgggagtggagcggaggccttgttttcccgtg

SEQ ID NO: 1724 - DNA, 2139 bp, Homo sapiens
ggagacgcttcttcctcttgctgctcttctcgttcccgagatcagcggcggcggtgaccgcgagtgggtcggcaccgtctccggctccgggtgcgaacaatgctgactgatagcggaggcggcggcacctcctttgaggaggacctggactctgtggctccgcgatccgccccagctggggcctcggagccgcctccgccgggaggggtcggtctggggatccgcaccgtgaggctctttggggaggccgggccagcgtcgggagtcggcagcagcggcggcggcggcagcggcagcggtacgggcggaggggacgcggcgctggatttcaagttggcggctgccgtgctgaggaccgggggtggaggtggtgcctctggcagtgacgaggacgaagtgtccgaggttgaatcatttattttggaccaagaagatctggataacccagtgcttaaaacaacatcagagatattcttatcaagtactgcagaaggagcagacttacgcactgtggatccagagacacaggcacgactagaagcattgctagaagcagcaggaattggcaaattgtcaactgctgatggtaaagcttttgcagatcctgaggtactccggagactgacatcctcagttagttgtgcactggatgaagctgctgctgcactgacacggatgaaagcagaaaacagccacaatgcaggacaagtggacactcgcagtctagcagaagcttgttcagatggggatgttaatgctgttcgtaaattgctagatgaaggcagaagtgtaaatgaacatacagaagaaggagaaagcctgctgtgtttggcttgttcagcagggtattatgaattagcacaagtattgcttgctatgcatgctaatgttgaagatcgagggaataaaggagacataactcccctgatggcagcttccagtggaggttacttagatattgtgaaattattacttcttcatgatgctgatgtcaactcccagtctgcaacaggaaacactgcgctaacttatgcatgtgctggaggatttgttgacattgttaaagtgctccttaatgaaggtgcaaatatagaagatcataatgaaaatggacatactcccttaatggaagcagccagtgcaggtcatgtggaagttgcaagagttcttttagatcatggtgcaggcatcaacactcattctaatgaattcaaagaaagtgctctaacacttgcttgctacaaaggccatttggatatggttcgctttctacttgaagctggtgcagatcaagagcacaaaacagatgagatgcacactgccttaatggaggcctgcatggatggacatgtagaggtggcacgtttgcttttggatagtggtgctcaagtgaacatgcctgcagattcatttgaatctccattgacgctagctgcctgtggaggacatgttgaattggcagctctacttattgaaaggggagcaaatcttgaagaagttaatgatgaaggatacactcccttgatggaagctgcccgggaaggacatgaagaaatggtggcactactcttagcacaaggagcaaatataaatgcccagacagaagaaactcaagaaactgctcttactttggcttgctgtggaggattttctgaagttgcagactttcttattaaggcaggggctgatatagaacttggctgctccacacctctgatggaggcatctcaggagggacacctggaattggttaaatatttgctggcttctggcgctaatgtgcatgctacaacagcaacaggagacacagccttaacctatgcttgtgaaaatggacatacggatgttgcagatgttttacttcaagcaggggctgatttagacaagcaggaggacatgaagactattttggagggcatagatccggccaagcatcaggtgagggtggcctttgatgcttgtaagctactacgtaaagaatagatgttgtaggtaaccagaactctggatatctgaattccagccaagaagttccaggaccctgctgggtgacaaaggaaatcctcttcaattgaaaaagattatgaagtcccaataaaaagagatttgtattgctggtaaaaaaaaaaaaaaaaaaaa

SEQ ID NO: 1725 - protein, 435 aa, Homo sapiens
MKAENSHNAGQVDTRSLAEACSDGDVNAVRKLLDEGRSVNEHTEEGESLLCLACSAGYYELAQVLLAMHANVEDRGNKGDITPLMAASSGGYLDIVKLLLLHDADVNSQSATGNTALTYACAGGFVDIVKVLLNEGANIEDHNENGHTPLMEAASAGHVEVARVLLDHGAGINTHSNEFKESALTLACYKGHLDMVRFLLEAGADQEHKTDEMHTALMEACMDGHVEVARLLLDSGAQVNMPADSFESPLTLAACGGHVELAALLIERGANLEEVNDEGYTPLMEAAREGHEEMVALLLAQGANINAQTEETQETALTLACCGGFSEVADFLIKAGADIELGCSTPLMEASQEGHLELVKYLLASGANVHATTATGDTALTYACENGHTDVADVLLQAGADLDKQEDMKTILEGIDPAKHQVRVAFDACKLLRKE

SEQ ID NO: 1726 - DNA, 2685 bp, Homo sapiens
ggcacgagggcggggaagatggcggatgacaaggattctctgcctaagcttaaggacctggcatttctcaagaaccagctggaaagcctgcagcggcgtgtagaagacgaagtcaacagtggagtgggccaggatggctcgctgttgtcctccccgttcctcaagggattcctggctggctatgtggtggccaaactgagggcatcagcagtattgggctttgctgtgggcacctgcactggcatctatgcggctcaggcatatgctgtgcccaacgtggagaagacattaagggactatttgcagttgctacgcaaggggcccgactagctctaggtgccatggaagaggcaggatgagcagctcagccttcaggtggagacactttatctggattccccagctgtcatccatttgctatctccaactttcctgccaccttcatccttgcctcccttcctgcagattgtggacagtagttcctcagcctgcaccctggattccttcttccccttcctagctccatgggactcgccccaagactgtggcttcaaggaccaccagccccttactcttcaagccctgactgtggagttggtagatgcctctgatcctcagtattctctctggcaatgttccacggcttctccttcctgggagctggctccataacttgattttccccaaacgtgttgcaatccctgctgccccttagccacccagggtcttgtgtgggtatgagtgtagaggatgggggtatgccaggcctgggccgtcccaggcaggcccgctggaccctgatgctactcctatccactgccatgtacggtgcccatgccccattgctggcactgtgccatgtggacggccgagtgcccttccggccctcctcagccgtgctgctgactgagctgaccaagctactgttatgcgccttctcccttctggtaggctggcaagcatggccccaggggcccccaccctggcgccaggctgctcccttcgcactatcagccctgctctatggcgctaacaacaacctggtgatctatcttcagcgttacatggaccccagcacctaccaggtgctgagtaatctcaagattggaagcacagctgtgctctactgcctctgcctccggcaccgcctctctgtgcgtcaggggttagcgctgctgctgctgatggctgcgggagcctgctatgcagcagggggccttcaagttcccgggaacacccttcccagtccccctccagcagctgctgccagccccatgcccctgcatatcactccgctaggcctgctgctcctcattctgtactgcctcatctcaggcttgtcgtcagtgtacacagagctgctcatgaagcgacagcggctgcccctggcacttcagaacctcttcctctacacttttggtgtgcttctgaatctaggtctgcatgctggcggcggctctggcccaggcctcctggaaggtttctcaggatgggcagcactcgtggtgctgagccaggcactaaatggactgctcatgtctgctgtcatgaagcatggcagcagcatcacacgcctctttgtggtgtcctgctcgctggtggtcaacgccgtgctctcagcagtcctgctacggctgcagctcacagccgccttcttcctggccacattgctcattggcctggccatgcgcctgtactatggcagccgctagtccctgacaacttccaccctgattccggaccctgtagattgggcgccaccaccagatccccctcccaggccttcctccctctcccatcagcagccctgtaacaagtgccttgtgagaaaagctggagaagtgagggcagccaggttattctctggaggttggtggatgaaggggtacccctaggagatgtgaagtgtgggtttggttaaggaaatgcttaccatcccccacccccaaccaagttcttccagactaaagaattaaggtaacatcaatacctaggcctgagaaataaccccatccttgttgggcagctccctgctttgtcctgcatgaacagagttgatgaaagtggggtgtgggcaacaagtggctttccttgcctactttagtcacccagcagagccactggagctggctagtccagcccagccatggtgcatgactcttccataagggatcctcacccttccactttcatgcaagaaggcccagttgccacagattatacaaccattacccaaaccactctgacagtctcctccagttccagcaatgcctagagacatgctccctgccctctccacagtgctgctccccacacctagcctttgttctggaaaccccagagagggctgggcttgactcatctcagggaatgtagcccctgggccctggcttaagccgacactcctgacctctctgttcaccctgagggctgtcttgaagcccgctacccactctgaggctcctaggaggtaccatgcttcccactctggggcctgcccctgcctagcagtctcccagctcccaacagcctggggaagctctgcacagagtgacctgagaccaggtacaggaaacctgtagctcaatcagtgtctctttaactgcataagcaataagatcttaataaagtcttctaggctgtagggtggttcctacaaccacagcaaaaaaaaaaaaaaaaaaa

SEQ ID NO: 1727 - protein, 324 aa, Homo sapiens
MSVEDGGMPGLGRPRQARWTLMLLLSTAMYGAHAPLLALCHVDGRVPFRPSSAVLLTELTKLLLCAFSLLVGWQAWPQGPPPWRQAAPFALSALLYGANNNLVIYLQRYMDPSTYQVLSNLKIGSTAVLYCLCLRHRLSVRQGLALLLLMAAGACYAAGGLQVPGNTLPSPPPAAAASPMPLHITPLGLLLLILYCLISGLSSVYTELLMKRQRLPLALQNLFLYTFGVLLNLGLHAGGGSGPGLLEGFSGWAALVVLSQALNGLLMSAVMKHGSSITRLFVVSCSLVVNAVLSAVLLRLQLTAAFFLATLLIGLAMRLYYGSR

SEQ ID NO: 1728 - DNA, 4726 bp, Homo sapiens
cagaaagccatgtcggactcggcgcccagcgcccaagcgctaacccgctgaaagtttctcagcgaaatctcagggacgatctggaccccgctgagaggaactgcttttgagtgagatggtcccagaggcctggaggagcggactggtaagcaccgggagggtagtgggagttttgcttctgcttggtgccttgaacaaggcttccacggtcattcactatgagatcccggaggaaagagagaagggtttcgctgtgggcaacgtggtcgcgaaccttggtttggatctcggtagcctctcagcccgcaggttccgggtggtgtctggagctagccgaagattctttgaggtgaaccgggagaccggagagatgtttgtgaacgaccgtctggatcgagaggagctgtgtgggacactgccctcttgcactgtaactctggagttggtagtggagaacccgctggagctgttcagcgtggaagtggtgatccaggacatcaacgacaacaatcctgctttccctacccaggaaatgaaattggagattagcgaggccgtggctccggggacgcgctttccgctcgagagcgcgcacgatcccgatgtgggaagcaactctttacaaacctatgagctgagccgaaatgaatactttgcgcttcgcgtgcagacgcgggaggacagcaccaagtacgcggagctggtgttggagcgcgccctggaccgagaacgggagcctagtctccagttagtgctgacggcgttggacggagggaccccagctctctccgccagcctgcctattcacatcaaggtgctggacgcgaatgacaatgcgcctgtcttcaaccagtccttgtaccgggcgcgcgtcctggaggatgcaccctccggcacgcgcgtggtacaagtccttgcaacggatctggatgaaggccccaacggtgaaattatttactccttcggcagccacaaccgcgccggcgtgcggcaactattcgccttagaccttgtaaccgggatgctgacaatcaagggtcggctggacttcgaggacaccaaactccatgagatttacatccaggccaaagacaagggcgccaatcccgaaggagcacattgcaaagtgttggtggaggttgtggatgtgaatgacaacgccccggagatcacagtcacctccgtgtacagcccagtacccgaggatgcccctctggggactgtcatcgctttgctcagtgtgactgacctggatgctggcgagaacgggctggtgacctgcgaagttccaccgggtctccctttcagccttacttcttccctcaagaattacttcactttgaaaaccagtgcagacctggatcgggagactgtgccagaatacaacctcagcatcaccgcccgagacgccggaaccccttccctctcagcccttacaatagtgcgtgttcaagtgtccgacatcaatgacaaccctccacaatcttctcaatcttcctacgacgtttacattgaagaaaacaacctccccggggctccaatactaaacctaagtgtctgggaccccgacgccccgcagaatgctcggctttctttctttctcttggagcaaggagctgaaaccgggctagtgggtcgctatttcacaataaatcgtgacaatggcatagtgtcatccttagtgcccctagactatgaggatcggcgggaatttgaattaacagctcatatcagcgatgggggcaccccggtcctagccaccaacatcagcgtgaacatatttgtcactgatcgcaatgacaatgccccccaggtcctatatcctcggccaggtgggagctcggtggagatgctgcctcgaggtacctcagctggccacctagtgtcacgggtggtaggctgggacgcggatgcagggcacaatgcctggctctcctacagtctcttgggatcccctaaccagagcctttttgccatagggctgcacactggtcaaatcagtactgcccgtccagtccaagacacagattcacccaggcagactctcacggtcttgatcaaagacaatggggagccttcgctctccaccactgctaccctcactgtgtcagtaaccgaggactctcctgaagcccgagccgagttcccctctggctctgccccccgggagcagaaaaaaaatctcaccttttatctacttctttctctaatcctggtttctgtggggtttgtggtcacagtgttcggagtaatcatattcaaagtttacaagtggaagcagtctagagacctataccgagccccggtgagctcactgtaccgaacaccagggccctccttgcacgcggacgccgtgcggggaggcctgatgtcgccgcacctttaccatcaggtgtatctcaccacggactcccgccgcagcgacccgctgctgaagaaacctggtgcagccagtccactggccagccgccagaacacgctgcggagctgtgatccggtgttctataggcaggtgttgggtgcagagagcgcccctcccggacagcaagccccgcccaacacggactggcgtttctctcaggcccagagacccggcaccagcggctcccaaaatggcgatgacaccggcacctggcccaacaaccagtttgacacagagatgctgcaagccatgatcttggcgtccgccagtgaagctgctgatgggagctccaccctgggagggggtgccggcaccatgggattgagcgcccgctacggaccccagttcaccctgcagcacgtgcccgactaccgccagaatgtctacatcccaggcagcaatgccacactgaccaacgcagctggcaagcgggatggcaaggccccagcaggtggcaatggcaacaagaagaagtcgggcaagaaggagaagaagtaacatggaggccaggccaagagccacagggcggcctctccccaaccagcccagcttctccttacctgcacccaggcctcagagtttcagggctaacccccagaatactggtaggggccaaggccatgctccccttgggaaacagaaacaagtgcccagtcagcacctaccccttcccccccagggggttgaatatgcaaaagcagttccgctgggaacccccatccaatcaactgctgtacccatgggggtagtggggttactgtagacaccaagaaccatttgccacaccccgtttagttacagctgaactcctccatcttccaaatcaatcaggcccatccatcccatgcctccctcctccccaccccactccaacagttcctctttcccgagtaaggtggttggggtgttgaagtaccaagtaacctacaagcctcctagttctgaaaagttggaagggcatcatgacctcttggcctctcctttgattctcaatcttcccccaaagcatggtttggtgccagccccttcacctccttccagagcccaagatcaatgctcaagttttggaggacatgatcaccatccccatggtactgatgcttgctggatttagggagggcattttgctaccaagcctcttcccaacgccctggggaccagtcttctgttttgtttttcattgtttgacgtttccactgcatgccttgacttcccccacctcctcctcaaacaagagactccactgcatgttccaagacagtatggggtggtaagataaggaagggaagtgtgtggatgtggatggtgggggcatggacaaagcttgacacatcaagttatcaaggccttggaggaggctctgtatgtcctcaggggactgacaacatcctccagattccagccataaaccaataactaggctggacccttcccactacataatagggctcagcccaggcagccagctttgggctgagctaacaggaccaatggattaaactggcatttcagtccaaggaagctcgaagcaggtttaggaccaggtccccttgagaggtcagaggggcctctgtgggtgctgggtactccagaggtgccactggtggaagggtcagcggagccccagcaggaagggtgggccagccaggccattcttagtccctgggttggggaggcagggagctagggcagggaccaaatgaacagaaagtctcagcccaggatggggcttcttcaacagggcccctgccctcctgaagcctcagtccttcaccttgccaggtgccgtttctcttccgtgaaggccactgcccaggtccccagtgcgccccctagtggccatagcctggttaaagttccccagtgcctccttgtgcatagaccttcttctcccacccccttctgcccctgggtccccggccatccagcggggctgccagagaaccccagacctgcccttacagtagtgtagcgccccctccctctttcggctggtgtagaatagccagtagtgtagtgcggtgtgcttttacgtgatggcgggtgggcagcgggcggcgggctccgcgcagccgtctgtccttgatctgcccgcggcggcccgtgttgtgttttgtgctgtgtccacgcgctaaggcgaccccctcccccgtactgacttctcctataagcgcttctcttcgcatagtcacgtagctcccaccccaccctcttcctgtgtctcacgcaagttttatactctaatatttatatggctttttttcttcgacaaaaaaataataaaacgtttcttctgaaaagctg

SEQ ID NO: 1729 - protein, 934 aa, Homo sapiens
MVPEAWRSGLVSTGRVVGVLLLLGALNKASTVIHYEIPEEREKGFAVGNVVANLGLDLGSLSARRFRVVSGASRRFFEVNRETGEMFVNDRLDREELCGTLPSCTVTLELVVENPLELFSVEVVIQDINDNNPAFPTQEMKLEISEAVAPGTRFPLESAHDPDVGSNSLQTYELSRNEYFALRVQTREDSTKYAELVLERALDREREPSLQLVLTALDGGTPALSASLPIHIKVLDANDNAPVFNQSLYRARVLEDAPSGTRVVQVLATDLDEGPNGEIIYSFGSHNRAGVRQLFALDLVTGMLTIKGRLDFEDTKLHEIYIQAKDKGANPEGAHCKVLVEVVDVNDNAPEITVTSVYSPVPEDAPLGTVIALLSVTDLDAGENGLVTCEVPPGLPFSLTSSLKNYFTLKTSADLDRETVPEYNLSITARDAGTPSLSALTIVRVQVSDINDNPPQSSQSSYDVYIEENNLPGAPILNLSVWDPDAPQNARLSFFLLEQGAETGLVGRYFTINRDNGIVSSLVPLDYEDRREFELTAHISDGGTPVLATNISVNIFVTDRNDNAPQVLYPRPGGSSVEMLPRGTSAGHLVSRVVGWDADAGHNAWLSYSLLGSPNQSLFAIGLHTGQISTARPVQDTDSPRQTLTVLIKDNGEPSLSTTATLTVSVTEDSPEARAEFPSGSAPREQKKNLTFYLLLSLILVSVGFVVTVFGVIIFKVYKWKQSRDLYRAPVSSLYRTPGPSLHADAVRGGLMSPHLYHQVYLTTDSRRSDPLLKKPGAASPLASRQNTLRSCDPVFYRQVLGAESAPPGQQAPPNTDWRFSQAQRPGTSGSQNGDDTGTWPNNQFDTEMLQAMILASASEAADGSSTLGGGAGTMGLSARYGPQFTLQHVPDYRQNVYIPGSNATLTNAAGKRDGKAPAGGNGNKKKSGKKEKK

SEQ ID NO: 1730 - DNA, 4774 bp, Homo sapiens
acgcgcctgaagcacaaagcagatagctaggaatgaaccatccctgggagtatgtggaaacaacggaggagctctgacttcccaactgtcccattctatgggcgaaggaactgctcctgacttcagtggttaagggcagaattgaaaataattctggaggaagataagaatgattcctgcgcgactgcaccgggactacaaagggcttgtcctgctgggaatcctcctggggactctgtgggagaccggatgcacccagatacgctattcagttccggaagagctggagaaaggctctagggtgggcgacatctccagggacctggggctggagccccgggagctcgcggagcgcggagtccgcatcatccccagaggtaggacgcagcttttcgccctgaatccgcgcagcggcagcttggtcacggcgggcaggatagaccgggaggagctctgtatgggggccatcaagtgtcaattaaatctagacattctgatggaggataaagtgaaaatatatggagtagaagtagaagtaagggacattaacgacaatgcgccttactttcgtgaaagtgaattagaaataaaaattagtgaaaatgcagccactgagatgcggttccctctaccccacgcctgggatccggatatcgggaagaactctctgcagagctacgagctcagcccgaacactcacttctccctcatcgtgcaaaatggagccgacggtagtaagtaccccgaattggtgctgaaacgcgccctggaccgcgaagaaaaggctgctcaccacctggtccttacggcctccgacgggggcgacccggtgcgcacaggcaccgcgcgcatccgcgtgatggttctggatgcgaacgacaacgcaccagcgtttgctcagcccgagtaccgcgcgagcgttccggagaatctggccttgggcacgcagctgcttgtagtcaacgctaccgaccctgacgaaggagtcaatgcggaagtgaggtattccttccggtatgtggacgacaaggcggcccaagttttcaaactagattgtaattcagggacaatatcaacaataggggagttggaccacgaggagtcaggattctaccagatggaagtgcaagcaatggataatgcaggatattctgcgcgagccaaagtcctgatcactgttctggacgtgaacgacaatgccccagaagtggtcctcacctctctcgccagctcggttcccgaaaactctcccagagggacattaattgcccttttaaatgtaaatgaccaagattctgaggaaaacggacaggtgatctgtttcatccaaggaaatctgccctttaaattagaaaaatcttacggaaattactatagtttagtcacagacatagtcttggatagggaacaggttcctagctacaacatcacagtgaccgccactgaccggggaaccccgcccctatccacggaaactcatatctcgctgaacgtggcagacaccaacgacaacccgccggtcttccctcaggcctcctattccgcttatatcccagagaacaatcccagaggagtttccctcgtctctgtgaccgcccacgaccccgactgtgaagagaacgcccagatcacttattccctggctgagaacaccatccaaggggcaagcctatcgtcctacgtgtccatcaactccgacactggggtactgtatgcgctgagctccttcgactacgagcagttccgagacttgcaagtgaaagtgatggcgcgggacaacgggcacccgcccctcagcagcaacgtgtcgttgagcctgttcgtgctggaccagaacgacaatgcgcccgagatcctgtaccccgccctccccacggacggttccactggcgtggagctggctccccgctccgcagagcccggctacctggtgaccaaggtggtggcggtggacagagactccggccagaacgcctggctgtcctaccgtctgctcaaggccagcgagccgggactcttctcggtgggtctgcacacgggcgaggtgcgcacggcgcgagccctgctggacagagacgcgctcaagcagagcctcgtagtggccgtccaggaccacggccagccccctctctccgccactgtcacgctcaccgtggccgtggccgacagcatcccccaagtcctggcggacctcggcagcctcgagtctccagctaactctgaaacctcagacctcactctgtacctggtggtagcggtggccgcggtctcctgcgtcttcctggccttcgtcatcttgctgctggcgctcaggctgcggcgctggcacaagtcacgcctgctgcaggcttcaggaggcggcttgacaggagcgccggcgtcgcactttgtgggcgtggacggggtgcaggctttcctgcagacctattcccacgaggtttccctcaccacggactcgcggaagagtcacctgatcttcccccagcccaactatgcagacatgctcgtcagccaggagagctttgaaaaaagcgagccccttttgctgtcaggtgattcggtattttctaaagacagtcatgggttaattgagcaagccccgcccaacacggactggcgtttctctcaggcccagagacccggcaccagcggctcccaaaatggcgatgacaccggcacctggcccaacaaccagtttgacacagagatgctgcaagccatgatcttggcgtccgccagtgaagctgctgatgggagctccaccctgggagggggtgccggcaccatgggattgagcgcccgctacggaccccagttcaccctgcagcacgtgcccgactaccgccagaatgtctacatcccaggcagcaatgccacactgaccaacgcagctggcaagcgggatggcaaggccccagcaggtggcaatggcaacaagaagaagtcgggcaagaaggagaagaagtaacatggaggccaggccaagagccacagggcggcctctccccaaccagcccagcttctccttacctgcacccaggcctcagagtttcagggctaacccccagaatactggtaggggccaaggccatgctccccttgggaaacagaaacaagtgcccagtcagcacctaccccttcccccccagggggttgaatatgcaaaagcagttccgctgggaacccccatccaatcaactgctgtacccatgggggtagtggggttactgtagacaccaagaaccatttgccacaccccgtttagttacagctgaactcctccatcttccaaatcaatcaggcccatccatcccatgcctccctcctccccaccccactccaacagttcctctttcccgagtaaggtggttggggtgttgaagtaccaagtaacctacaagcctcctagttctgaaaagttggaagggcatcatgacctcttggcctctcctttgattctcaatcttcccccaaagcatggtttggtgccagccccttcacctccttccagagcccaagatcaatgctcaagttttggaggacatgatcaccatccccatggtactgatgcttgctggatttagggagggcattttgctaccaagcctcttcccaacgccctggggaccagtcttctgttttgtttttcattgtttgacgtttccactgcatgccttgacttcccccacctcctcctcaaacaagagactccactgcatgttccaagacagtatggggtggtaagataaggaagggaagtgtgtggatgtggatggtgggggcatggacaaagcttgacacatcaagttatcaaggccttggaggaggctctgtatgtcctcaggggactgacaacatcctccagattccagccataaaccaataactaggctggacccttcccactacataatagggctcagcccaggcagccagctttgggctgagctaacaggaccaatggattaaactggcatttcagtccaaggaagctcgaagcaggtttaggaccaggtccccttgagaggtcagaggggcctctgtgggtgctgggtactccagaggtgccactggtggaagggtcagcggagccccagcaggaagggtgggccagccaggccattcttagtccctgggttggggaggcagggagctagggcagggaccaaatgaacagaaagtctcagcccaggatggggcttcttcaacagggcccctgccctcctgaagcctcagtccttcaccttgccaggtgccgtttctcttccgtgaaggccactgcccaggtccccagtgcgccccctagtggccatagcctggttaaagttccccagtgcctccttgtgcatagaccttcttctcccacccccttctgcccctgggtccccggccatccagcggggctgccagagaaccccagacctgcccttacagtagtgtagcgccccctccctctttcggctggtgtagaatagccagtagtgtagtgcggtgtgcttttacgtgatggcgggtgggcagcgggcggcgggctccgcgcagccgtctgtccttgatctgcccgcggcggcccgtgttgtgttttgtgctgtgtccacgcgctaaggcgaccccctcccccgtactgacttctcctataagcgcttctcttcgcatagtcacgtagctcccaccccaccctcttcctgtgtctcacgcaagttttatactctaatatttatatggctttttttcttcgacaaaaaaataataaaacgtttcttctgaaaagctg

SEQ ID NO: 1731 - protein, 932 aa, Homo sapiens
MIPARLHRDYKGLVLLGILLGTLWETGCTQIRYSVPEELEKGSRVGDISRDLGLEPRELAERGVRIIPRGRTQLFALNPRSGSLVTAGRIDREELCMGAIKCQLNLDILMEDKVKIYGVEVEVRDINDNAPYFRESELEIKISENAATEMRFPLPHAWDPDIGKNSLQSYELSPNTHFSLIVQNGADGSKYPELVLKRALDREEKAAHHLVLTASDGGDPVRTGTARIRVMVLDANDNAPAFAQPEYRASVPENLALGTQLLVVNATDPDEGVNAEVRYSFRYVDDKAAQVFKLDCNSGTISTIGELDHEESGFYQMEVQAMDNAGYSARAKVLITVLDVNDNAPEVVLTSLASSVPENSPRGTLIALLNVNDQDSEENGQVICFIQGNLPFKLEKSYGNYYSLVTDIVLDREQVPSYNITVTATDRGTPPLSTETHISLNVADTNDNPPVFPQASYSAYIPENNPRGVSLVSVTAHDPDCEENAQITYSLAENTIQGASLSSYVSINSDTGVLYALSSFDYEQFRDLQVKVMARDNGHPPLSSNVSLSLFVLDQNDNAPEILYPALPTDGSTGVELAPRSAEPGYLVTKVVAVDRDSGQNAWLSYRLLKASEPGLFSVGLHTGEVRTARALLDRDALKQSLVVAVQDHGQPPLSATVTLTVAVADSIPQVLADLGSLESPANSETSDLTLYLVVAVAAVSCVFLAFVILLLALRLRRWHKSRLLQASGGGLTGAPASHFVGVDGVQAFLQTYSHEVSLTTDSRKSHLIFPQPNYADMLVSQESFEKSEPLLLSGDSVFSKDSHGLIEQAPPNTDWRFSQAQRPGTSGSQNGDDTGTWPNNQFDTEMLQAMILASASEAADGSSTLGGGAGTMGLSARYGPQFTLQHVPDYRQNVYIPGSNATLTNAAGKRDGKAPAGGNGNKKKSGKKEKK

SEQ ID NO: 1732 - DNA, 4578 bp, Homo sapiens
atggggagcggcgccggggagctgggccgggctgagaggctgccagtgctctttctcttcctgctgtctttgttctgcccggcgctctgtgagcagatccgctacaggattcccgaggaaatgcccaagggctccgtagtggggaacctcgccacggacctggggttcagcgtccaggagttaccgactcgaaaactgcgcgtcagttcggagaagccttacttcaccgtgagcgcagagagcggggagttgcttgtgagcagcaggctagacagggaggagatatgcgggaagaagccagcttgtgctctggaatttgaggctgttgctgaaaatccactgaacttttatcacgtgaatgtggagatcgaggacattaatgaccacacgccaaaattcacgcaaaattcctttgagctgcaaataagtgagtctgcacagcctggcacacgatttatattaggatctgcccatgatgcggatattggtagcaacacactgcagaattaccaactcagtcccagtgatcatttctcactgataaataaagagaaatcagatggcagtaaataccctgagatggtattgaagacacctttggacagagaaaagcagaaatcctaccacttgactttgactgccttggactttggagctccacccctaagcagcactgcacagatacacgttctagtgactgatgccaatgataatgctccagtgttcagtcaagacgtatacagggtgagcctttcagaaaacgtgtacccggggaccacggtgctacaggtgactgccacggaccaggatgagggtgtcaatgccgagattactttctctttcagtgaagctagccagatcacccaatttgacctgaactctaacaccggggaaattactgttttaaatacattagattttgaagaagtcaaagaatattccatagttttggaagcaagggacggtggaggaatgattgcgcaatgcacagtggaggtagaagtcatagatgaaaatgacaacgccccagaagtgatattccagtctctacccaacctaattatggaggacgccgagctgggaacacatattgctttgctcaaagtccgtgacaaggattccagacacaatggagaagtgacttgtaaattggaaggtgatgttccatttaaaatattaacttcttcaagaaacacgtataaattagtgacagatgctgttctagaccgcgagcagaatccagagtacaatataaccgttacggcaacagatcggggcaagcctcccctctcctccagttccagcatcaccctgcacattggtgatgtaaatgacaacgctccggttttctcacagtcttcctatatagtccacgtggccgagaacaacccgcctggagcctctatttcacaagtcagggcttctgatccggacttggggcccaacggccaagtctcttactgcatcatggccagtgacctggagcagcgggagctgtcatcctacgtgtccataagcgcggagagcggggtggtgttcgcgcagcgcgccttcgaccacgagcagctgcgcgccttcgaactcacactgcaggcccgcgaccagggctcgccagcgctcagcgcgaacgtgagcctgcgcgtgttagtggacgaccgcaacgacaatgcgccacgggtgctgtaccccgcgctgggtcccgacggctctgcgctcttcgatatggtgccgcacgctgcagagcctggctacttggtgaccaaggtagtggcggtggacgcagactcaggacacaacgcctggctgtcctaccacgtgctgcaggctagcgagcccgggctcttcagcctggggctgcgcacgggcgaagtgcgcacagcgcgtgccttaggcgacagggacgccgtccgccagcgccttctggtcgccgtgcgtgacggtggacagccaccactctcggccactgccacgttgcacctggtcttcgccgacagcttgcaggaggtgctgccggatatcactgaccgccccgacccctctgacctccaggctgagctgcagttttacctagtggtggccttggccttgatctcagtgctcttcctcgtggccatgattctggccattgccttgcgcctgcgacgctcctccagccccgcctcctggagctgcttccagcctggtctctgtgttaaatccgaatccgtggttccccccaactacagcgaggggactttgccttattcctacaatctatgtgttgcacatacaggaaagacggagtttaatttcctaaaatgtagtgagcagttgagttcaggacaagacatactttgcggtgattcatctggggccttatttccactttgtaattccagtgaattgacttcccatcagcaagccccgcccaacacggactggcgtttctctcaggcccagagacccggcaccagcggctcccaaaatggcgatgacaccggcacctggcccaacaaccagtttgacacagagatgctgcaagccatgatcttggcgtccgccagtgaagctgctgatgggagctccaccctgggagggggtgccggcaccatgggattgagcgcccgctacggaccccagttcaccctgcagcacgtgcccgactaccgccagaatgtctacatcccaggcagcaatgccacactgaccaacgcagctggcaagcgggatggcaaggccccagcaggtggcaatggcaacaagaagaagtcgggcaagaaggagaagaagtaacatggaggccaggccaagagccacagggcggcctctccccaaccagcccagcttctccttacctgcacccaggcctcagagtttcagggctaacccccagaatactggtaggggccaaggccatgctccccttgggaaacagaaacaagtgcccagtcagcacctaccccttcccccccagggggttgaatatgcaaaagcagttccgctgggaacccccatccaatcaactgctgtacccatgggggtagtggggttactgtagacaccaagaaccatttgccacaccccgtttagttacagctgaactcctccatcttccaaatcaatcaggcccatccatcccatgcctccctcctccccaccccactccaacagttcctctttcccgagtaaggtggttggggtgttgaagtaccaagtaacctacaagcctcctagttctgaaaagttggaagggcatcatgacctcttggcctctcctttgattctcaatcttcccccaaagcatggtttggtgccagccccttcacctccttccagagcccaagatcaatgctcaagttttggaggacatgatcaccatccccatggtactgatgcttgctggatttagggagggcattttgctaccaagcctcttcccaacgccctggggaccagtcttctgttttgtttttcattgtttgacgtttccactgcatgccttgacttcccccacctcctcctcaaacaagagactccactgcatgttccaagacagtatggggtggtaagataaggaagggaagtgtgtggatgtggatggtgggggcatggacaaagcttgacacatcaagttatcaaggccttggaggaggctctgtatgtcctcaggggactgacaacatcctccagattccagccataaaccaataactaggctggacccttcccactacataatagggctcagcccaggcagccagctttgggctgagctaacaggaccaatggattaaactggcatttcagtccaaggaagctcgaagcaggtttaggaccaggtccccttgagaggtcagaggggcctctgtgggtgctgggtactccagaggtgccactggtggaagggtcagcggagccccagcaggaagggtgggccagccaggccattcttagtccctgggttggggaggcagggagctagggcagggaccaaatgaacagaaagtctcagcccaggatggggcttcttcaacagggcccctgccctcctgaagcctcagtccttcaccttgccaggtgccgtttctcttccgtgaaggccactgcccaggtccccagtgcgccccctagtggccatagcctggttaaagttccccagtgcctccttgtgcatagaccttcttctcccacccccttctgcccctgggtccccggccatccagcggggctgccagagaaccccagacctgcccttacagtagtgtagcgccccctccctctttcggctggtgtagaatagccagtagtgtagtgcggtgtgcttttacgtgatggcgggtgggcagcgggcggcgggctccgcgcagccgtctgtccttgatctgcccgcggcggcccgtgttgtgttttgtgctgtgtccacgcgctaaggcgaccccctcccccgtactgacttctcctataagcgcttctcttcgcatagtcacgtagctcccaccccaccctcttcctgtgtctcacgcaagttttatactctaatatttatatggctttttttcttcgacaaaaaaataataaaacgtttcttctgaaaagctg

SEQ ID NO: 1733 - protein, 923 aa, Homo sapiens
MGSGAGELGRAERLPVLFLFLLSLFCPALCEQIRYRIPEEMPKGSVVGNLATDLGFSVQELPTRKLRVSSEKPYFTVSAESGELLVSSRLDREEICGKKPACALEFEAVAENPLNFYHVNVEIEDINDHTPKFTQNSFELQISESAQPGTRFILGSAHDADIGSNTLQNYQLSPSDHFSLINKEKSDGSKYPEMVLKTPLDREKQKSYHLTLTALDFGAPPLSSTAQIHVLVTDANDNAPVFSQDVYRVSLSENVYPGTTVLQVTATDQDEGVNAEITFSFSEASQITQFDLNSNTGEITVLNTLDFEEVKEYSIVLEARDGGGMIAQCTVEVEVIDENDNAPEVIFQSLPNLIMEDAELGTHIALLKVRDKDSRHNGEVTCKLEGDVPFKILTSSRNTYKLVTDAVLDREQNPEYNITVTATDRGKPPLSSSSSITLHIGDVNDNAPVFSQSSYIVHVAENNPPGASISQVRASDPDLGPNGQVSYCIMASDLEQRELSSYVSISAESGVVFAQRAFDHEQLRAFELTLQARDQGSPALSANVSLRVLVDDRNDNAPRVLYPALGPDGSALFDMVPHAAEPGYLVTKVVAVDADSGHNAWLSYHVLQASEPGLFSLGLRTGEVRTARALGDRDAVRQRLLVAVRDGGQPPLSATATLHLVFADSLQEVLPDITDRPDPSDLQAELQFYLVVALALISVLFLVAMILAIALRLRRSSSPASWSCFQPGLCVKSESVVPPNYSEGTLPYSYNLCVAHTGKTEFNFLKCSEQLSSGQDILCGDSSGALFPLCNSSELTSHQQAPPNTDWRFSQAQRPGTSGSQNGDDTGTWPNNQFDTEMLQAMILASASEAADGSSTLGGGAGTMGLSARYGPQFTLQHVPDYRQNVYIPGSNATLTNAAGKRDGKAPAGGNGNKKKSGKKEKK

SEQ ID NO: 1734 - DNA, 4602 bp, Homo sapiens
atgaagattcagaaaaagctgactggctgcagcaggctgatgcttctgtgtctttctctggagctgctgttggaagctggggctgggaatattcactactcagtgccggaagagacagacaaaggttccttcgtaggcaacatcgccaaggacctagggctgcaaccccaggagctggcagatggcggagtccgcatcgtctccagaggtaggatgccgcttttcgctctgaatcctagaagtggcagcttgatcaccgcgcgcaggatagaccgggaggagctctgcgctcagagcatgccgtgtctcgtgagttttaatatccttgttgaggataaaatgaagctttttcctgttgaagtagaaataattgatattaatgacaacactccccaattccagttagaggaactggagtttaaaatgaatgaaataacgactccaggtaccagagtctcattgccttttgggcaagaccttgatgtgggtatgaactcactccagagctaccaactcagctctaaccctcatttctccctggatgtgcaacagggagccgatgggcctcaacatccagagatggtgctgcagagtcccttagacagagaagaagaagctgtccaccacctcatcctcacagcttctgatgggggtgaaccagtccgttcagggaccctcagaatttacattcaggtggtggatgcaaatgacaatcctccagcatttactcaggcacaataccatataaatgtccccgaaaacgtgccgctgggtactcagctgctcatggtaaatgccactgaccctgatgagggagccaatggggaagtaacgtactcctttcacaatgtagaccacagagtggcccaaatatttcgtttagattcttacacaggagaaatatcaaataaagaaccactagatttcgaagaatacaaaatgtattcaatggaagttcaagcccaggatggtgcggggctcatggctaaagttaaggtactgatcaaagttttggatgtaaatgataatgccccagaagtgaccatcacctctgtcaccactgcagttccagaaaactttcctcctgggaccataattgctcttatcagtgtgcatgaccaggactcaggagacaatggctacaccacatgtttcattcctggaaatttaccctttaaattggaaaagttagttgataattattaccgtttagtgactgaaagaacactggacagagaacttatctctgggtacaacatcacaataacagcaatagaccaaggaactccagctctatctactgaaactcacatttcactactagtgacagatatcaatgacaactccccagtcttccatcaggactcctactctgcctacattcccgaaaacaaccccagaggagcctccatcttctctgtgagggcccacgacttggacagcaatgagaatgcacaaatcacttactccctaatagaggacactatccagggggcacccctatctgcctacctctccatcaactccgacactggggtcctgtatgcgctgcgatccttcgactatgagcagttccgggacatgcaactgaaagtgatggcgcgggacagtggggatccgcccctcagcagcaacgtgtctctcagcctattcctgctggaccagaacgacaacgcgcccgagatcctgtaccccgccctccccacagatggttctaccggcgtggagctggcgcccctctccgcagagcccggctacctggtgaccaaggtggtggcggtggacagagactcgggccagaacgcctggctgtcctaccgcctgctcaaggccagcgagccgggactcttctcggtgggtctgcacacgggcgaggtgcgcacggcgcgagccctgctggacagagacgcgctcaagcagagtctcgtggtggccgtccaggaccacggccagcccccgctctccgccactgtcacgctcaccgtggccgtggccgacaggatctccgacatcctggccgacctgggcagcctcgagccctccgccaaacccaacgattcggacctcactctgtacctggtggtggcggcggccgcggtctcctgcgtcttcctggccttcgtcatcgtgctgctggcgcacaggctgcggcgctggcacaagtcacgtctgctacaggcttcgggaggcggcttagcgagcatgcccggttcgcactttgtgggcgtggacggggttcgggctttcctgcagacctattcccacgaggtctccctcactgcggactcgcggaagagccacctgattttcccccagcccaactatgcggacacactcatcagccaggagagctgtgagaaaaagggttttctatcagcaccccagtctttacttgaagacaaaaaggaaccattttctcagcaagccccgcccaacacggactggcgtttctctcaggcccagagacccggcaccagcggctcccaaaatggcgatgacaccggcacctggcccaacaaccagtttgacacagagatgctgcaagccatgatcttggcgtccgccagtgaagctgctgatgggagctccaccctgggagggggtgccggcaccatgggattgagcgcccgctacggaccccagttcaccctgcagcacgtgcccgactaccgccagaatgtctacatcccaggcagcaatgccacactgaccaacgcagctggcaagcgggatggcaaggccccagcaggtggcaatggcaacaagaagaagtcgggcaagaaggagaagaagtaacatggaggccaggccaagagccacagggcggcctctccccaaccagcccagcttctccttacctgcacccaggcctcagagtttcagggctaacccccagaatactggtaggggccaaggccatgctccccttgggaaacagaaacaagtgcccagtcagcacctaccccttcccccccagggggttgaatatgcaaaagcagttccgctgggaacccccatccaatcaactgctgtacccatgggggtagtggggttactgtagacaccaagaaccatttgccacaccccgtttagttacagctgaactcctccatcttccaaatcaatcaggcccatccatcccatgcctccctcctccccaccccactccaacagttcctctttcccgagtaaggtggttggggtgttgaagtaccaagtaacctacaagcctcctagttctgaaaagttggaagggcatcatgacctcttggcctctcctttgattctcaatcttcccccaaagcatggtttggtgccagccccttcacctccttccagagcccaagatcaatgctcaagttttggaggacatgatcaccatccccatggtactgatgcttgctggatttagggagggcattttgctaccaagcctcttcccaacgccctggggaccagtcttctgttttgtttttcattgtttgacgtttccactgcatgccttgacttcccccacctcctcctcaaacaagagactccactgcatgttccaagacagtatggggtggtaagataaggaagggaagtgtgtggatgtggatggtgggggcatggacaaagcttgacacatcaagttatcaaggccttggaggaggctctgtatgtcctcaggggactgacaacatcctccagattccagccataaaccaataactaggctggacccttcccactacataatagggctcagcccaggcagccagctttgggctgagctaacaggaccaatggattaaactggcatttcagtccaaggaagctcgaagcaggtttaggaccaggtccccttgagaggtcagaggggcctctgtgggtgctgggtactccagaggtgccactggtggaagggtcagcggagccccagcaggaagggtgggccagccaggccattcttagtccctgggttggggaggcagggagctagggcagggaccaaatgaacagaaagtctcagcccaggatggggcttcttcaacagggcccctgccctcctgaagcctcagtccttcaccttgccaggtgccgtttctcttccgtgaaggccactgcccaggtccccagtgcgccccctagtggccatagcctggttaaagttccccagtgcctccttgtgcatagaccttcttctcccacccccttctgcccctgggtccccggccatccagcggggctgccagagaaccccagacctgcccttacagtagtgtagcgccccctccctctttcggctggtgtagaatagccagtagtgtagtgcggtgtgcttttacgtgatggcgggtgggcagcgggcggcgggctccgcgcagccgtctgtccttgatctgcccgcggcggcccgtgttgtgttttgtgctgtgtccacgcgctaaggcgaccccctcccccgtactgacttctcctataagcgcttctcttcgcatagtcacgtagctcccaccccaccctcttcctgtgtctcacgcaagttttatactctaatatttatatggctttttttcttcgacaaaaaaataataaaacgtttcttctgaaaagctg

SEQ ID NO: 1735 - protein, 931 aa, Homo sapiens
MKIQKKLTGCSRLMLLCLSLELLLEAGAGNIHYSVPEETDKGSFVGNIAKDLGLQPQELADGGVRIVSRGRMPLFALNPRSGSLITARRIDREELCAQSMPCLVSFNILVEDKMKLFPVEVEIIDINDNTPQFQLEELEFKMNEITTPGTRVSLPFGQDLDVGMNSLQSYQLSSNPHFSLDVQQGADGPQHPEMVLQSPLDREEEAVHHLILTASDGGEPVRSGTLRIYIQVVDANDNPPAFTQAQYHINVPENVPLGTQLLMVNATDPDEGANGEVTYSFHNVDHRVAQIFRLDSYTGEISNKEPLDFEEYKMYSMEVQAQDGAGLMAKVKVLIKVLDVNDNAPEVTITSVTTAVPENFPPGTIIALISVHDQDSGDNGYTTCFIPGNLPFKLEKLVDNYYRLVTERTLDRELISGYNITITAIDQGTPALSTETHISLLVTDINDNSPVFHQDSYSAYIPENNPRGASIFSVRAHDLDSNENAQITYSLIEDTIQGAPLSAYLSINSDTGVLYALRSFDYEQFRDMQLKVMARDSGDPPLSSNVSLSLFLLDQNDNAPEILYPALPTDGSTGVELAPLSAEPGYLVTKVVAVDRDSGQNAWLSYRLLKASEPGLFSVGLHTGEVRTARALLDRDALKQSLVVAVQDHGQPPLSATVTLTVAVADRISDILADLGSLEPSAKPNDSDLTLYLVVAAAAVSCVFLAFVIVLLAHRLRRWHKSRLLQASGGGLASMPGSHFVGVDGVRAFLQTYSHEVSLTADSRKSHLIFPQPNYADTLISQESCEKKGFLSAPQSLLEDKKEPFSQQAPPNTDWRFSQAQRPGTSGSQNGDDTGTWPNNQFDTEMLQAMILASASEAADGSSTLGGGAGTMGLSARYGPQFTLQHVPDYRQNVYIPGSNATLTNAAGKRDGKAPAGGNGNKKKSGKKEKK

SEQ ID NO: 1736 - DNA, 4617 bp, Homo sapiens
atggccgctcaaaggaatcgctcaaaggaatcaaaggattgcagcgggctggtcctgctctgccttttcttcgggattccatgggaggctggagcccggcagatctcctactcaattcctgaggaattagagaaaggctctttcgtgggcaacatctccaaggacttgggtctggcgccccgggagctggcggagcgcggagtccgcatagtctccagaggtaggacgcagcttttctctctgaacccgcgcagcggcagcttgatcaccgcgggcaggatagaccgggaggagctctgcgctcagagcgcgcggtgcgtggtgagttttaatatccttgtggaagacagggtgaaactttttgggatagaaatagaagtaactgatatcaatgacaatgctccaaaattccaagcagaaaatctagacgtaaaaattaatgaaaatgtcgctgcgggaatgcgttttcctctcccggaagctattgatccggatgtgggcgtgaactccctgcagagctatcagctcagccccaataagcacttctccctaagagttcagagccgtgccaatggcgtcaagtacccggagctggtactggagcactccctagatcgcgaggaagaggccattcaccacctggtcctcaccgcctccgacgggggtgaccctctccgatctggcactgtccttgtcagtgtgactgtcttcgatgcaaatgacaacgcgccggtcttcaccttgccagaataccgagtgagtgttcctgagaatttgcctgtgggcactcagctgctgacagtcacagccaccgacagggacgaaggtgccaatggagaagtgacatattcattccgaaaattacctgacacgcaattgttgaagttccaactaaacaaatatactggagaaataaaaatatcagaaaatctagattatgaagaaaccggtttctatgaaatagaaatacaagcagaagatggaggagcatatcttgcaactgcaaaagtgttgattacagtagaagatgtaaatgacaacagtccagagctgaccatcacgtctctatttagtccagtgactgaagattcacctctgggaacagtcgtagcccttttaaatgtgcatgatttagactctgagcagaatggacaggtaacctgttccattttggcgtatctaccatttaaattagaaaagtccattgacagttattacagattggtgatacacagagcccttgacagggaacaggtatcctcttacaatatcacagtgacagccacagatgggggaagtcctcctctatcaacggaagctcactttatgctacaagtggcagatatcaatgacaacccacctaccttctctcaagtctcctactttacctatatcccagagaacaacgccaggggtgcctccatcttctcagtgacagcgctggacccggacagcaaagagaatgcccagattatttactccctggctgaagacaccatccagggggtacctctgtcctcatacatatccatcaactcagacactggcgtcctgtatgcactcagatccttcgactatgagcagtttcatgagctacagatgcaggtgacagccagcgacagcggggatcctccactcagcagcaacgtgtcgttgagcctgtttgtgctggaccagaacgacaatgcgcccgagatcctgtaccccgccctccccacagacggttccacaggcgtggagctggcgccccgctccgcagagcccggctacctggtgaccaaggtggtggcggtggacagagactccggccagaacgcctggctgtcctaccgtctgctcaaggccagcgagccgggactcttcgcggtgggggagcacacgggcgaggtgcgcacggcgcgagccctgctggacagagacgcgctcaagcaaagcctcgtagtggccgtccaggaccacggccagccccctctctccgccactgtcacgctcaccgtggccgtggccgacagcatcccccaagtcctggcggacctcggcagcttcgagtctccagctaactctgaaacctcagacctcactctgtacctggtggtagcggtggccgcggtctcctgcgtcttcctggccttcgtcatcgtgctgctggcgcacaggctgcggcgctggcacaagtcacgcctgctgcaggcttcaggaggcggcttgacaggtgtgtccggctcgcactttgtgggcgtggacggggttcgggctttcctgcagacctattcccacgaggtctctctcaccgcggactcgcgaaagagtcacctgatcttcccccagcccaattatgcggacacgctcatcagccaggagagctgtgagaaaaacgatcctttgtctttgttagatgattcgaagtttcctatagaggataccccattggttccacaagccccgcccaacacggactggcgtttctctcaggcccagagacccggcaccagcggctcccaaaatggcgatgacaccggcacctggcccaacaaccagtttgacacagagatgctgcaagccatgatcttggcgtccgccagtgaagctgctgatgggagctccaccctgggagggggtgccggcaccatgggattgagcgcccgctacggaccccagttcaccctgcagcacgtgcccgactaccgccagaatgtctacatcccaggcagcaatgccacactgaccaacgcagctggcaagcgggatggcaaggccccagcaggtggcaatggcaacaagaagaagtcgggcaagaaggagaagaagtaacatggaggccaggccaagagccacagggcggcctctccccaaccagcccagcttctccttacctgcacccaggcctcagagtttcagggctaacccccagaatactggtaggggccaaggccatgctccccttgggaaacagaaacaagtgcccagtcagcacctaccccttcccccccagggggttgaatatgcaaaagcagttccgctgggaacccccatccaatcaactgctgtacccatgggggtagtggggttactgtagacaccaagaaccatttgccacaccccgtttagttacagctgaactcctccatcttccaaatcaatcaggcccatccatcccatgcctccctcctccccaccccactccaacagttcctctttcccgagtaaggtggttggggtgttgaagtaccaagtaacctacaagcctcctagttctgaaaagttggaagggcatcatgacctcttggcctctcctttgattctcaatcttcccccaaagcatggtttggtgccagccccttcacctccttccagagcccaagatcaatgctcaagttttggaggacatgatcaccatccccatggtactgatgcttgctggatttagggagggcattttgctaccaagcctcttcccaacgccctggggaccagtcttctgttttgtttttcattgtttgacgtttccactgcatgccttgacttcccccacctcctcctcaaacaagagactccactgcatgttccaagacagtatggggtggtaagataaggaagggaagtgtgtggatgtggatggtgggggcatggacaaagcttgacacatcaagttatcaaggccttggaggaggctctgtatgtcctcaggggactgacaacatcctccagattccagccataaaccaataactaggctggacccttcccactacataatagggctcagcccaggcagccagctttgggctgagctaacaggaccaatggattaaactggcatttcagtccaaggaagctcgaagcaggtttaggaccaggtccccttgagaggtcagaggggcctctgtgggtgctgggtactccagaggtgccactggtggaagggtcagcggagccccagcaggaagggtgggccagccaggccattcttagtccctgggttggggaggcagggagctagggcagggaccaaatgaacagaaagtctcagcccaggatggggcttcttcaacagggcccctgccctcctgaagcctcagtccttcaccttgccaggtgccgtttctcttccgtgaaggccactgcccaggtccccagtgcgccccctagtggccatagcctggttaaagttccccagtgcctccttgtgcatagaccttcttctcccacccccttctgcccctgggtccccggccatccagcggggctgccagagaaccccagacctgcccttacagtagtgtagcgccccctccctctttcggctggtgtagaatagccagtagtgtagtgcggtgtgcttttacgtgatggcgggtgggcagcgggcggcgggctccgcgcagccgtctgtccttgatctgcccgcggcggcccgtgttgtgttttgtgctgtgtccacgcgctaaggcgaccccctcccccgtactgacttctcctataagcgcttctcttcgcatagtcacgtagctcccaccccaccctcttcctgtgtctcacgcaagttttatactctaatatttatatggctttttttcttcgacaaaaaaataataaaacgtttcttctgaaaagctg

SEQ ID NO: 1737 - protein, 936 aa, Homo sapiens
MAAQRNRSKESKDCSGLVLLCLFFGIPWEAGARQISYSIPEELEKGSFVGNISKDLGLAPRELAERGVRIVSRGRTQLFSLNPRSGSLITAGRIDREELCAQSARCVVSFNILVEDRVKLFGIEIEVTDINDNAPKFQAENLDVKINENVAAGMRFPLPEAIDPDVGVNSLQSYQLSPNKHFSLRVQSRANGVKYPELVLEHSLDREEEAIHHLVLTASDGGDPLRSGTVLVSVTVFDANDNAPVFTLPEYRVSVPENLPVGTQLLTVTATDRDEGANGEVTYSFRKLPDTQLLKFQLNKYTGEIKISENLDYEETGFYEIEIQAEDGGAYLATAKVLITVEDVNDNSPELTITSLFSPVTEDSPLGTVVALLNVHDLDSEQNGQVTCSILAYLPFKLEKSIDSYYRLVIHRALDREQVSSYNITVTATDGGSPPLSTEAHFMLQVADINDNPPTFSQVSYFTYIPENNARGASIFSVTALDPDSKENAQIIYSLAEDTIQGVPLSSYISINSDTGVLYALRSFDYEQFHELQMQVTASDSGDPPLSSNVSLSLFVLDQNDNAPEILYPALPTDGSTGVELAPRSAEPGYLVTKVVAVDRDSGQNAWLSYRLLKASEPGLFAVGEHTGEVRTARALLDRDALKQSLVVAVQDHGQPPLSATVTLTVAVADSIPQVLADLGSFESPANSETSDLTLYLVVAVAAVSCVFLAFVIVLLAHRLRRWHKSRLLQASGGGLTGVSGSHFVGVDGVRAFLQTYSHEVSLTADSRKSHLIFPQPNYADTLISQESCEKNDPLSLLDDSKFPIEDTPLVPQAPPNTDWRFSQAQRPGTSGSQNGDDTGTWPNNQFDTEMLQAMILASASEAADGSSTLGGGAGTMGLSARYGPQFTLQHVPDYRQNVYIPGSNATLTNAAGKRDGKAPAGGNGNKKKSGKKEKK

SEQ ID NO: 1738 - DNA, 4872 bp, Homo sapiens
agaatgggctctaggcgccgctgctcaccaatcagggaatgggaagctgcgcgccattgagtccctccctcccccgcctctaccacacaaagcggaatgagatggatactcacagatcctgacactggagacttagaagtattttccttcgctttctgatatattttggatgtagtcggcctaggacttcatagatacataagccgattcacaaccaaccagctcgagaaaccgcggaatatcggcttagagcctgccatggcgaatcggctacagcgcggggaccgcagtcggctgctgctgctgctgtgcattttcctggggacgctgcgggggttccgggccaggcagatccgatattcggtgccagaagagaccgaaaagggctccttcgtgggcaatatctccaaggacctggggctggagccccgggagctggcgaagcgcggagtccgcatcgtctccagagggaagacacagcttttcgctgtgaatccgcgaagcggcagcttgatcacggcaggcaggatagaccgggaggagctctgtgagacggtgtcctcctgttttttaaatatggaacttctcgtggaagacaccttgaagatttacggagtggaggtggaaataatagatattaatgataacgcccccagcttccaggaggacgaagtggagataaaagtcagtgagcacgcaattcctggggcgcgatttgctcttcctaatgctagggatccagatgtgggcgtgaactccctccagagctaccagctcagccctaataattacttttccttgcaactgcggggcagaacggatggggccaagaatccagagctagtactggagggaagcctggaccgagagaaagaggctgctcacctgctcctcctcacagctttagatggaggcgatcccatccgaaagggcgcagttcccattcgtgtggtggtcctcgatgtaaatgatcacatcccaatgtttacacagtccgtatatcgcgtgagtgttccagaaaacatcagctccggaactcgggtgctgatggttaatgcaacggatccagacgagggaatcaacggggaagtaatgtattcatttcggaacatggaaagcaaggcttctgaaatattccaattggattcacaaactggagaagttcaagtacgggggtctctggattttgaaaaatatagattctatgagatggaaattcaaggccaagatggtggaggtctctttaccaccacgacgatgttgatcactgttgtggatgtgaatgataacgctccagaaataactatcacctcttctattaattcaattctggaaaactctcctccaggtacagtgattgctcttctaaatgtgcaagatcaagattctggagaaaatggtcaagtctcctgttttattcctaaccacctgccttttaaattagaaaagacttatggaaattattacaaattgataacaagcagagtgctggacagggagttggtccagagctacaatataacgttgacagccacagaccagggaagcccgcctttgtctgcagaaactcatgtctggctgaatgtggcagatgacaacgataaccctcccgtttttcctcactcctcttactctgcctacattcccgaaaacaaccccaggggtgcctccatcttctcagtgaccgccctcgacccggacagcaaacagaatgccctggtcacttactctctgacggatgacactgtccagggggtgcctctgtcctcctatgtctctattaactccaacactggtgttctctatgccctacaatccttcgactatgagcagtttcgagacttagaactgagagtgatagcacgtgacagcggggacccgcccctcagcagcaacgtgtcgctgagcctgttcgtgctggaccagaacgacaatgcgcccgagatcctgtaccctgccctccccacagacggctccactggcgtggagctggcgccccgctctgcggaacctggctacctggtgaccaaggtggttgcggtggacaaagattcaggccagaacgcctggctgtcctatcgcctgcttaaggccagcgagccgggactcttcgcggtgggggagcacacgggcgaggtgcgtacagcgcgggcactgctggacagagacgcgctcaagcagagcctcgtggtggccgtccaggaccacggccagccccctctctcggccaccgtcacgctcaccgtggctgtggccgacagcatccccgaagtcctggcggacctcggcagcctcgagtctctggctaactctgaaacctcagacctctcgctgtacttggtggtggcggtggccgcagtctcctgcatcttcctggtctttgtcatcgtgctgctggcactcaggctgtggcgctggcataagtcacgcctgctgcaggcttctgaaggcgggttggcaggtatgcccacgtcacattttgtaggcgtggacggggtacaggctttcctgcaaacctattcccacgaggtctctctcattgcggactcgcagaagagtcacctgattttcccccagcccaactatggggacacgctcatcagccaggagagctgtgagaaaagcgagccactcttgatagctgaagactcagctatcattttaggcaaatgtgacccgacaagtaatcagcaagccccgcccaacacggactggcgtttctctcaggcccagagacccggcaccagcggctcccaaaatggcgatgacaccggcacctggcccaacaaccagtttgacacagagatgctgcaagccatgatcttggcgtccgccagtgaagctgctgatgggagctccaccctgggagggggtgccggcaccatgggattgagcgcccgctacggaccccagttcaccctgcagcacgtgcccgactaccgccagaatgtctacatcccaggcagcaatgccacactgaccaacgcagctggcaagcgggatggcaaggccccagcaggtggcaatggcaacaagaagaagtcgggcaagaaggagaagaagtaacatggaggccaggccaagagccacagggcggcctctccccaaccagcccagcttctccttacctgcacccaggcctcagagtttcagggctaacccccagaatactggtaggggccaaggccatgctccccttgggaaacagaaacaagtgcccagtcagcacctaccccttcccccccagggggttgaatatgcaaaagcagttccgctgggaacccccatccaatcaactgctgtacccatgggggtagtggggttactgtagacaccaagaaccatttgccacaccccgtttagttacagctgaactcctccatcttccaaatcaatcaggcccatccatcccatgcctccctcctccccaccccactccaacagttcctctttcccgagtaaggtggttggggtgttgaagtaccaagtaacctacaagcctcctagttctgaaaagttggaagggcatcatgacctcttggcctctcctttgattctcaatcttcccccaaagcatggtttggtgccagccccttcacctccttccagagcccaagatcaatgctcaagttttggaggacatgatcaccatccccatggtactgatgcttgctggatttagggagggcattttgctaccaagcctcttcccaacgccctggggaccagtcttctgttttgtttttcattgtttgacgtttccactgcatgccttgacttcccccacctcctcctcaaacaagagactccactgcatgttccaagacagtatggggtggtaagataaggaagggaagtgtgtggatgtggatggtgggggcatggacaaagcttgacacatcaagttatcaaggccttggaggaggctctgtatgtcctcaggggactgacaacatcctccagattccagccataaaccaataactaggctggacccttcccactacataatagggctcagcccaggcagccagctttgggctgagctaacaggaccaatggattaaactggcatttcagtccaaggaagctcgaagcaggtttaggaccaggtccccttgagaggtcagaggggcctctgtgggtgctgggtactccagaggtgccactggtggaagggtcagcggagccccagcaggaagggtgggccagccaggccattcttagtccctgggttggggaggcagggagctagggcagggaccaaatgaacagaaagtctcagcccaggatggggcttcttcaacagggcccctgccctcctgaagcctcagtccttcaccttgccaggtgccgtttctcttccgtgaaggccactgcccaggtccccagtgcgccccctagtggccatagcctggttaaagttccccagtgcctccttgtgcatagaccttcttctcccacccccttctgcccctgggtccccggccatccagcggggctgccagagaaccccagacctgcccttacagtagtgtagcgccccctccctctttcggctggtgtagaatagccagtagtgtagtgcggtgtgcttttacgtgatggcgggtgggcagcgggcggcgggctccgcgcagccgtctgtccttgatctgcccgcggcggcccgtgttgtgttttgtgctgtgtccacgcgctaaggcgaccccctcccccgtactgacttctcctataagcgcttctcttcgcatagtcacgtagctcccaccccaccctcttcctgtgtctcacgcaagttttatactctaatatttatatggctttttttcttcgacaaaaaaataataaaacgtttcttctgaaaagctg

SEQ ID NO: 1739 - protein, 935 aa, Homo sapiens
MANRLQRGDRSRLLLLLCIFLGTLRGFRARQIRYSVPEETEKGSFVGNISKDLGLEPRELAKRGVRIVSRGKTQLFAVNPRSGSLITAGRIDREELCETVSSCFLNMELLVEDTLKIYGVEVEIIDINDNAPSFQEDEVEIKVSEHAIPGARFALPNARDPDVGVNSLQSYQLSPNNYFSLQLRGRTDGAKNPELVLEGSLDREKEAAHLLLLTALDGGDPIRKGAVPIRVVVLDVNDHIPMFTQSVYRVSVPENISSGTRVLMVNATDPDEGINGEVMYSFRNMESKASEIFQLDSQTGEVQVRGSLDFEKYRFYEMEIQGQDGGGLFTTTTMLITVVDVNDNAPEITITSSINSILENSPPGTVIALLNVQDQDSGENGQVSCFIPNHLPFKLEKTYGNYYKLITSRVLDRELVQSYNITLTATDQGSPPLSAETHVWLNVADDNDNPPVFPHSSYSAYIPENNPRGASIFSVTALDPDSKQNALVTYSLTDDTVQGVPLSSYVSINSNTGVLYALQSFDYEQFRDLELRVIARDSGDPPLSSNVSLSLFVLDQNDNAPEILYPALPTDGSTGVELAPRSAEPGYLVTKVVAVDKDSGQNAWLSYRLLKASEPGLFAVGEHTGEVRTARALLDRDALKQSLVVAVQDHGQPPLSATVTLTVAVADSIPEVLADLGSLESLANSETSDLSLYLVVAVAAVSCIFLVFVIVLLALRLWRWHKSRLLQASEGGLAGMPTSHFVGVDGVQAFLQTYSHEVSLIADSQKSHLIFPQPNYGDTLISQESCEKSEPLLIAEDSAIILGKCDPTSNQQAPPNTDWRFSQAQRPGTSGSQNGDDTGTWPNNQFDTEMLQAMILASASEAADGSSTLGGGAGTMGLSARYGPQFTLQHVPDYRQNVYIPGSNATLTNAAGKRDGKAPAGGNGNKKKSGKKEKK

SEQ ID NO: 1740 - DNA, 4790 bp, Homo sapiens
aagggggtggaggtttggccctaaagcttcaggacaccaaagaaattcagtcgaacagcccaccagttctctccatagggacctgggtcccgtgaatgctggttatctcacaccctgaggaataaagattggaatccgcactggatgctggaagttgactcggagaaaattgcgacaggagggaaatggcggctctgcaaaagttgccacactgcagaaagctggtcctgctgtgcttccttttggcgaccctgtgggaggccagggccgggcagattcgctattctgtgcgggaagagatcgacagaggctccttcgtaggcaacatcgccaaggacttgggtttggagcccctggcactggcagagcagggagtccgcatcgtctccagaggtaggtcccagctctttgctctgaacccgcgaagcggcagcttggtcactgcgaacaggatagaccgggaggagctctgcgctcagagcgcaccctgtctgttgaattttaacattctgctggaggataaattgactatttattcagtagaggtggaaataacagatattaacgataatgcccctcgctttggagtagaggaactggagctaaaaatcagtgaaaccactacgccaggattccggattcctcttaagaatgcgcatgatgcagacgtaggtgagaacgcccttcagaagtacgcactcaacccaaatgaccacttctccctggacgtgcgaaggggagctgatgggaacaagtacccagaactggtgctggagcgctctctggaccgcgaggaagaggctgttcaccacctcgttctcgtggcttctgatgggggtgacccagtgctatctggcacctcccgcatctgcgtgaaggtcctggatgcgaacgacaatgcgcctgtttttacacagcccgagtaccgcataagcattccggagaatacgctcgtgggcacccggatactcacggtgaccgccactgacgcagatgagggctactacgctcaagtggtatattttctagagaaaagccctggagaaacctcagaggtatttgagcttaagtcaacatctggagaactgacaatcataaaagatctagattatgaggatgctacattccatgaaattgatattgaagctcaggatggtccgggccttctaaccagagcgaaggttatcgtcacggttctggatgtgaatgacaatgccccagaattttacatgacatctgctactagctcagtttctgaagactctcttccaggaaccataattgggctttttaatgtacatgatagagactctgggcagaacgcattcaccacctgttcactccccgaggatcttccttttaagttagaaaagtcagtagacaattactaccgactggttacaaccagagcccttgacagggaacagttttccttttacaacatcactctaaccgctaaagatggagggaacccctccctgtccacggatgctcacattttgctccaggtggcagacatcaacgacaacgcacccgccttctcccgcacatcctactccacctacattcccgaaaacaaccccagaggagcctctgtcttctcagtgacggcccatgaccccgacagcaacgacaatgctcatgtaacttactctttcgcggaggacactgttcagggggcacccttatcctcttacatctctatcaactccgacactggagtactctatgcactgcgctcctttgattatgagcagttgcgagacttgcaagtgtgggtgatagcgcgggacagcgggaaccctccactcagtagcaatgtatcattaagcctgttcgtgctggaccagaacgacaacgcgcccgagatcctgtaccctgccttccccacagacggttccactggcgtggagctggcgccccgctccgcagagcccggctacctggtgaccaaggtggtggcggtggacagagactcgggccagaacgcctggctgtcttaccacctgctcaaggccagcgagccgggactcttctcggtgggtctgcacacgggcgaggtgcgcacggcgcgagccctgctggacagagacgcgctcaagcagagcctcgtggtggccatccaggaccacggccagccccctctctccgccactgtcacgctcaccgtggccgtggccgacaggatccccgacatcctggccgacctgggcagcctcgagccctccgccatacccaacgattcggacctcactctgtacctggtggtggcggtggccgcggtctcctgcgtcttcctggccttcgtcatcgtgttgctggcgcacaggctgcggcgctggcacaagtcacgcctgctgcaggcttcaggaggcagcttgacaggcatgcagagctcgcactttgtgggcgtggacggggttcgggctttcctgcagacctattcccacgaggtctccctcactgcggactcgcggaagagccacctgattttcccccagcccaactatgcggacacgctcatcagccaggagagctgtgagaaaaaggattttttatcagcgcctcaatctctactcgaagaagaaagagaagaaacgttttctcagcaagccccgcccaacacggactggcgtttctctcaggcccagagacccggcaccagcggctcccaaaatggcgatgacaccggcacctggcccaacaaccagtttgacacagagatgctgcaagccatgatcttggcgtccgccagtgaagctgctgatgggagctccaccctgggagggggtgccggcaccatgggattgagcgcccgctacggaccccagttcaccctgcagcacgtgcccgactaccgccagaatgtctacatcccaggcagcaatgccacactgaccaacgcagctggcaagcgggatggcaaggccccagcaggtggcaatggcaacaagaagaagtcgggcaagaaggagaagaagtaacatggaggccaggccaagagccacagggcggcctctccccaaccagcccagcttctccttacctgcacccaggcctcagagtttcagggctaacccccagaatactggtaggggccaaggccatgctccccttgggaaacagaaacaagtgcccagtcagcacctaccccttcccccccagggggttgaatatgcaaaagcagttccgctgggaacccccatccaatcaactgctgtacccatgggggtagtggggttactgtagacaccaagaaccatttgccacaccccgtttagttacagctgaactcctccatcttccaaatcaatcaggcccatccatcccatgcctccctcctccccaccccactccaacagttcctctttcccgagtaaggtggttggggtgttgaagtaccaagtaacctacaagcctcctagttctgaaaagttggaagggcatcatgacctcttggcctctcctttgattctcaatcttcccccaaagcatggtttggtgccagccccttcacctccttccagagcccaagatcaatgctcaagttttggaggacatgatcaccatccccatggtactgatgcttgctggatttagggagggcattttgctaccaagcctcttcccaacgccctggggaccagtcttctgttttgtttttcattgtttgacgtttccactgcatgccttgacttcccccacctcctcctcaaacaagagactccactgcatgttccaagacagtatggggtggtaagataaggaagggaagtgtgtggatgtggatggtgggggcatggacaaagcttgacacatcaagttatcaaggccttggaggaggctctgtatgtcctcaggggactgacaacatcctccagattccagccataaaccaataactaggctggacccttcccactacataatagggctcagcccaggcagccagctttgggctgagctaacaggaccaatggattaaactggcatttcagtccaaggaagctcgaagcaggtttaggaccaggtccccttgagaggtcagaggggcctctgtgggtgctgggtactccagaggtgccactggtggaagggtcagcggagccccagcaggaagggtgggccagccaggccattcttagtccctgggttggggaggcagggagctagggcagggaccaaatgaacagaaagtctcagcccaggatggggcttcttcaacagggcccctgccctcctgaagcctcagtccttcaccttgccaggtgccgtttctcttccgtgaaggccactgcccaggtccccagtgcgccccctagtggccatagcctggttaaagttccccagtgcctccttgtgcatagaccttcttctcccacccccttctgcccctgggtccccggccatccagcggggctgccagagaaccccagacctgcccttacagtagtgtagcgccccctccctctttcggctggtgtagaatagccagtagtgtagtgcggtgtgcttttacgtgatggcgggtgggcagcgggcggcgggctccgcgcagccgtctgtccttgatctgcccgcggcggcccgtgttgtgttttgtgctgtgtccacgcgctaaggcgaccccctcccccgtactgacttctcctataagcgcttctcttcgcatagtcacgtagctcccaccccaccctcttcctgtgtctcacgcaagttttatactctaatatttatatggctttttttcttcgacaaaaaaataataaaacgtttcttctgaaaagctg

SEQ ID NO: 1741 - protein, 932 aa, Homo sapiens
MAALQKLPHCRKLVLLCFLLATLWEARAGQIRYSVREEIDRGSFVGNIAKDLGLEPLALAEQGVRIVSRGRSQLFALNPRSGSLVTANRIDREELCAQSAPCLLNFNILLEDKLTIYSVEVEITDINDNAPRFGVEELELKISETTTPGFRIPLKNAHDADVGENALQKYALNPNDHFSLDVRRGADGNKYPELVLERSLDREEEAVHHLVLVASDGGDPVLSGTSRICVKVLDANDNAPVFTQPEYRISIPENTLVGTRILTVTATDADEGYYAQVVYFLEKSPGETSEVFELKSTSGELTIIKDLDYEDATFHEIDIEAQDGPGLLTRAKVIVTVLDVNDNAPEFYMTSATSSVSEDSLPGTIIGLFNVHDRDSGQNAFTTCSLPEDLPFKLEKSVDNYYRLVTTRALDREQFSFYNITLTAKDGGNPSLSTDAHILLQVADINDNAPAFSRTSYSTYIPENNPRGASVFSVTAHDPDSNDNAHVTYSFAEDTVQGAPLSSYISINSDTGVLYALRSFDYEQLRDLQVWVIARDSGNPPLSSNVSLSLFVLDQNDNAPEILYPAFPTDGSTGVELAPRSAEPGYLVTKVVAVDRDSGQNAWLSYHLLKASEPGLFSVGLHTGEVRTARALLDRDALKQSLVVAIQDHGQPPLSATVTLTVAVADRIPDILADLGSLEPSAIPNDSDLTLYLVVAVAAVSCVFLAFVIVLLAHRLRRWHKSRLLQASGGSLTGMQSSHFVGVDGVRAFLQTYSHEVSLTADSRKSHLIFPQPNYADTLISQESCEKKDFLSAPQSLLEEEREETFSQQAPPNTDWRFSQAQRPGTSGSQNGDDTGTWPNNQFDTEMLQAMILASASEAADGSSTLGGGAGTMGLSARYGPQFTLQHVPDYRQNVYIPGSNATLTNAAGKRDGKAPAGGNGNKKKSGKKEKK

SEQ ID NO: 1742 - DNA, 4605 bp, Homo sapiens
atgaccaattgcctgagtttccgaaatggcagaggactggccctgctgtgcgcgctcctggggacgctgtgcgaaacaggatccggtcagatccgctactcggtgtctgaggagctagataaaggttccttcgtgggcaacatcgctaacgacctggggctagagccccgggagctggcggagcgcggagtccgcatcgtctccagaggtaggacgcagcttttctctctgaatccgcaaagcggcagcttggtcaccgcggagaggatagaccgggaggagctctgcgctcagatcccgctgtgtctggtaaaaattaacattctggttgaggataaattgaaaatttttgaagtagaaatagaaattaaagatattaatgataatgctcctaatttcccaacagaggaattggaaataaaaattggtgaactaacggttcctggaacccgatttccaattaaaactgcttttgacccagatgtaggcattaactccctgcagaactacaagcttagccccaatgactacttctctctggctgtgaatagcgtctctgagggggccaagtatccagagctggtgctggagcgggccctggaccgtgagaaaaaagaaattcaccagcttgtcctggttgcctctgatggtggcgaccctgtccactctggcaacttgcacatccaagtgatagtcctggatgcaaatgacaacccaccaatgtttactcagcctgagtaccgtgtgagtgtttgggagaacgtgcctgtgggtacccggctgctcacggtgaatgccactgaccctgacgagggattcaatgctcaagtgtcttatattctagataaaatgcctgggaaaatcgctgagattttccatcttaactcagtgagtggagaagtatcaatattaaaaagtctagattatgaggatgccatgttctatgaaattaaaattgaagcacaggatggaccaggtcttctttcaagagccaagattctagtcacggttctggatgtgaatgacaatgctccagaaattacaatcacgtctctcacaagctcagtcccagaagagggcaccgttggaagagaaattgctcttatcgacgtgcatgaccgagattctgggcagaatgggcaggttgaagtttttgtcctgggaaatctgccatttaagttagaaaaatcaatagatcaatattaccgcttagtgacggccacatccctggaccgcgaacaaatatcagaatataacattagtctgagagcctcagatgggggaagcccgccactgtccacagaaactcacatcaccctgcatgtgattgacatcaatgacaacccacccaccttccctcatttatcctactccgcctacattccagaaaacaaccccagaggagcctccatcttctcagtgacagcccaggacccagatagcaacaacaacgcccgcatcacttatgcattgaccgaggacactctccagggggcgcccctgtcctccttcgtctctatcaactccaacactggcgtcctatacgcgctgagatccttcgactacgagcaatttagagacttaaagctactggtgacagccagcgacagcgggaaccctccactcagcagcaacgtgtcgctgaacctgttcgtgctggaccagaacgacaacgcgcccgagatcctgtaccccgccctccccacagacggttccactggcgtggagctggcgcctcgctccgcagagcccggctacctggtgaccaaggtggtggcggtggacagagactcgggccagaacgcctggctgtcctaccgcctgctcaaggccagcgagccgggactcttctcggtgggtctgcacacgggcgaggtgcgcacggcgcgagccctgctggacagagacgcgctcaagcagagcctcgtggtggccgtccaggaccacggccagccccctctctccgccactgtcacgctcaccgtggccgtggccgacaggatccccgacatcctggccgacctgggcagcctcgagccctccgccaaacccaacgattcggacctcactctgtacctggtggtggcggtggccgcggtctcctgcgtcttcctggccttcgtcatcgtgctgctggcgctcaggctgcggcgctggcacaagtcacgcctgctgcaggcttcgggaggcggcttggcgagtacgcccggctcgcactttgtgggcgcggacggggttcgggctttcctgcagacctattcccacgaggtctccctcactgcggactcgcggaagagccacctgattttcccccagcccaactatgcggacacgctcatcagccaggagagctgtgagaaaagcgagcctcttctgataactcaggatttacttgaaatgaaaggagattccaacctacttcagcaagccccgcccaacacggactggcgtttctctcaggcccagagacccggcaccagcggctcccaaaatggcgatgacaccggcacctggcccaacaaccagtttgacacagagatgctgcaagccatgatcttggcgtccgccagtgaagctgctgatgggagctccaccctgggagggggtgccggcaccatgggattgagcgcccgctacggaccccagttcaccctgcagcacgtgcccgactaccgccagaatgtctacatcccaggcagcaatgccacactgaccaacgcagctggcaagcgggatggcaaggccccagcaggtggcaatggcaacaagaagaagtcgggcaagaaggagaagaagtaacatggaggccaggccaagagccacagggcggcctctccccaaccagcccagcttctccttacctgcacccaggcctcagagtttcagggctaacccccagaatactggtaggggccaaggccatgctccccttgggaaacagaaacaagtgcccagtcagcacctaccccttcccccccagggggttgaatatgcaaaagcagttccgctgggaacccccatccaatcaactgctgtacccatgggggtagtggggttactgtagacaccaagaaccatttgccacaccccgtttagttacagctgaactcctccatcttccaaatcaatcaggcccatccatcccatgcctccctcctccccaccccactccaacagttcctctttcccgagtaaggtggttggggtgttgaagtaccaagtaacctacaagcctcctagttctgaaaagttggaagggcatcatgacctcttggcctctcctttgattctcaatcttcccccaaagcatggtttggtgccagccccttcacctccttccagagcccaagatcaatgctcaagttttggaggacatgatcaccatccccatggtactgatgcttgctggatttagggagggcattttgctaccaagcctcttcccaacgccctggggaccagtcttctgttttgtttttcattgtttgacgtttccactgcatgccttgacttcccccacctcctcctcaaacaagagactccactgcatgttccaagacagtatggggtggtaagataaggaagggaagtgtgtggatgtggatggtgggggcatggacaaagcttgacacatcaagttatcaaggccttggaggaggctctgtatgtcctcaggggactgacaacatcctccagattccagccataaaccaataactaggctggacccttcccactacataatagggctcagcccaggcagccagctttgggctgagctaacaggaccaatggattaaactggcatttcagtccaaggaagctcgaagcaggtttaggaccaggtccccttgagaggtcagaggggcctctgtgggtgctgggtactccagaggtgccactggtggaagggtcagcggagccccagcaggaagggtgggccagccaggccattcttagtccctgggttggggaggcagggagctagggcagggaccaaatgaacagaaagtctcagcccaggatggggcttcttcaacagggcccctgccctcctgaagcctcagtccttcaccttgccaggtgccgtttctcttccgtgaaggccactgcccaggtccccagtgcgccccctagtggccatagcctggttaaagttccccagtgcctccttgtgcatagaccttcttctcccacccccttctgcccctgggtccccggccatccagcggggctgccagagaaccccagacctgcccttacagtagtgtagcgccccctccctctttcggctggtgtagaatagccagtagtgtagtgcggtgtgcttttacgtgatggcgggtgggcagcgggcggcgggctccgcgcagccgtctgtccttgatctgcccgcggcggcccgtgttgtgttttgtgctgtgtccacgcgctaaggcgaccccctcccccgtactgacttctcctataagcgcttctcttcgcatagtcacgtagctcccaccccaccctcttcctgtgtctcacgcaagttttatactctaatatttatatggctttttttcttcgacaaaaaaataataaaacgtttcttctgaaaagctg

SEQ ID NO: 1743 - protein, 932 aa, Homo sapiens
MTNCLSFRNGRGLALLCALLGTLCETGSGQIRYSVSEELDKGSFVGNIANDLGLEPRELAERGVRIVSRGRTQLFSLNPQSGSLVTAERIDREELCAQIPLCLVKINILVEDKLKIFEVEIEIKDINDNAPNFPTEELEIKIGELTVPGTRFPIKTAFDPDVGINSLQNYKLSPNDYFSLAVNSVSEGAKYPELVLERALDREKKEIHQLVLVASDGGDPVHSGNLHIQVIVLDANDNPPMFTQPEYRVSVWENVPVGTRLLTVNATDPDEGFNAQVSYILDKMPGKIAEIFHLNSVSGEVSILKSLDYEDAMFYEIKIEAQDGPGLLSRAKILVTVLDVNDNAPEITITSLTSSVPEEGTVGREIALIDVHDRDSGQNGQVEVFVLGNLPFKLEKSIDQYYRLVTATSLDREQISEYNISLRASDGGSPPLSTETHITLHVIDINDNPPTFPHLSYSAYIPENNPRGASIFSVTAQDPDSNNNARITYALTEDTLQGAPLSSFVSINSNTGVLYALRSFDYEQFRDLKLLVTASDSGNPPLSSNVSLNLFVLDQNDNAPEILYPALPTDGSTGVELAPRSAEPGYLVTKVVAVDRDSGQNAWLSYRLLKASEPGLFSVGLHTGEVRTARALLDRDALKQSLVVAVQDHGQPPLSATVTLTVAVADRIPDILADLGSLEPSAKPNDSDLTLYLVVAVAAVSCVFLAFVIVLLALRLRRWHKSRLLQASGGGLASTPGSHFVGADGVRAFLQTYSHEVSLTADSRKSHLIFPQPNYADTLISQESCEKSEPLLITQDLLEMKGDSNLLQQAPPNTDWRFSQAQRPGTSGSQNGDDTGTWPNNQFDTEMLQAMILASASEAADGSSTLGGGAGTMGLSARYGPQFTLQHVPDYRQNVYIPGSNATLTNAAGKRDGKAPAGGNGNKKKSGKKEKK

SEQ ID NO: 1744 - DNA, 4602 bp, Homo sapiens
atggcggcgcctcctgctcgcccagaccacacccggctgctccagatctgccttctcctgggggttctggtggaaatcagggccgaacagattctctactcggtgtttgaggagcaggaagaaggctcagtggtgggcaacatcgccaaggacctggggttggcgccccgggagctggcggagcgcggagtccgcatcgtctccagaggtaggacgcagcttttcgccctgaacccgcgcagcggcaccttggtcaccgcgggtaggatagacagggaggagctctgcgacagatctccaaactgtgtgacaaacctggagattcttctagaagatacagtgaagattttgcgggtagaggtggaaataatcgatgttaatgataacccacccagttttgggacagaacagagggaaataaaagttgctgaaaatgaaaatcctggggcaagatttcctcttcctgaagcttttgatccggatgtaggtgtaaactccctgcagggttaccagctcaactcaaacggttacttttccctggacgtgcaaagtggggccgatgggattaagtacccagagctggtgctggaacgcgctctagatcgcgaggaagaggcggttcaccacctcgttctcacggccttcgatggaggtgacccggttcgctctggcactgccaggattctcataatacttgtggataccaacgataatgctcccgtgttcactcagcccgagtaccacgtaagtgttcgtgagaacgttcctgtaggcactcggctactcaccgtaaaagccactgatccagatgaaggagccaatggagacgtgacgtattctttccggaaagtaagagacaaaatatcacagctatttcagttgaattctctgagtggggatataacaatattggggggtctagattatgaggactctggattctatgacatagatgtagaagcccatgatgggcctggtctccgagctagaagcaaggtactggtgacagttctggatgaaaatgacaacgcaccagaagtcacagttacatctctcaccagctcagtccaggaatcttcttccccgggtacagtaattgcacttttcaacgtgcatgacagtgactcaggaggaaatggcctagtcacatgttctattccagataatctgccattcacacttgaaaagacctatggaaattattatcggttgttgacacacagaacactggacagggaagaagtctcagaatataacatcactgtaactgccactgaccagggaactcctccactgtctacagaaactcatatttcactgcaagtgatggacatcaatgacaacccacccactttccctcatgcttcctactctgcttacattcctgaaaacaaccccagaggagcctccatcttatctatgactgctcaagaccctgacagtggtgacaatgcccgaatcacttactccctggccgaagacaccttccagggtgcacctctgtcctcctatgtctccatcaactccaatacagggatcctatatgctctttgctccttcgactatgagcagtttagagacctgcagctgctgatgacagccagtgacagtggagaccctccactcagcagcaatgtgtcactgagcctctttgtgctggaccagaacgacaatgtccctgagatcctgtaccccaccttccctactgatggctccactggtgtggagctggcaccccgctccgcagattccggctacctggtgaccaaagtggtggcagtggacagagactcaggtcagaatgcctggctgtcctacagcctactcaagtccagcgagccgggactatttgcagtggggctgcacacaggcgaggtgcgcaccgcacgggccctgctggacagagacgcgctcaagcagaggcttgtagtggtcgtccaggaccatggccagccccctctctcggccaccgtcacactcactgtggctgtggccgacagcatcccagatgtcctggctgacttgggcagcctcaagccttcagcagacccagacgactcgggcctcacactctatctcgtggtggcagtggccgctgtctcctgcgtcttcctggcttttgtcacggtgctgctagcactcaagctgagacgctggcacaagtcacgcctgcttcacgctgaaggcagcaggttggcaggtgtgcctgcctcgcactttgtgggcgtggacggggttcgggctttcctgcagacctattcccacgaggtctccctcaccgcggactcgcggaagagtcacctgatcttctcccaacccagctatgcagacacgctcatcagccgggagagttgtgagaaaagcgagcctcttctgataactcaggatttacttgaaacaaaaggagaccctaatcttcagcaagccccgcccaacacggactggcgtttctctcaggcccagagacccggcaccagcggctcccaaaatggcgatgacaccggcacctggcccaacaaccagtttgacacagagatgctgcaagccatgatcttggcgtccgccagtgaagctgctgatgggagctccaccctgggagggggtgccggcaccatgggattgagcgcccgctacggaccccagttcaccctgcagcacgtgcccgactaccgccagaatgtctacatcccaggcagcaatgccacactgaccaacgcagctggcaagcgggatggcaaggccccagcaggtggcaatggcaacaagaagaagtcgggcaagaaggagaagaagtaacatggaggccaggccaagagccacagggcggcctctccccaaccagcccagcttctccttacctgcacccaggcctcagagtttcagggctaacccccagaatactggtaggggccaaggccatgctccccttgggaaacagaaacaagtgcccagtcagcacctaccccttcccccccagggggttgaatatgcaaaagcagttccgctgggaacccccatccaatcaactgctgtacccatgggggtagtggggttactgtagacaccaagaaccatttgccacaccccgtttagttacagctgaactcctccatcttccaaatcaatcaggcccatccatcccatgcctccctcctccccaccccactccaacagttcctctttcccgagtaaggtggttggggtgttgaagtaccaagtaacctacaagcctcctagttctgaaaagttggaagggcatcatgacctcttggcctctcctttgattctcaatcttcccccaaagcatggtttggtgccagccccttcacctccttccagagcccaagatcaatgctcaagttttggaggacatgatcaccatccccatggtactgatgcttgctggatttagggagggcattttgctaccaagcctcttcccaacgccctggggaccagtcttctgttttgtttttcattgtttgacgtttccactgcatgccttgacttcccccacctcctcctcaaacaagagactccactgcatgttccaagacagtatggggtggtaagataaggaagggaagtgtgtggatgtggatggtgggggcatggacaaagcttgacacatcaagttatcaaggccttggaggaggctctgtatgtcctcaggggactgacaacatcctccagattccagccataaaccaataactaggctggacccttcccactacataatagggctcagcccaggcagccagctttgggctgagctaacaggaccaatggattaaactggcatttcagtccaaggaagctcgaagcaggtttaggaccaggtccccttgagaggtcagaggggcctctgtgggtgctgggtactccagaggtgccactggtggaagggtcagcggagccccagcaggaagggtgggccagccaggccattcttagtccctgggttggggaggcagggagctagggcagggaccaaatgaacagaaagtctcagcccaggatggggcttcttcaacagggcccctgccctcctgaagcctcagtccttcaccttgccaggtgccgtttctcttccgtgaaggccactgcccaggtccccagtgcgccccctagtggccatagcctggttaaagttccccagtgcctccttgtgcatagaccttcttctcccacccccttctgcccctgggtccccggccatccagcggggctgccagagaaccccagacctgcccttacagtagtgtagcgccccctccctctttcggctggtgtagaatagccagtagtgtagtgcggtgtgcttttacgtgatggcgggtgggcagcgggcggcgggctccgcgcagccgtctgtccttgatctgcccgcggcggcccgtgttgtgttttgtgctgtgtccacgcgctaaggcgaccccctcccccgtactgacttctcctataagcgcttctcttcgcatagtcacgtagctcccaccccaccctcttcctgtgtctcacgcaagttttatactctaatatttatatggctttttttcttcgacaaaaaaataataaaacgtttcttctgaaaagctg

SEQ ID NO: 1745 - protein, 931 aa, Homo sapiens
MAAPPARPDHTRLLQICLLLGVLVEIRAEQILYSVFEEQEEGSVVGNIAKDLGLAPRELAERGVRIVSRGRTQLFALNPRSGTLVTAGRIDREELCDRSPNCVTNLEILLEDTVKILRVEVEIIDVNDNPPSFGTEQREIKVAENENPGARFPLPEAFDPDVGVNSLQGYQLNSNGYFSLDVQSGADGIKYPELVLERALDREEEAVHHLVLTAFDGGDPVRSGTARILIILVDTNDNAPVFTQPEYHVSVRENVPVGTRLLTVKATDPDEGANGDVTYSFRKVRDKISQLFQLNSLSGDITILGGLDYEDSGFYDIDVEAHDGPGLRARSKVLVTVLDENDNAPEVTVTSLTSSVQESSSPGTVIALFNVHDSDSGGNGLVTCSIPDNLPFTLEKTYGNYYRLLTHRTLDREEVSEYNITVTATDQGTPPLSTETHISLQVMDINDNPPTFPHASYSAYIPENNPRGASILSMTAQDPDSGDNARITYSLAEDTFQGAPLSSYVSINSNTGILYALCSFDYEQFRDLQLLMTASDSGDPPLSSNVSLSLFVLDQNDNVPEILYPTFPTDGSTGVELAPRSADSGYLVTKVVAVDRDSGQNAWLSYSLLKSSEPGLFAVGLHTGEVRTARALLDRDALKQRLVVVVQDHGQPPLSATVTLTVAVADSIPDVLADLGSLKPSADPDDSGLTLYLVVAVAAVSCVFLAFVTVLLALKLRRWHKSRLLHAEGSRLAGVPASHFVGVDGVRAFLQTYSHEVSLTADSRKSHLIFSQPSYADTLISRESCEKSEPLLITQDLLETKGDPNLQQAPPNTDWRFSQAQRPGTSGSQNGDDTGTWPNNQFDTEMLQAMILASASEAADGSSTLGGGAGTMGLSARYGPQFTLQHVPDYRQNVYIPGSNATLTNAAGKRDGKAPAGGNGNKKKSGKKEKK

SEQ ID NO: 1746 - DNA, 4602 bp, Homo sapiens
atggcgagtccacctaggggctggggctgcggagagctgctgctgcccttcatgctcctggggacgctgtgcgagccaggatccgggcagatccgctactcgatgccggaggagctggacaaaggctccttcgtcggcaacatagccaaggaccttgggctggagccccaggagctggcggagcgcggagtccgcatcgtctccagaggtaggacgcagctttttgccctgaacccgcgaagcggcagcttggtcaccgcgggcaggatagaccgggaggagctctgcgctcagagcccactgtgtgtggtgaactttaacatcttggttgagaacaaaatgaaaatttatggagtagaagtagaaataatcgatattaatgataacttcccgcgtttccgggatgaagagttaaaagtaaaagttaatgaaaatgcggctgcagggacacggttagtgcttcccttcgcgcgggatgcggatgtgggtgtgaactctctccggagttaccagctcagctccaatctgcacttctctctggatgtggtaagcggaactgatggacaaaagtatccggagctggtgttggaacagcccctagaccgcgagaaagagactgttcacgacctcctcctcacagctttagatggcggagacccggtactctccggcaccacgcacatccgtgttacggtcctcgacgcaaacgacaatgcgcccctgttcaccccatccgagtacagcgtgagtgttccagagaacatacctgtgggcactcggctgctcatgctaaccgccacggatccagatgagggaataaacgggaaattgacctactcttttcgcaatgaagaagaaaaaatttcggagactttccaacttgattccaacctgggggaaatctcaactctacaatcactggactatgaagaatccagattctacctcatggaagtggtagctcaggatggaggcgctcttgttgccagcgctaaggtggtggtcacagtacaggacgtgaatgacaatgcccccgaagtgatcctcacctctctgaccagttcgatctctgaagactgtcttcccggaactgtaatcgcgctgtttagcgtacatgatggtgattctggagaaaatggtgagattgcatgctctattcctaggaatttgccttttaaattggagaagtcagttgataattactatcacctattaacaactagggacctggacagagaagagacttcagattataatatcactttaaccgtcatggaccatggaaccccgcccctctctacagaaagccacatccccttgaaagtagcagacgttaatgacaacccacccaatttccctcaagcctcctactccacctctgtcacagaaaacaatcccagaggtgtctctatcttctctgtgacagcccatgaccccgacagcggcgacaacgctcgagtcacctactccctggctgaagacacatttcagggggcgcccttgtcctcctatgtatccattaactctgacaccggtgtcctgtatgctctgagatccttcgactatgagcagttgagagacctacagttgtgggtgacagccagcgacagtgggaaccctccacttagcagcaacgtgtcgctgagcctgtttgtgctggaccagaacgacaatacgcctgagatcctgtaccccgccctccccacagacggttccacgggcgtggagctggcgcctcgctccgcagaacctggctacctggtgaccaaggtggtagcggtggacaaagattcaggccagaacgcctggctgtcctaccgcctgcttaaggccagcgagccaggactctttgcggttgggctgcacacgggcgaggtgcgcacagcgcgagccctgctggacagagacgcgctcaagcagagcctcgtggtggccgtcgaagaccatggccagccccctctgtcagccaccttcacggtcaccgttgccgtggccgacaggatccctgacatcctggctgacctaggcagtatcaagacccccattgaccctgaggatctggacctcacactctatcttgtggtggcagtggctgcagtctcctgcgtcttcctggccttcgtcatcgtgctgctggtgctcagactgaggcgctggcacaagtcacgcctgcttcaggctgaaggcagcaggttggcgggtgtgcccgcctcgcactttgtgggcgtggatggggttcgggctttcctgcagacctattcccacgaggtctccctcaccgcggactcgaggaagagtcacctgatctttccccagcccaactacgcagacacgctccttagtgaagagagctgtgagaaaagcgagcctcttctgatgtctgataaggtagatgcaaacaaagaagaacggcgagttcagcaagccccgcccaacacggactggcgtttctctcaggcccagagacccggcaccagcggctcccaaaatggcgatgacaccggcacctggcccaacaaccagtttgacacagagatgctgcaagccatgatcttggcgtccgccagtgaagctgctgatgggagctccaccctgggagggggtgccggcaccatgggattgagcgcccgctacggaccccagttcaccctgcagcacgtgcccgactaccgccagaatgtctacatcccaggcagcaatgccacactgaccaacgcagctggcaagcgggatggcaaggccccagcaggtggcaatggcaacaagaagaagtcgggcaagaaggagaagaagtaacatggaggccaggccaagagccacagggcggcctctccccaaccagcccagcttctccttacctgcacccaggcctcagagtttcagggctaacccccagaatactggtaggggccaaggccatgctccccttgggaaacagaaacaagtgcccagtcagcacctaccccttcccccccagggggttgaatatgcaaaagcagttccgctgggaacccccatccaatcaactgctgtacccatgggggtagtggggttactgtagacaccaagaaccatttgccacaccccgtttagttacagctgaactcctccatcttccaaatcaatcaggcccatccatcccatgcctccctcctccccaccccactccaacagttcctctttcccgagtaaggtggttggggtgttgaagtaccaagtaacctacaagcctcctagttctgaaaagttggaagggcatcatgacctcttggcctctcctttgattctcaatcttcccccaaagcatggtttggtgccagccccttcacctccttccagagcccaagatcaatgctcaagttttggaggacatgatcaccatccccatggtactgatgcttgctggatttagggagggcattttgctaccaagcctcttcccaacgccctggggaccagtcttctgttttgtttttcattgtttgacgtttccactgcatgccttgacttcccccacctcctcctcaaacaagagactccactgcatgttccaagacagtatggggtggtaagataaggaagggaagtgtgtggatgtggatggtgggggcatggacaaagcttgacacatcaagttatcaaggccttggaggaggctctgtatgtcctcaggggactgacaacatcctccagattccagccataaaccaataactaggctggacccttcccactacataatagggctcagcccaggcagccagctttgggctgagctaacaggaccaatggattaaactggcatttcagtccaaggaagctcgaagcaggtttaggaccaggtccccttgagaggtcagaggggcctctgtgggtgctgggtactccagaggtgccactggtggaagggtcagcggagccccagcaggaagggtgggccagccaggccattcttagtccctgggttggggaggcagggagctagggcagggaccaaatgaacagaaagtctcagcccaggatggggcttcttcaacagggcccctgccctcctgaagcctcagtccttcaccttgccaggtgccgtttctcttccgtgaaggccactgcccaggtccccagtgcgccccctagtggccatagcctggttaaagttccccagtgcctccttgtgcatagaccttcttctcccacccccttctgcccctgggtccccggccatccagcggggctgccagagaaccccagacctgcccttacagtagtgtagcgccccctccctctttcggctggtgtagaatagccagtagtgtagtgcggtgtgcttttacgtgatggcgggtgggcagcgggcggcgggctccgcgcagccgtctgtccttgatctgcccgcggcggcccgtgttgtgttttgtgctgtgtccacgcgctaaggcgaccccctcccccgtactgacttctcctataagcgcttctcttcgcatagtcacgtagctcccaccccaccctcttcctgtgtctcacgcaagttttatactctaatatttatatggctttttttcttcgacaaaaaaataataaaacgtttcttctgaaaagctg

SEQ ID NO: 1747 - protein, 931 aa, Homo sapiens
MASPPRGWGCGELLLPFMLLGTLCEPGSGQIRYSMPEELDKGSFVGNIAKDLGLEPQELAERGVRIVSRGRTQLFALNPRSGSLVTAGRIDREELCAQSPLCVVNFNILVENKMKIYGVEVEIIDINDNFPRFRDEELKVKVNENAAAGTRLVLPFARDADVGVNSLRSYQLSSNLHFSLDVVSGTDGQKYPELVLEQPLDREKETVHDLLLTALDGGDPVLSGTTHIRVTVLDANDNAPLFTPSEYSVSVPENIPVGTRLLMLTATDPDEGINGKLTYSFRNEEEKISETFQLDSNLGEISTLQSLDYEESRFYLMEVVAQDGGALVASAKVVVTVQDVNDNAPEVILTSLTSSISEDCLPGTVIALFSVHDGDSGENGEIACSIPRNLPFKLEKSVDNYYHLLTTRDLDREETSDYNITLTVMDHGTPPLSTESHIPLKVADVNDNPPNFPQASYSTSVTENNPRGVSIFSVTAHDPDSGDNARVTYSLAEDTFQGAPLSSYVSINSDTGVLYALRSFDYEQLRDLQLWVTASDSGNPPLSSNVSLSLFVLDQNDNTPEILYPALPTDGSTGVELAPRSAEPGYLVTKVVAVDKDSGQNAWLSYRLLKASEPGLFAVGLHTGEVRTARALLDRDALKQSLVVAVEDHGQPPLSATFTVTVAVADRIPDILADLGSIKTPIDPEDLDLTLYLVVAVAAVSCVFLAFVIVLLVLRLRRWHKSRLLQAEGSRLAGVPASHFVGVDGVRAFLQTYSHEVSLTADSRKSHLIFPQPNYADTLLSEESCEKSEPLLMSDKVDANKEERRVQQAPPNTDWRFSQAQRPGTSGSQNGDDTGTWPNNQFDTEMLQAMILASASEAADGSSTLGGGAGTMGLSARYGPQFTLQHVPDYRQNVYIPGSNATLTNAAGKRDGKAPAGGNGNKKKSGKKEKK

SEQ ID NO: 1748 - DNA, 4605 bp, Homo sapiens
atggcgcctccgcagaggcatccgcagcgcagcgagcaggtcctgctcctcacgctcctggggacgctgtggggggccgcggcagcgcagatccgctactctattcccgaggagctggagaaaggctccttcgtaggcaacatcgtcaaggatctgggactggagccccaggagttggcggagcacggagtccgcatcgtctccagaggtaggatgcagcttttctctctgaatccgcgaaacggcagcttggtcaccgcgggtaggatagaccgcgaggagctctgtgctcagagcccgcggtgtctggtgagttttaacatccttgtcgaggataaactgaatctttatcccgtggaagtggaaatagtggacattaatgacaatacaccccgattcttaaaggaagaattggaagtgaaaattctcgaaaacgcagctccatcctctcgttttccactaatggaggtctatgaccctgatgtgggaatgaactcccttcagggatttaagctcagtggtaatagtcacttctcagtggacgtgcaaagcgaagcccatgggcccaagtacccggagctggtgctggagggcacactggaccgggaaggagaagccgtttaccgcctggtccttactgccatggatggcggcgaccctgtccgctcaagcgtcgcccaaattctggtaacagttctagatgtgaatgacaacactccaatgtttactcagcctgtctaccgtgtaagtgttcctgaaaacctgccagtaggcacaccagtgttggcagtgactgccaccgaccaggatgaaggagtccacggggaagtaacttattcctttgtgaagattacagaaaagatctcacaaattttctgtttgaatgttttgactggagaaatttcaacttctgcaaatctagactatgaggactcgagtttttatgagctgggtgttgaagcccgggatgggccaggtcttcgagacagagcgaaagtcttaataactatcttggatgtcaatgataatgtaccagaagtggttgttacatctggaagcagaacaattgctgaaagtgcacctccaggaacagtaatcgccctttttcaagtgttcgatcgagactctggcctgaatggcctggtaacctgttccatcccgagaagtctcccatttgaattggaaaaatcagttggcaattattatcgattagtgacaaatgcagctctagaccgggaagaggtattcttgtacaacatcactgtgacagccacggacaaaggaacaccacctctgtctacagaaacaatcatctctctaaatgtggcagacaccaacgacaacccgcccaccttcccccattcatcctactcagtctatgtccttgaaaacaaccccaggggtgcctccatcttctctgtgaatgcactggaccctgacgtggaccagaacgcccaagtctcctactcactggcagaagacaccctccagggggcgcccctgtcctcctacgtgtccatcaactccgacactgggattctgtacgccctgcgctccttcgactatgagcagttgagagacctacagctgtgggtgacagccagcgacagcggggacccgcctcttagcagcaacgtgtcactgagcctgtttgtgctggaccagaatgacaatgcgcccgagatcctgtaccccgccctccccacagacggttccactggcgtggagctggcgccccgctccgcagagcccggctacctggtgaccaaggtggtggcggtggacagagactcgggccagaacgcctggctgtcctaccgcctgctcaaggccagcgagccaggacttttctcagtgggcctgcacacgggcgaggtgcgcacggcgcgcgccctgctggacagagacgcgctcaagcagagcctagtggtggccgtccaggaccacggccagccccctctctccgccactgtcacgctcaccgtggccgtggccgacaggatccccgacatcctggccgacctgggcagcctcgagccctccgccaaacccaacgattcggacctcactctgtacctggtggtggcggtggccgcggtctcctgcgtcttcctggccttcgtcatcgtgctgctggcgctcagactgcagcgctggcacaagtcacgcctgctgcaggcttcgggaggtggcttagcgagcatgcccggctcgcactttgtgggcgtggaaggggttcgggctttcctgcagacctattcccacgaggtctcactcactgcagactcgcgtaagagtcatctgattttcccccagcccaactatgccgacacgcttatcaaccaggagagctatgagaaaagcgagcctcttctgataactcaggatttacttgaaacgaaaggagaacccaggcaacttcagcaagccccgcccaacacggactggcgtttctctcaggcccagagacccggcaccagcggctcccaaaatggcgatgacaccggcacctggcccaacaaccagtttgacacagagatgctgcaagccatgatcttggcgtccgccagtgaagctgctgatgggagctccaccctgggagggggtgccggcaccatgggattgagcgcccgctacggaccccagttcaccctgcagcacgtgcccgactaccgccagaatgtctacatcccaggcagcaatgccacactgaccaacgcagctggcaagcgggatggcaaggccccagcaggtggcaatggcaacaagaagaagtcgggcaagaaggagaagaagtaacatggaggccaggccaagagccacagggcggcctctccccaaccagcccagcttctccttacctgcacccaggcctcagagtttcagggctaacccccagaatactggtaggggccaaggccatgctccccttgggaaacagaaacaagtgcccagtcagcacctaccccttcccccccagggggttgaatatgcaaaagcagttccgctgggaacccccatccaatcaactgctgtacccatgggggtagtggggttactgtagacaccaagaaccatttgccacaccccgtttagttacagctgaactcctccatcttccaaatcaatcaggcccatccatcccatgcctccctcctccccaccccactccaacagttcctctttcccgagtaaggtggttggggtgttgaagtaccaagtaacctacaagcctcctagttctgaaaagttggaagggcatcatgacctcttggcctctcctttgattctcaatcttcccccaaagcatggtttggtgccagccccttcacctccttccagagcccaagatcaatgctcaagttttggaggacatgatcaccatccccatggtactgatgcttgctggatttagggagggcattttgctaccaagcctcttcccaacgccctggggaccagtcttctgttttgtttttcattgtttgacgtttccactgcatgccttgacttcccccacctcctcctcaaacaagagactccactgcatgttccaagacagtatggggtggtaagataaggaagggaagtgtgtggatgtggatggtgggggcatggacaaagcttgacacatcaagttatcaaggccttggaggaggctctgtatgtcctcaggggactgacaacatcctccagattccagccataaaccaataactaggctggacccttcccactacataatagggctcagcccaggcagccagctttgggctgagctaacaggaccaatggattaaactggcatttcagtccaaggaagctcgaagcaggtttaggaccaggtccccttgagaggtcagaggggcctctgtgggtgctgggtactccagaggtgccactggtggaagggtcagcggagccccagcaggaagggtgggccagccaggccattcttagtccctgggttggggaggcagggagctagggcagggaccaaatgaacagaaagtctcagcccaggatggggcttcttcaacagggcccctgccctcctgaagcctcagtccttcaccttgccaggtgccgtttctcttccgtgaaggccactgcccaggtccccagtgcgccccctagtggccatagcctggttaaagttccccagtgcctccttgtgcatagaccttcttctcccacccccttctgcccctgggtccccggccatccagcggggctgccagagaaccccagacctgcccttacagtagtgtagcgccccctccctctttcggctggtgtagaatagccagtagtgtagtgcggtgtgcttttacgtgatggcgggtgggcagcgggcggcgggctccgcgcagccgtctgtccttgatctgcccgcggcggcccgtgttgtgttttgtgctgtgtccacgcgctaaggcgaccccctcccccgtactgacttctcctataagcgcttctcttcgcatagtcacgtagctcccaccccaccctcttcctgtgtctcacgcaagttttatactctaatatttatatggctttttttcttcgacaaaaaaataataaaacgtttcttctgaaaagctg

SEQ ID NO: 1749 - protein, 932 aa, Homo sapiens
MAPPQRHPQRSEQVLLLTLLGTLWGAAAAQIRYSIPEELEKGSFVGNIVKDLGLEPQELAEHGVRIVSRGRMQLFSLNPRNGSLVTAGRIDREELCAQSPRCLVSFNILVEDKLNLYPVEVEIVDINDNTPRFLKEELEVKILENAAPSSRFPLMEVYDPDVGMNSLQGFKLSGNSHFSVDVQSEAHGPKYPELVLEGTLDREGEAVYRLVLTAMDGGDPVRSSVAQILVTVLDVNDNTPMFTQPVYRVSVPENLPVGTPVLAVTATDQDEGVHGEVTYSFVKITEKISQIFCLNVLTGEISTSANLDYEDSSFYELGVEARDGPGLRDRAKVLITILDVNDNVPEVVVTSGSRTIAESAPPGTVIALFQVFDRDSGLNGLVTCSIPRSLPFELEKSVGNYYRLVTNAALDREEVFLYNITVTATDKGTPPLSTETIISLNVADTNDNPPTFPHSSYSVYVLENNPRGASIFSVNALDPDVDQNAQVSYSLAEDTLQGAPLSSYVSINSDTGILYALRSFDYEQLRDLQLWVTASDSGDPPLSSNVSLSLFVLDQNDNAPEILYPALPTDGSTGVELAPRSAEPGYLVTKVVAVDRDSGQNAWLSYRLLKASEPGLFSVGLHTGEVRTARALLDRDALKQSLVVAVQDHGQPPLSATVTLTVAVADRIPDILADLGSLEPSAKPNDSDLTLYLVVAVAAVSCVFLAFVIVLLALRLQRWHKSRLLQASGGGLASMPGSHFVGVEGVRAFLQTYSHEVSLTADSRKSHLIFPQPNYADTLINQESYEKSEPLLITQDLLETKGEPRQLQQAPPNTDWRFSQAQRPGTSGSQNGDDTGTWPNNQFDTEMLQAMILASASEAADGSSTLGGGAGTMGLSARYGPQFTLQHVPDYRQNVYIPGSNATLTNAAGKRDGKAPAGGNGNKKKSGKKEKK

SEQ ID NO: 1750 - DNA, 4605 bp, Homo sapiens
atggcggctcagccgaggggcggggactacagaggattcttcctgctctccatcctcctggggaccccctgggaagcctgggcaggacgtattctctactccgtgtcggaggagacggacaaagggtcctttgtgggagacatcgccaaggacctggggctggagccccgggagctggcggagcgcggagtccgcatcatctccagaggtaggacgcagcttttcgccctgaaccagcgcagcggcagcttggtcactgcgggcaggatagaccgggaagagatctgcgctcagagtgcgcggtgtctggtaaactttaacatcctgatggaagataaaatgaatctttaccctatagacgtggaaataatagatattaatgacaacgttccaagattcttgacggaagaaataaatgtaaaaataatggagaatacagctcctggggttcggtttccgttaagcgaggctggggatccagatgtgggcacgaactccctccagagttaccagctcagccccaatcgccacttctccctggctgtgcaaagtggagacgatgaaactaagtacccggaactggtgctggagcgggtgctggaccgggaggaagagcgggttcaccacctggtcctcacagcctctgatggcggcgacccgccccgatccagcaccgcccacatccaggtgacagtggtggatgtgaatgaccacacgcctgtcttctctctgcctcagtaccaagtaactgtccccgagaatgtgccagtgggtacaagactgctcacggtacatgctatcgacctggacgagggagtcaatggggaagtgacatattcttttcggaaaataactcctaaacttccaaagatgtttcatctgaactcgcttacaggagaaatatcaactttagaaggattagattatgaagaaactgccttctatgaaatggaggttcaggctcaagatggtcctggtagtctgacaaaggcaaaagtactgatcacagttttagatgtaaatgataatgctccagaagtgactatgacgtctttaagtagctcaatccctgaagacacacctcttgggacagtcattgctcttttctacctacaagacagagattctggaaagaatggtgaggtgacctgcaccattccagaaaacctaccttttaaattagaaaaatcaatagataattattatagattggtcacaaccaaaaacttggaccgggaaacactctctttgtataacatcacactgaaagccacagatggtggaactcctcccttgtccagggaaactcacatattcatgcaggtggcagacaccaacgataacccacccaccttcccccactcatcctactcagtctacatcgctgagaacaaccccagaggggcctccattttcttagtgactgcacaggaccacgacagtgaggataatgcccagatcacttattccttggccgaagacaccatccagggggctccagtgtcctcctatgtctccataaactctgacactggagtcctgtacgcgctgcaatcctttgattatgagcagttgagagaactacaactaagagtgactgcacatgacagcggggacccgcctctcagcagcaacatgtcactgagcctgttcgtgctggaccagaatgacaacccgcccgagatcctgtacccggccctccccacagatggttctactggcatggagctggcaccccgctccgcagagcccggctacctggtgaccaaggtggtggcggtggacaaagattcaggccagaacgcctggctgtcatacctcctgcttaaggccagcgagccaggactctttgcggttgggctgtacacgggcgaggtgcgcacggctcgggccctgctggacagagatgccctcaagcagagcctcgtggtggccgtccaggaccacggtcagcctcctctgtcagccaccgtcacactcaccgtggctgtggctgacagcatccccgaagtcttggccgacctgggcagccttgagccctccgacggtccttacaactatgacctcacgttgtacctggtggtggcggtggccacagtctcctgcgtcttcctagccttcgtcctcgtactgctggcgctcaggctgcggcgctggcacaagtcacgcctgctgcaggcttcagaaggtggcttggcgaacgtgcccacctcgcactttgtgggcatggacggggtgcaggctttcctgcagacctattcccatgaggtctccctcaccgcggactctcggaagagtcacctgatcttcccccagcccaactatgtagacatgctcatcagccaggagagctgtgagaaaaatgattctttgctaacatccgtagattttcaggaatgtaaagaaaacctgccaagtattcagcaagccccgcccaacacggactggcgtttctctcaggcccagagacccggcaccagcggctcccaaaatggcgatgacaccggcacctggcccaacaaccagtttgacacagagatgctgcaagccatgatcttggcgtccgccagtgaagctgctgatgggagctccaccctgggagggggtgccggcaccatgggattgagcgcccgctacggaccccagttcaccctgcagcacgtgcccgactaccgccagaatgtctacatcccaggcagcaatgccacactgaccaacgcagctggcaagcgggatggcaaggccccagcaggtggcaatggcaacaagaagaagtcgggcaagaaggagaagaagtaacatggaggccaggccaagagccacagggcggcctctccccaaccagcccagcttctccttacctgcacccaggcctcagagtttcagggctaacccccagaatactggtaggggccaaggccatgctccccttgggaaacagaaacaagtgcccagtcagcacctaccccttcccccccagggggttgaatatgcaaaagcagttccgctgggaacccccatccaatcaactgctgtacccatgggggtagtggggttactgtagacaccaagaaccatttgccacaccccgtttagttacagctgaactcctccatcttccaaatcaatcaggcccatccatcccatgcctccctcctccccaccccactccaacagttcctctttcccgagtaaggtggttggggtgttgaagtaccaagtaacctacaagcctcctagttctgaaaagttggaagggcatcatgacctcttggcctctcctttgattctcaatcttcccccaaagcatggtttggtgccagccccttcacctccttccagagcccaagatcaatgctcaagttttggaggacatgatcaccatccccatggtactgatgcttgctggatttagggagggcattttgctaccaagcctcttcccaacgccctggggaccagtcttctgttttgtttttcattgtttgacgtttccactgcatgccttgacttcccccacctcctcctcaaacaagagactccactgcatgttccaagacagtatggggtggtaagataaggaagggaagtgtgtggatgtggatggtgggggcatggacaaagcttgacacatcaagttatcaaggccttggaggaggctctgtatgtcctcaggggactgacaacatcctccagattccagccataaaccaataactaggctggacccttcccactacataatagggctcagcccaggcagccagctttgggctgagctaacaggaccaatggattaaactggcatttcagtccaaggaagctcgaagcaggtttaggaccaggtccccttgagaggtcagaggggcctctgtgggtgctgggtactccagaggtgccactggtggaagggtcagcggagccccagcaggaagggtgggccagccaggccattcttagtccctgggttggggaggcagggagctagggcagggaccaaatgaacagaaagtctcagcccaggatggggcttcttcaacagggcccctgccctcctgaagcctcagtccttcaccttgccaggtgccgtttctcttccgtgaaggccactgcccaggtccccagtgcgccccctagtggccatagcctggttaaagttccccagtgcctccttgtgcatagaccttcttctcccacccccttctgcccctgggtccccggccatccagcggggctgccagagaaccccagacctgcccttacagtagtgtagcgccccctccctctttcggctggtgtagaatagccagtagtgtagtgcggtgtgcttttacgtgatggcgggtgggcagcgggcggcgggctccgcgcagccgtctgtccttgatctgcccgcggcggcccgtgttgtgttttgtgctgtgtccacgcgctaaggcgaccccctcccccgtactgacttctcctataagcgcttctcttcgcatagtcacgtagctcccaccccaccctcttcctgtgtctcacgcaagttttatactctaatatttatatggctttttttcttcgacaaaaaaataataaaacgtttcttctgaaaagctg

SEQ ID NO: 1751 - protein, 932 aa, Homo sapiens
MAAQPRGGDYRGFFLLSILLGTPWEAWAGRILYSVSEETDKGSFVGDIAKDLGLEPRELAERGVRIISRGRTQLFALNQRSGSLVTAGRIDREEICAQSARCLVNFNILMEDKMNLYPIDVEIIDINDNVPRFLTEEINVKIMENTAPGVRFPLSEAGDPDVGTNSLQSYQLSPNRHFSLAVQSGDDETKYPELVLERVLDREEERVHHLVLTASDGGDPPRSSTAHIQVTVVDVNDHTPVFSLPQYQVTVPENVPVGTRLLTVHAIDLDEGVNGEVTYSFRKITPKLPKMFHLNSLTGEISTLEGLDYEETAFYEMEVQAQDGPGSLTKAKVLITVLDVNDNAPEVTMTSLSSSIPEDTPLGTVIALFYLQDRDSGKNGEVTCTIPENLPFKLEKSIDNYYRLVTTKNLDRETLSLYNITLKATDGGTPPLSRETHIFMQVADTNDNPPTFPHSSYSVYIAENNPRGASIFLVTAQDHDSEDNAQITYSLAEDTIQGAPVSSYVSINSDTGVLYALQSFDYEQLRELQLRVTAHDSGDPPLSSNMSLSLFVLDQNDNPPEILYPALPTDGSTGMELAPRSAEPGYLVTKVVAVDKDSGQNAWLSYLLLKASEPGLFAVGLYTGEVRTARALLDRDALKQSLVVAVQDHGQPPLSATVTLTVAVADSIPEVLADLGSLEPSDGPYNYDLTLYLVVAVATVSCVFLAFVLVLLALRLRRWHKSRLLQASEGGLANVPTSHFVGMDGVQAFLQTYSHEVSLTADSRKSHLIFPQPNYVDMLISQESCEKNDSLLTSVDFQECKENLPSIQQAPPNTDWRFSQAQRPGTSGSQNGDDTGTWPNNQFDTEMLQAMILASASEAADGSSTLGGGAGTMGLSARYGPQFTLQHVPDYRQNVYIPGSNATLTNAAGKRDGKAPAGGNGNKKKSGKKEKK

SEQ ID NO: 1752 - DNA, 4605 bp, Homo sapiens
atggcagctccaaccaaatgccagctccgcggaagattagtcctgctatgctcgctcctggggatgctatgggaggccagggccagtcagattcgctactcagtgcctgaagagacagaaaagggctatattgtgggcaacatctccaaggacctggctctggagccccgggagctggcggagcgccgagtccgcatcgtctctagaggtaggacgcagcttttctctctgaacccgcgcagcggcaccttggtcaccgcgggtaggatagaccgggaggagctctgtgctcagagcccgcggtgtctggtgaactttaaagtcctggttgaagacagagtgaaactgtacggaatagaaatagaagtaactgatattaacgacagcgccccaaagttccaggccgaaagtctggaagtaaaaattaacgaaatcgcggttcctggagcacgttatccacttccagaagctattgatccggatgttggcgtgaactccctccagagctaccagctcagccccaatcaccacttctccctgaacgtgcagactggagacaatggagccataaacccagagctggtgctggagcgcgccctggacagggaggaggcaactgcccaccacctggtcctcacggcctcggatggcggcgagccgcgtcgctccagcacagtgcgcatccatgtgacagtgttggatacaaatgataatgccccggtttttgctcaacggatttaccgagttaaagtccttgagaacgtgcccccaggcacctggctgcttactgcaacagccagcgacctggatgagggaatcaacggaaaagtggcatacaaattctggaaaattaatgaaaaacaatctctgctattccagcttaatgaaaatactggggaaatatcaacagcaaaaagtctagattatgaagaatgttcattttatgaaatggaaatacaagctgaagatggtgggggattgaaagggtggacaaaagtgctcatttcggtggaagatgtaaatgacaatagacctgaagtgaccattacatctctgtttagcccagtgagagaagacgcacctcagggaacagtaattcttcttttcaatgctcatgaccgagactccgggaagaatggtcaagttgtctgttctatccaggagaatctatcttttacattagaaaattcagaagaagattattacagattgttgacggcccaaattcttgaccgagaaaaagcctcagaatataatatcacggtgactgcaacagacagaggaactccgcccctgtccacagaaattcacatcaccctgcaagtgactgacatcaatgataatccacctgctttctctcaagcctcctactcagtctacctcccggaaaacaacgccagaggtacttccatcttctccgtgattgcctatgaccctgatagcaatgagaattctagagttatttactccttggcagaggataccatccaagggtctcctctctccacctatgtctctattaactcagacactggtgtgctgtatgctctgtgctcctttgactatgagcagtttagagatttgcaaatgcaggtgacggcaagtgacagtggaagcccaccacttagcagcaatgtgtcattgagactgtttgttttggaccagaatgacaatgccccagaaatcctgtaccctgccctccccactgatggttctactggtgtggagctggcaccccgctctgcagagcctggctacctggtgaccaaggtggtggcagtggacagagactcaggccagaatgcttggctctcctaccgcctattcaaggccagtgagccagggctcttctcggtggggctgcacacaggtgaagtgcgcacagctcgggccctgctagatagagatgcgctcaaacagagccttgtggtggctgtacaggaccatggccagccccctctctcggccactgtcacgctcacagtagccatagctgacagcatcccagacatcctggctgacctgggcagtcttcagatccctgcagacctggaggcctcagaccttaccctctacctcgttgtggctgtggcagtcgtctcctgtgtcttcctcaccttcgttatcacgctgctggccctcaggctgaggcactggcactcctcgcatctgctgcgggctaccagtgatgggttggctggtgtgcccacctcacactttgtgggtgtagatggggttcgagctttcctacagacctattctcaggagttctccctcaccgctgactcaaggaagagtcacctgatcttcccccagcccaactatgcagacacactcatcagccagcagagctgtgagaaaaatgagcctttgtgcgtctctgttgattccaagtttcctatagaagacacccctttggttccgcaagccccgcccaacacggactggcgtttctctcaggcccagagacccggcaccagcggctcccaaaatggcgatgacaccggcacctggcccaacaaccagtttgacacagagatgctgcaagccatgatcttggcgtccgccagtgaagctgctgatgggagctccaccctgggagggggtgccggcaccatgggattgagcgcccgctacggaccccagttcaccctgcagcacgtgcccgactaccgccagaatgtctacatcccaggcagcaatgccacactgaccaacgcagctggcaagcgggatggcaaggccccagcaggtggcaatggcaacaagaagaagtcgggcaagaaggagaagaagtaacatggaggccaggccaagagccacagggcggcctctccccaaccagcccagcttctccttacctgcacccaggcctcagagtttcagggctaacccccagaatactggtaggggccaaggccatgctccccttgggaaacagaaacaagtgcccagtcagcacctaccccttcccccccagggggttgaatatgcaaaagcagttccgctgggaacccccatccaatcaactgctgtacccatgggggtagtggggttactgtagacaccaagaaccatttgccacaccccgtttagttacagctgaactcctccatcttccaaatcaatcaggcccatccatcccatgcctccctcctccccaccccactccaacagttcctctttcccgagtaaggtggttggggtgttgaagtaccaagtaacctacaagcctcctagttctgaaaagttggaagggcatcatgacctcttggcctctcctttgattctcaatcttcccccaaagcatggtttggtgccagccccttcacctccttccagagcccaagatcaatgctcaagttttggaggacatgatcaccatccccatggtactgatgcttgctggatttagggagggcattttgctaccaagcctcttcccaacgccctggggaccagtcttctgttttgtttttcattgtttgacgtttccactgcatgccttgacttcccccacctcctcctcaaacaagagactccactgcatgttccaagacagtatggggtggtaagataaggaagggaagtgtgtggatgtggatggtgggggcatggacaaagcttgacacatcaagttatcaaggccttggaggaggctctgtatgtcctcaggggactgacaacatcctccagattccagccataaaccaataactaggctggacccttcccactacataatagggctcagcccaggcagccagctttgggctgagctaacaggaccaatggattaaactggcatttcagtccaaggaagctcgaagcaggtttaggaccaggtccccttgagaggtcagaggggcctctgtgggtgctgggtactccagaggtgccactggtggaagggtcagcggagccccagcaggaagggtgggccagccaggccattcttagtccctgggttggggaggcagggagctagggcagggaccaaatgaacagaaagtctcagcccaggatggggcttcttcaacagggcccctgccctcctgaagcctcagtccttcaccttgccaggtgccgtttctcttccgtgaaggccactgcccaggtccccagtgcgccccctagtggccatagcctggttaaagttccccagtgcctccttgtgcatagaccttcttctcccacccccttctgcccctgggtccccggccatccagcggggctgccagagaaccccagacctgcccttacagtagtgtagcgccccctccctctttcggctggtgtagaatagccagtagtgtagtgcggtgtgcttttacgtgatggcgggtgggcagcgggcggcgggctccgcgcagccgtctgtccttgatctgcccgcggcggcccgtgttgtgttttgtgctgtgtccacgcgctaaggcgaccccctcccccgtactgacttctcctataagcgcttctcttcgcatagtcacgtagctcccaccccaccctcttcctgtgtctcacgcaagttttatactctaatatttatatggctttttttcttcgacaaaaaaataataaaacgtttcttctgaaaagctg

SEQ ID NO: 1753 - protein, 932 aa, Homo sapiens
MAAPTKCQLRGRLVLLCSLLGMLWEARASQIRYSVPEETEKGYIVGNISKDLALEPRELAERRVRIVSRGRTQLFSLNPRSGTLVTAGRIDREELCAQSPRCLVNFKVLVEDRVKLYGIEIEVTDINDSAPKFQAESLEVKINEIAVPGARYPLPEAIDPDVGVNSLQSYQLSPNHHFSLNVQTGDNGAINPELVLERALDREEATAHHLVLTASDGGEPRRSSTVRIHVTVLDTNDNAPVFAQRIYRVKVLENVPPGTWLLTATASDLDEGINGKVAYKFWKINEKQSLLFQLNENTGEISTAKSLDYEECSFYEMEIQAEDGGGLKGWTKVLISVEDVNDNRPEVTITSLFSPVREDAPQGTVILLFNAHDRDSGKNGQVVCSIQENLSFTLENSEEDYYRLLTAQILDREKASEYNITVTATDRGTPPLSTEIHITLQVTDINDNPPAFSQASYSVYLPENNARGTSIFSVIAYDPDSNENSRVIYSLAEDTIQGSPLSTYVSINSDTGVLYALCSFDYEQFRDLQMQVTASDSGSPPLSSNVSLRLFVLDQNDNAPEILYPALPTDGSTGVELAPRSAEPGYLVTKVVAVDRDSGQNAWLSYRLFKASEPGLFSVGLHTGEVRTARALLDRDALKQSLVVAVQDHGQPPLSATVTLTVAIADSIPDILADLGSLQIPADLEASDLTLYLVVAVAVVSCVFLTFVITLLALRLRHWHSSHLLRATSDGLAGVPTSHFVGVDGVRAFLQTYSQEFSLTADSRKSHLIFPQPNYADTLISQQSCEKNEPLCVSVDSKFPIEDTPLVPQAPPNTDWRFSQAQRPGTSGSQNGDDTGTWPNNQFDTEMLQAMILASASEAADGSSTLGGGAGTMGLSARYGPQFTLQHVPDYRQNVYIPGSNATLTNAAGKRDGKAPAGGNGNKKKSGKKEKK

SEQ ID NO: 1754 - DNA, 4590 bp, Homo sapiens
atgcagagagccagagaagccgaaatgatgaaaagtcaggtactgtttcccttcctgctgtctttgttctgcggggccatctcccagcagatccgatacacgattccagaggagctagccaacggctcacgggtggggaaacttgccaaggatctggggctcagtgtccgggagttgccaactcgaaaactgcgggttagtgcagaggattatttcaacgttagtttggagagcggggatttgttagtgaacggtaggatagatcgagagaagatttgcggaaggaaacttgagtgtgcactagaattcgaaacggtcgctgaaaacccaatgaatgttttccacgtggttgttgtaatccaagatattaatgacaatgcaccacgtttcgttgcaaaaggcattgacttagaaatttgtgagtcagccttacccggggtaaaattctctctggattctgctcaagatgcagatgtggaaggcaattcactgaagttatacaccatcaaccccaatcaatacttctctctgtcaacgaaggaaagtcctgatggaagtaaatatccggtattactgctggaaaaacctctagacagggaacatcagagctctcatcgcttaatcctgactgccatggatggcggggacccgcctctaagcggcaccacccatatctggatccgagttacggatgccaatgataatgctcccgtgtttagccaggaggtatacagggttagcctccaagaaaacgtaccgtggggaacctccgtgctgcgggtgatggccacagaccaggatgagggcattaatgcagagatcacctatgccttcctcaattccccaataagtaccagcctcttcaatctcaatccaaatactggcgacatcacaaccaatggcacattggattttgaagagacaagtagatatgtgttgagtgtggaagctaaggatggaggagtacacacagctcactgtaatgttcaaatagaaattgttgacgagaatgacaatgccccagaggtgacattcatgtccttctctaaccagattccagaggattcagaccttggaactgtaatagccctcataaaagtgcgagacaaggattctgggcaaaatggcatggtgacatgctatactcaggaagaagttcctttcaaattagaatccacctcgaagaattattacaagctggtgattgctggagccctaaaccgggagcagacagcagactacaacgtcacaatcatagccaccgacaagggcaaaccagccctttcctccaggacaagcatcaccctgcacatctccgacatcaacgacaatgcacctgttttccatcaggcctcctatgtggtccacgtgtctgagaacaacccacctggcgcctccattgcacaagtaagcgcctccgacccggatttgggacccaacggcagagtctcctactctattctggccagtgacctggagccgcgggagctgttgtcctacgtgtccgtgagcccgcagagcggggtggtgttcgcgcagcgcgccttcgaccacgagcagctgcgcgccttcgagctcacactgcaggccagggaccagggctcccccgcgctcagcgccaacgtgagcctgcgcgtgttggtgggcgacctcaatgacaatgcgccacgggtgctgtaccccgcgctggggcctgatggctccgccctcttcgatatggtgccacgcgccgcagagcccggctacctggtgaccaaggtggtggcggtggacgcagactcaggacacaacgcttggctgtcctaccacgtgctgcaggccagcgagcccgggctcttcagcctggggttgcgcacgggtgaggtgcgcacagcgcgtgccttgggcgacagggacgcggcccgccagcgcctgctggtcgctgtgcgtgatggaggacagccgccactctccgccaccgccacgctgcacctaatcttcgcggatagcctgcaagaggtattgccagacctcagcgaccgccctgagccctctgacccccagacggaactgcagttttacctggttgtggccttggccttgatctcagtgctctttctcctcgcggtgattctagcgatcgccctgcgcctgcgacgttcctccagcctcgacactgagggctgctttcaaaccggtctctgctccaagtctgggcccggggttcctcccaaccacagcgaggggactttgccctattcctacaatctatgtattgcctctcattctgcaaagacagagtttaattctctcaacctgacaccggaaatggctccccctcaggatctgctgtgtgatgatccttctatggttgtatgtgccagtaatgaagatcacaaaatcgcttatgacccttctttgtcttcgcaccaagccccgcccaacacggactggcgtttctctcaggcccagagacccggcaccagcggctcccaaaatggcgatgacaccggcacctggcccaacaaccagtttgacacagagatgctgcaagccatgatcttggcgtccgccagtgaagctgctgatgggagctccaccctgggagggggtgccggcaccatgggattgagcgcccgctacggaccccagttcaccctgcagcacgtgcccgactaccgccagaatgtctacatcccaggcagcaatgccacactgaccaacgcagctggcaagcgggatggcaaggccccagcaggtggcaatggcaacaagaagaagtcgggcaagaaggagaagaagtaacatggaggccaggccaagagccacagggcggcctctccccaaccagcccagcttctccttacctgcacccaggcctcagagtttcagggctaacccccagaatactggtaggggccaaggccatgctccccttgggaaacagaaacaagtgcccagtcagcacctaccccttcccccccagggggttgaatatgcaaaagcagttccgctgggaacccccatccaatcaactgctgtacccatgggggtagtggggttactgtagacaccaagaaccatttgccacaccccgtttagttacagctgaactcctccatcttccaaatcaatcaggcccatccatcccatgcctccctcctccccaccccactccaacagttcctctttcccgagtaaggtggttggggtgttgaagtaccaagtaacctacaagcctcctagttctgaaaagttggaagggcatcatgacctcttggcctctcctttgattctcaatcttcccccaaagcatggtttggtgccagccccttcacctccttccagagcccaagatcaatgctcaagttttggaggacatgatcaccatccccatggtactgatgcttgctggatttagggagggcattttgctaccaagcctcttcccaacgccctggggaccagtcttctgttttgtttttcattgtttgacgtttccactgcatgccttgacttcccccacctcctcctcaaacaagagactccactgcatgttccaagacagtatggggtggtaagataaggaagggaagtgtgtggatgtggatggtgggggcatggacaaagcttgacacatcaagttatcaaggccttggaggaggctctgtatgtcctcaggggactgacaacatcctccagattccagccataaaccaataactaggctggacccttcccactacataatagggctcagcccaggcagccagctttgggctgagctaacaggaccaatggattaaactggcatttcagtccaaggaagctcgaagcaggtttaggaccaggtccccttgagaggtcagaggggcctctgtgggtgctgggtactccagaggtgccactggtggaagggtcagcggagccccagcaggaagggtgggccagccaggccattcttagtccctgggttggggaggcagggagctagggcagggaccaaatgaacagaaagtctcagcccaggatggggcttcttcaacagggcccctgccctcctgaagcctcagtccttcaccttgccaggtgccgtttctcttccgtgaaggccactgcccaggtccccagtgcgccccctagtggccatagcctggttaaagttccccagtgcctccttgtgcatagaccttcttctcccacccccttctgcccctgggtccccggccatccagcggggctgccagagaaccccagacctgcccttacagtagtgtagcgccccctccctctttcggctggtgtagaatagccagtagtgtagtgcggtgtgcttttacgtgatggcgggtgggcagcgggcggcgggctccgcgcagccgtctgtccttgatctgcccgcggcggcccgtgttgtgttttgtgctgtgtccacgcgctaaggcgaccccctcccccgtactgacttctcctataagcgcttctcttcgcatagtcacgtagctcccaccccaccctcttcctgtgtctcacgcaagttttatactctaatatttatatggctttttttcttcgacaaaaaaataataaaacgtttcttctgaaaagctg

SEQ ID NO: 1755 - protein, 927 aa, Homo sapiens
MQRAREAEMMKSQVLFPFLLSLFCGAISQQIRYTIPEELANGSRVGKLAKDLGLSVRELPTRKLRVSAEDYFNVSLESGDLLVNGRIDREKICGRKLECALEFETVAENPMNVFHVVVVIQDINDNAPRFVAKGIDLEICESALPGVKFSLDSAQDADVEGNSLKLYTINPNQYFSLSTKESPDGSKYPVLLLEKPLDREHQSSHRLILTAMDGGDPPLSGTTHIWIRVTDANDNAPVFSQEVYRVSLQENVPWGTSVLRVMATDQDEGINAEITYAFLNSPISTSLFNLNPNTGDITTNGTLDFEETSRYVLSVEAKDGGVHTAHCNVQIEIVDENDNAPEVTFMSFSNQIPEDSDLGTVIALIKVRDKDSGQNGMVTCYTQEEVPFKLESTSKNYYKLVIAGALNREQTADYNVTIIATDKGKPALSSRTSITLHISDINDNAPVFHQASYVVHVSENNPPGASIAQVSASDPDLGPNGRVSYSILASDLEPRELLSYVSVSPQSGVVFAQRAFDHEQLRAFELTLQARDQGSPALSANVSLRVLVGDLNDNAPRVLYPALGPDGSALFDMVPRAAEPGYLVTKVVAVDADSGHNAWLSYHVLQASEPGLFSLGLRTGEVRTARALGDRDAARQRLLVAVRDGGQPPLSATATLHLIFADSLQEVLPDLSDRPEPSDPQTELQFYLVVALALISVLFLLAVILAIALRLRRSSSLDTEGCFQTGLCSKSGPGVPPNHSEGTLPYSYNLCIASHSAKTEFNSLNLTPEMAPPQDLLCDDPSMVVCASNEDHKIAYDPSLSSHQAPPNTDWRFSQAQRPGTSGSQNGDDTGTWPNNQFDTEMLQAMILASASEAADGSSTLGGGAGTMGLSARYGPQFTLQHVPDYRQNVYIPGSNATLTNAAGKRDGKAPAGGNGNKKKSGKKEKK

SEQ ID NO: 1756 - DNA, 4602 bp, Homo sapiens
atgaaagcgagctcagggaggtgcgggctggtgcggtggctgcaggtactgttgcccttcctgttgtctttgttccccggggctctcccagtccagatccgctattcaattccagaggagctggccaaaaactcggtcgtaggaaacctcgccaaggatctggggctcagcgtccgggacttgccagcccggaagctgcgggttagcgcggagaaggaatatttcacagtaaacccagaaagcggagacttacttgtgagtgacagaatagaccgagaacagatatgcgggaagcagcctctgtgtgttctggatttcgatactgtcgctgaaaatccactaaatattttctacatagcagtaattgtgcaggatataaatgataataccccgctattcaaacagactaagattaatttaaaaattggcgaatccactaagccaggtacaacatttccacttgacccagccctggattcagatgttggtcctaactcactacaaagataccaccttaatgacaacgagtactttgatctcgctgagaaacagactccagatggtcgtaaatatcctgagttgattctaaaacactctctggacagagaagagcacagtttacatcaattggtcctcacagctgtggatggcggagacccacctcaaagtggcacgacccaaatccgaatcaaagtcacggatgccaacgataaccctccagtgttcagccaggacgtgtacagggtcaccctgagggaggacgtgccgccgggcttctttgtgcttcaagtgacagccaccgaccgggatgaaggcataaacgcagagatcacctactcctttcataatgtggacgaacaagtgaaacactttttcaacttaaatgaaaaaacaggagaaatcacgacaaaggatgatttggattttgagattgcaagtagttacactctgagtatcgaagcaaaagatcctggagatctagcagcccactgcagtatccaagttgaaattcttgatgacaacgattgtgcacctgaagttattgtgacttcagtatctactcccctaccggaggattcgccaccaggaacagtgatcgccttgataaaaacgagagacagagactctggagaaaatggagaagtttactgccaagtgttgggaaatgccaagtttattttgaaatcttcctcaaagaactattacaaactagtgacagacggcgctctggaccgggaggagatcccagaatacaatctcaccatcacagccaccgacgggggcaagccgcccctctcctccagcataattgtcaccctgcacatctccgacgtcaacgataatgccccagttttccaacagacttcctacatggttcacgtggcagagaacaatcctcctggcgcctctatcgctcaaatcagtgcctctgaccctgacttgggccccagtggccaagtttcctactccatcgtagcgagcgacctgaagccgcgggagattttatcctacgtgtccgtgagcgcgcagagcggggtggtgttcgcgcagcgcgccttcgatcatgagcagctgcgcgccttcgagctcacactgcaggcccgcgaccagggctcgcccgcgctcagcgccaacgtgagcctgcgcgtgttagtgggcgacctcaatgacaatgcgccacgggtgctgtaccccgcgctggggcctgatggctccgccctcttcgatatggtgccacgcgccgcagagcccggctacctggtgaccaaggtggtggcggtggacgcagactcaggacacaacgcttggctgtcctaccacgtgctgcaggccagcgagcccgggctcttcagcctggggttgcgcacgggtgaggtgcgcacagcgcgtgccttgggcgacagggacgcggcccgccagcgcctgctggtcgctgtgcgtgatggaggacagccgccactctccgctacggccacgctgcacctaatcttcgcggatagcctgcaagaggtattgccagacctcagcgaccgccgggagccctctgacccccaggcaaaactgcagttttacctggttgtggccttggccttgatctcagtgctcttcttcctcgcggtgattctggcaatctccctgcgcctgcgactctcttccaggtcagatgcttgggactgttttcagcctggtctcagctccaagcctggacctggggttctccccaattacagtgagggtacattgccctattcctacaacctgtgtgttgcctcacaatcagccaagacagagttcaattttctgaacataaccccggaattggttcccgcgcaagatctcgtctgtgacaatgcctcttgggaacaaaatacaaatcatggagccgctggggtcccttttgcctcagatactattttgaagcaagccccgcccaacacggactggcgtttctctcaggcccagagacccggcaccagcggctcccaaaatggcgatgacaccggcacctggcccaacaaccagtttgacacagagatgctgcaagccatgatcttggcgtccgccagtgaagctgctgatgggagctccaccctgggagggggtgccggcaccatgggattgagcgcccgctacggaccccagttcaccctgcagcacgtgcccgactaccgccagaatgtctacatcccaggcagcaatgccacactgaccaacgcagctggcaagcgggatggcaaggccccagcaggtggcaatggcaacaagaagaagtcgggcaagaaggagaagaagtaacatggaggccaggccaagagccacagggcggcctctccccaaccagcccagcttctccttacctgcacccaggcctcagagtttcagggctaacccccagaatactggtaggggccaaggccatgctccccttgggaaacagaaacaagtgcccagtcagcacctaccccttcccccccagggggttgaatatgcaaaagcagttccgctgggaacccccatccaatcaactgctgtacccatgggggtagtggggttactgtagacaccaagaaccatttgccacaccccgtttagttacagctgaactcctccatcttccaaatcaatcaggcccatccatcccatgcctccctcctccccaccccactccaacagttcctctttcccgagtaaggtggttggggtgttgaagtaccaagtaacctacaagcctcctagttctgaaaagttggaagggcatcatgacctcttggcctctcctttgattctcaatcttcccccaaagcatggtttggtgccagccccttcacctccttccagagcccaagatcaatgctcaagttttggaggacatgatcaccatccccatggtactgatgcttgctggatttagggagggcattttgctaccaagcctcttcccaacgccctggggaccagtcttctgttttgtttttcattgtttgacgtttccactgcatgccttgacttcccccacctcctcctcaaacaagagactccactgcatgttccaagacagtatggggtggtaagataaggaagggaagtgtgtggatgtggatggtgggggcatggacaaagcttgacacatcaagttatcaaggccttggaggaggctctgtatgtcctcaggggactgacaacatcctccagattccagccataaaccaataactaggctggacccttcccactacataatagggctcagcccaggcagccagctttgggctgagctaacaggaccaatggattaaactggcatttcagtccaaggaagctcgaagcaggtttaggaccaggtccccttgagaggtcagaggggcctctgtgggtgctgggtactccagaggtgccactggtggaagggtcagcggagccccagcaggaagggtgggccagccaggccattcttagtccctgggttggggaggcagggagctagggcagggaccaaatgaacagaaagtctcagcccaggatggggcttcttcaacagggcccctgccctcctgaagcctcagtccttcaccttgccaggtgccgtttctcttccgtgaaggccactgcccaggtccccagtgcgccccctagtggccatagcctggttaaagttccccagtgcctccttgtgcatagaccttcttctcccacccccttctgcccctgggtccccggccatccagcggggctgccagagaaccccagacctgcccttacagtagtgtagcgccccctccctctttcggctggtgtagaatagccagtagtgtagtgcggtgtgcttttacgtgatggcgggtgggcagcgggcggcgggctccgcgcagccgtctgtccttgatctgcccgcggcggcccgtgttgtgttttgtgctgtgtccacgcgctaaggcgaccccctcccccgtactgacttctcctataagcgcttctcttcgcatagtcacgtagctcccaccccaccctcttcctgtgtctcacgcaagttttatactctaatatttatatggctttttttcttcgacaaaaaaataataaaacgtttcttctgaaaagctg

SEQ ID NO: 1757 - protein, 931 aa, Homo sapiens
MKASSGRCGLVRWLQVLLPFLLSLFPGALPVQIRYSIPEELAKNSVVGNLAKDLGLSVRDLPARKLRVSAEKEYFTVNPESGDLLVSDRIDREQICGKQPLCVLDFDTVAENPLNIFYIAVIVQDINDNTPLFKQTKINLKIGESTKPGTTFPLDPALDSDVGPNSLQRYHLNDNEYFDLAEKQTPDGRKYPELILKHSLDREEHSLHQLVLTAVDGGDPPQSGTTQIRIKVTDANDNPPVFSQDVYRVTLREDVPPGFFVLQVTATDRDEGINAEITYSFHNVDEQVKHFFNLNEKTGEITTKDDLDFEIASSYTLSIEAKDPGDLAAHCSIQVEILDDNDCAPEVIVTSVSTPLPEDSPPGTVIALIKTRDRDSGENGEVYCQVLGNAKFILKSSSKNYYKLVTDGALDREEIPEYNLTITATDGGKPPLSSSIIVTLHISDVNDNAPVFQQTSYMVHVAENNPPGASIAQISASDPDLGPSGQVSYSIVASDLKPREILSYVSVSAQSGVVFAQRAFDHEQLRAFELTLQARDQGSPALSANVSLRVLVGDLNDNAPRVLYPALGPDGSALFDMVPRAAEPGYLVTKVVAVDADSGHNAWLSYHVLQASEPGLFSLGLRTGEVRTARALGDRDAARQRLLVAVRDGGQPPLSATATLHLIFADSLQEVLPDLSDRREPSDPQAKLQFYLVVALALISVLFFLAVILAISLRLRLSSRSDAWDCFQPGLSSKPGPGVLPNYSEGTLPYSYNLCVASQSAKTEFNFLNITPELVPAQDLVCDNASWEQNTNHGAAGVPFASDTILKQAPPNTDWRFSQAQRPGTSGSQNGDDTGTWPNNQFDTEMLQAMILASASEAADGSSTLGGGAGTMGLSARYGPQFTLQHVPDYRQNVYIPGSNATLTNAAGKRDGKAPAGGNGNKKKSGKKEKK

SEQ ID NO: 1758 - DNA, 4596 bp, Homo sapiens
atgggaaatagctccggatggaggggcccagcagggcagaggcgaatgctatttctcttcctgctctctttgttagaccaggttctctccgaaccgatccgctacgctattcccgaggagctggacaggggctcgctggtagggaacctcgccaaggacctggggtttggcgtgggggatttacctactaggaacctgcgggttattgcagagaagaaattctttaccgtgagccccgaaaatgggaacttacttgtgagcgaccgtatagaccgagaggagatttgtggcaagaagtcgacgtgtgttctggaatttgaaatggttgctgaaaagcctttaaacttttttcatgtaactgtgctgatccaggatattaacgacaacccaccgacctttagccaaaatatcactgagctggaaatcagcgaactggctctcactggagccacatttgccctggaatctgcgcaagatcctgatgtaggtgtcaattcgctgcagcagtactacctcagccctgatccgcacttctctttgattcagaaggagaacctggatggcagtaggtacccagagctagtactgaaagcacccctggacagggaagagcagccacatcaccacctggtcctcacagctgtggatgggggcgagccctccagaagctgtaccacccagatcagggtaattgtcgcagatgcaaatgataaccccccagtatttactcaggacatgtacagggtcaatgttgcagagaacctgcccgctggctcctccgtattaaaagtgatggccattgacatggatgagggcatcaatgccgaaatcatctatgccttcatcaatattggcaaggaagtgagacaactgttcaagctggacagtaaaacgggggaactcaccactattggagaactggactttgaagagagagatagctacacaattggggtggaagcaaaggatggtggacatcacactgcatattgtaaagtacagatagatatttcagatgaaaatgacaatgccccggagataaccctggcttctgaatcccaacatatacaagaagatgctgagctggggactgccgttgccctgatcaaaacacatgatctagattctggatttaatggagaaatcctatgccaactaaaaggaaacttcccctttaaaatcgttcaagataccaaaaacacatacaggttggtgacagatggagccctggaccgggagcagatcccagaatacaatgtgacgatcacagctaccgacaaaggcaatccaccgctctcctccagcaagaccatcactctgcacatccttgatgtcaacgacaacgttcccgttttccaccaggcctcctacaccgtgcatgtagctgagaacaatccgcctggagcctccattgcgcatgtcagagcctcggatcccgacttgggacctaatggccttgtctcctactacatcgtggccagtgacctggagccgcgggagctgtcgtcctacgtgtccgtgagcgcgcggagcggggtggtgttcgcgcagcgagccttcgaccacgagcagctgcgtgccttcgagctcactctgcaggcccgcgaccagggctcgcctacgctcagcgccaacgtgagcctgcgcgtgttggtggacgaccgcaacgacaatgcaccgctggtgctgtacccagctctggggcccgaaggctctgcgctcttcgatatggtgccgcgctctgcagagcctggctacctggtgaccaaggtggtggcggtggacgcagactcgggatacaacgcctggctgtcctaccacattgtgcaggccagcgagcccgggctgttcagcctgggcctgcgcacgggtgaggtgcgcacggcgcgtaccttgggcgacagggaggccgcccgccagcgcctgctggtcactgtgcgtgatggaggacagcagcctctttcagccaccgtcatgctgcacctaatcttcgcagatagcttgcaagagatacaacctgaccttagcgaccgccccactccctctgaccctcaggcggagctacagtttcacctagtagtggcgttggccttgatctcagtgctcttcctcctcgcggtgattctggcaatctccctgcgcctgcgatgctcctccagacccgccactgagggctactttcagcctggtgtctgcttcaagactgtacctggagttctccccacctacagcgaaaggactttgccttattcctacaatccgtgtgctgcctcacattcctcaaacaccgagtttaaatttctcaatataaaggctgaaaatgctgcaccacaagatcttctatgtgatgaagcctcttggtttgaaagtaatgacaatccagaaatgccttctaattcaggcaatttgcaaaagcaagccccgcccaacacggactggcgtttctctcaggcccagagacccggcaccagcggctcccaaaatggcgatgacaccggcacctggcccaacaaccagtttgacacagagatgctgcaagccatgatcttggcgtccgccagtgaagctgctgatgggagctccaccctgggagggggtgccggcaccatgggattgagcgcccgctacggaccccagttcaccctgcagcacgtgcccgactaccgccagaatgtctacatcccaggcagcaatgccacactgaccaacgcagctggcaagcgggatggcaaggccccagcaggtggcaatggcaacaagaagaagtcgggcaagaaggagaagaagtaacatggaggccaggccaagagccacagggcggcctctccccaaccagcccagcttctccttacctgcacccaggcctcagagtttcagggctaacccccagaatactggtaggggccaaggccatgctccccttgggaaacagaaacaagtgcccagtcagcacctaccccttcccccccagggggttgaatatgcaaaagcagttccgctgggaacccccatccaatcaactgctgtacccatgggggtagtggggttactgtagacaccaagaaccatttgccacaccccgtttagttacagctgaactcctccatcttccaaatcaatcaggcccatccatcccatgcctccctcctccccaccccactccaacagttcctctttcccgagtaaggtggttggggtgttgaagtaccaagtaacctacaagcctcctagttctgaaaagttggaagggcatcatgacctcttggcctctcctttgattctcaatcttcccccaaagcatggtttggtgccagccccttcacctccttccagagcccaagatcaatgctcaagttttggaggacatgatcaccatccccatggtactgatgcttgctggatttagggagggcattttgctaccaagcctcttcccaacgccctggggaccagtcttctgttttgtttttcattgtttgacgtttccactgcatgccttgacttcccccacctcctcctcaaacaagagactccactgcatgttccaagacagtatggggtggtaagataaggaagggaagtgtgtggatgtggatggtgggggcatggacaaagcttgacacatcaagttatcaaggccttggaggaggctctgtatgtcctcaggggactgacaacatcctccagattccagccataaaccaataactaggctggacccttcccactacataatagggctcagcccaggcagccagctttgggctgagctaacaggaccaatggattaaactggcatttcagtccaaggaagctcgaagcaggtttaggaccaggtccccttgagaggtcagaggggcctctgtgggtgctgggtactccagaggtgccactggtggaagggtcagcggagccccagcaggaagggtgggccagccaggccattcttagtccctgggttggggaggcagggagctagggcagggaccaaatgaacagaaagtctcagcccaggatggggcttcttcaacagggcccctgccctcctgaagcctcagtccttcaccttgccaggtgccgtttctcttccgtgaaggccactgcccaggtccccagtgcgccccctagtggccatagcctggttaaagttccccagtgcctccttgtgcatagaccttcttctcccacccccttctgcccctgggtccccggccatccagcggggctgccagagaaccccagacctgcccttacagtagtgtagcgccccctccctctttcggctggtgtagaatagccagtagtgtagtgcggtgtgcttttacgtgatggcgggtgggcagcgggcggcgggctccgcgcagccgtctgtccttgatctgcccgcggcggcccgtgttgtgttttgtgctgtgtccacgcgctaaggcgaccccctcccccgtactgacttctcctataagcgcttctcttcgcatagtcacgtagctcccaccccaccctcttcctgtgtctcacgcaagttttatactctaatatttatatggctttttttcttcgacaaaaaaataataaaacgtttcttctgaaaagctg

SEQ ID NO: 1759 - protein, 929 aa, Homo sapiens
MGNSSGWRGPAGQRRMLFLFLLSLLDQVLSEPIRYAIPEELDRGSLVGNLAKDLGFGVGDLPTRNLRVIAEKKFFTVSPENGNLLVSDRIDREEICGKKSTCVLEFEMVAEKPLNFFHVTVLIQDINDNPPTFSQNITELEISELALTGATFALESAQDPDVGVNSLQQYYLSPDPHFSLIQKENLDGSRYPELVLKAPLDREEQPHHHLVLTAVDGGEPSRSCTTQIRVIVADANDNPPVFTQDMYRVNVAENLPAGSSVLKVMAIDMDEGINAEIIYAFINIGKEVRQLFKLDSKTGELTTIGELDFEERDSYTIGVEAKDGGHHTAYCKVQIDISDENDNAPEITLASESQHIQEDAELGTAVALIKTHDLDSGFNGEILCQLKGNFPFKIVQDTKNTYRLVTDGALDREQIPEYNVTITATDKGNPPLSSSKTITLHILDVNDNVPVFHQASYTVHVAENNPPGASIAHVRASDPDLGPNGLVSYYIVASDLEPRELSSYVSVSARSGVVFAQRAFDHEQLRAFELTLQARDQGSPTLSANVSLRVLVDDRNDNAPLVLYPALGPEGSALFDMVPRSAEPGYLVTKVVAVDADSGYNAWLSYHIVQASEPGLFSLGLRTGEVRTARTLGDREAARQRLLVTVRDGGQQPLSATVMLHLIFADSLQEIQPDLSDRPTPSDPQAELQFHLVVALALISVLFLLAVILAISLRLRCSSRPATEGYFQPGVCFKTVPGVLPTYSERTLPYSYNPCAASHSSNTEFKFLNIKAENAAPQDLLCDEASWFESNDNPEMPSNSGNLQKQAPPNTDWRFSQAQRPGTSGSQNGDDTGTWPNNQFDTEMLQAMILASASEAADGSSTLGGGAGTMGLSARYGPQFTLQHVPDYRQNVYIPGSNATLTNAAGKRDGKAPAGGNGNKKKSGKKEKK

SEQ ID NO: 1760 - DNA, 4578 bp, Homo sapiens
atggggagcggcgccggggagctgggccgggctgagaggctgccagtgctctttctcttcctgctgtctttgttctgcccggcgctctgtgagcagatccgctacaggattcccgaggaaatgcccaagggctccgtagtggggaacctcgccacggacctggggttcagcgtccaggagttaccgactcgaaaactgcgcgtcagttcggagaagccttacttcaccgtgagcgcagagagcggggagttgcttgtgagcagcaggctagacagggaggagatatgcgggaagaagccagcttgtgctctggaatttgaggctgttgctgaaaatccactgaacttttatcacgtgaatgtggagatcgaggacattaatgaccacacgccaaaattcacgcaaaattcctttgagctgcaaataagtgagtctgcacagcctggcacaagatttatactagaagtagcagaagatgcagatattggcttaaactctctgcagaagtataaactctctcttaacccaagtttctcattaataattaaggagaaacaggatggtagtaaatacccggaactggcactggagaaaaccttagaccgggaacaacagagttaccatcgtttagtcctgactgccttggacggtggacatccacccctaagcggcaccactgagctccggatccaggtaaccgacgccaatgataatcccccggtattcaaccgagacgtgtacagagtcagccttcgggaaaacgtgccaccaggcaccactgtgttgcaagtgtcagccactgaccaagacgagggcatcaactcagaaattacttattccttctacagaaccgggcaaatctttagtctgaattcaaagagcggagaaattaccactcaaaagaaactggattttgaagagaccaaggaatattcaatggttgtagaagggagggatggtggtggactggttgcacaatgtacagttgaaattaatattcaagatgaaaatgacaatagcccagaagttacattccattctctacttgaaatgattctggaaaacgcggtgcctggaacactaattgctttgatcaaaatacatgaccaagattctggggaaaatggggaggttaattgtcaattacaaggcgaagtcccttttaagattatctcttcatccaaaaattcgtataagttggtaacagatggaaccctagaccgagagcaaaccccggagtacaatgtcaccatcacagccacagacaggggcaagccgcccctctcctccagcataagcgtcatcctacatatcagagacgtcaacgataacgctccggttttccaccaggcgtcctacttagtcagtgtacccgaaaacaaccctcctggggcctccatcgcgcaagtctgcgcctcggacctggacttggggttgaacggccaagtctcctactctatcatggccagcgacctagagcctctggcactggcctcttacgtgtccatgagcgcgcaaagtggggtggtgttcgcgcagcgcgcctttgactacgagcagctgcgcaccttcgaactcacactacaggcccgcgaccagggctcgcctgcgctcagcgcaaacgtgagcctgcgcgtgttggtgggcgaccgaaacgacaacgcaccgcgggtgctgtaccccgcgctgggtcccgacggctctgcgctcttcgatatggtgccgcgcgctgcagagcccggctacctggtgaccaaggtagtggccgtggacgcagactcaggacacaacgcctggctgtcctaccacgtgctgcaggctagcgagcccgggctcttcagcctggggctgcgcacaggagaggtgcgcacagcgcgtgccttgggcgacagggacgcggcccgccagcgcctgctggttgctgtgcgtgatggtggacagccgccactctccgccaccgccacgctgcacttggtctttgctgacagcttgcaggaggtgctgccggatatcactgaccgccctgtaccctctgacccccaggctgagctgcagttttacctagtggtggccttggccttgatctcagtgctcttcctcctggccgtgattctggccgttgccttgcgcctgcgacgctcctccagccctgccgcctggagctgcttccaacctggtctctgtgtcaagtctggacctgtggttccccccaactacagtcaggggactttgccttattcctacaacctatgtgttgcacatacaggaaagacggagtttaatttcctaaaatgtagtgagcaattgagttcaggacaagacatactttgtggtgattcatctggggccttatttccactttgtaattccagcgagtcgacttcccatcctgagttgcaagccccgcccaacacggactggcgtttctctcaggcccagagacccggcaccagcggctcccaaaatggcgatgacaccggcacctggcccaacaaccagtttgacacagagatgctgcaagccatgatcttggcgtccgccagtgaagctgctgatgggagctccaccctgggagggggtgccggcaccatgggattgagcgcccgctacggaccccagttcaccctgcagcacgtgcccgactaccgccagaatgtctacatcccaggcagcaatgccacactgaccaacgcagctggcaagcgggatggcaaggccccagcaggtggcaatggcaacaagaagaagtcgggcaagaaggagaagaagtaacatggaggccaggccaagagccacagggcggcctctccccaaccagcccagcttctccttacctgcacccaggcctcagagtttcagggctaacccccagaatactggtaggggccaaggccatgctccccttgggaaacagaaacaagtgcccagtcagcacctaccccttcccccccagggggttgaatatgcaaaagcagttccgctgggaacccccatccaatcaactgctgtacccatgggggtagtggggttactgtagacaccaagaaccatttgccacaccccgtttagttacagctgaactcctccatcttccaaatcaatcaggcccatccatcccatgcctccctcctccccaccccactccaacagttcctctttcccgagtaaggtggttggggtgttgaagtaccaagtaacctacaagcctcctagttctgaaaagttggaagggcatcatgacctcttggcctctcctttgattctcaatcttcccccaaagcatggtttggtgccagccccttcacctccttccagagcccaagatcaatgctcaagttttggaggacatgatcaccatccccatggtactgatgcttgctggatttagggagggcattttgctaccaagcctcttcccaacgccctggggaccagtcttctgttttgtttttcattgtttgacgtttccactgcatgccttgacttcccccacctcctcctcaaacaagagactccactgcatgttccaagacagtatggggtggtaagataaggaagggaagtgtgtggatgtggatggtgggggcatggacaaagcttgacacatcaagttatcaaggccttggaggaggctctgtatgtcctcaggggactgacaacatcctccagattccagccataaaccaataactaggctggacccttcccactacataatagggctcagcccaggcagccagctttgggctgagctaacaggaccaatggattaaactggcatttcagtccaaggaagctcgaagcaggtttaggaccaggtccccttgagaggtcagaggggcctctgtgggtgctgggtactccagaggtgccactggtggaagggtcagcggagccccagcaggaagggtgggccagccaggccattcttagtccctgggttggggaggcagggagctagggcagggaccaaatgaacagaaagtctcagcccaggatggggcttcttcaacagggcccctgccctcctgaagcctcagtccttcaccttgccaggtgccgtttctcttccgtgaaggccactgcccaggtccccagtgcgccccctagtggccatagcctggttaaagttccccagtgcctccttgtgcatagaccttcttctcccacccccttctgcccctgggtccccggccatccagcggggctgccagagaaccccagacctgcccttacagtagtgtagcgccccctccctctttcggctggtgtagaatagccagtagtgtagtgcggtgtgcttttacgtgatggcgggtgggcagcgggcggcgggctccgcgcagccgtctgtccttgatctgcccgcggcggcccgtgttgtgttttgtgctgtgtccacgcgctaaggcgaccccctcccccgtactgacttctcctataagcgcttctcttcgcatagtcacgtagctcccaccccaccctcttcctgtgtctcacgcaagttttatactctaatatttatatggctttttttcttcgacaaaaaaataataaaacgtttcttctgaaaagctg

SEQ ID NO: 1761 - protein, 923 aa, Homo sapiens
MGSGAGELGRAERLPVLFLFLLSLFCPALCEQIRYRIPEEMPKGSVVGNLATDLGFSVQELPTRKLRVSSEKPYFTVSAESGELLVSSRLDREEICGKKPACALEFEAVAENPLNFYHVNVEIEDINDHTPKFTQNSFELQISESAQPGTRFILEVAEDADIGLNSLQKYKLSLNPSFSLIIKEKQDGSKYPELALEKTLDREQQSYHRLVLTALDGGHPPLSGTTELRIQVTDANDNPPVFNRDVYRVSLRENVPPGTTVLQVSATDQDEGINSEITYSFYRTGQIFSLNSKSGEITTQKKLDFEETKEYSMVVEGRDGGGLVAQCTVEINIQDENDNSPEVTFHSLLEMILENAVPGTLIALIKIHDQDSGENGEVNCQLQGEVPFKIISSSKNSYKLVTDGTLDREQTPEYNVTITATDRGKPPLSSSISVILHIRDVNDNAPVFHQASYLVSVPENNPPGASIAQVCASDLDLGLNGQVSYSIMASDLEPLALASYVSMSAQSGVVFAQRAFDYEQLRTFELTLQARDQGSPALSANVSLRVLVGDRNDNAPRVLYPALGPDGSALFDMVPRAAEPGYLVTKVVAVDADSGHNAWLSYHVLQASEPGLFSLGLRTGEVRTARALGDRDAARQRLLVAVRDGGQPPLSATATLHLVFADSLQEVLPDITDRPVPSDPQAELQFYLVVALALISVLFLLAVILAVALRLRRSSSPAAWSCFQPGLCVKSGPVVPPNYSQGTLPYSYNLCVAHTGKTEFNFLKCSEQLSSGQDILCGDSSGALFPLCNSSESTSHPELQAPPNTDWRFSQAQRPGTSGSQNGDDTGTWPNNQFDTEMLQAMILASASEAADGSSTLGGGAGTMGLSARYGPQFTLQHVPDYRQNVYIPGSNATLTNAAGKRDGKAPAGGNGNKKKSGKKEKK

SEQ ID NO: 1762 - DNA, 4599 bp, Homo sapiens
atgggagggagctgcgcgcagaggcgccgggccggcccgcggcaggtgctatttcctttgctgctgcctttgttctaccccaccctgagtgagccgatccgctactcgattccggaggagctggccaagggctcggtggtggggaacctcgctaaggatctagggctcagtgtcctggatgtgtcggctcgcaagctgcgagtgagcgcggagaagctgcacttcagcgtagacgcggagagcggggacttacttgtgaagaaccgaatagaccgtgagcaaatatgcaaagagagaagaagatgtgagttgcaattggaagctgtggtggaaaatcctttaaatatttttcatgtcattgtggtgattgaggatgttaatgaccacgcccctcaatttgataaaaaggaaatacatttagaaattttcgaatctgcatccgctggtacacgactatcgcttgaccctgccacggatcctgatataaacataaactcaattaaagattataagataaactctaatccttatttttcattaatggttagagttaattccgatggtggcaaatacccagagttatctctggagaaactcctagaccgggaagaacagagatctcatagcttgatattgactgccttggacggaggggacccaccaagaagtgccaccgctcacatagaaatttctgtcaaggataccaatgataaccccccggttttcagcagagacgaatatagaattagtcttagtgaaaatctgccccctgggtcccctgtgttgcaagtgacagccactgaccaggatgagggggtcaatgctgagataaactactacttccgaagcactgcccagagcacaaaacatatgttctcattggatgagaaaacaggtatgattaagaataaccagtcatttgattttgaagatgtagaaaggtacaccatggaagtggaagcgaaggacggaggtggtctctctacccagtgtaaagtaatcatagaaatccttgatgaaaacgacaacagcccagaaataatcatcacttctctctctgatcagattttggagaattcacctccaggaatggttgttgccctcttcaaaacacgggatctggatttcggaggaaatggagaagtcaggtgtaatatagaaacagacattccattcaagatttattcttcttccaataactactacaaactggtgacagatggagccctggaccgagagcagacaccagaatacaatgtcaccatcgtagccactgacaggggcaagccgcctctttcttccagtagaagcatcaccttgtatgtcgctgacatcaacgacaacgccccagttttcgaccagacgtcctacgtggtccacgtggccgagaacaacccgccaggagcctccattgcgcaagtgagcgcctctgacccggatttggggctcaatggccacatctcctactctatagtggcgagtgacctagagcccctggcggtgtcgtcatacgtgtcagtgagcgcgcagagcggggtggtgttcgcgcagcgcgcctttgatcacgagcagctgcgcgccttcgcgctcacgctgcaggcccgcgaccacggctcgcccacgctcagcgccaacgtgagcctgcgcgtgttggtgggagaccgcaatgacaacgcaccgcgggtgctgtacccagctctgggtcctgacggctccgcgttcttcgatatggtacctcgctctgcagagcccggctacctagtgactaaggtggtagcggtggacgccgactcgggacacaacgcctggctgtcctaccacgtgctgcaggccagtgagcccggactcttcagcctggggctgcgcactggggaggtgcgcacggctcgagccttaggcgacagggacgcagcccgccagcgcctgctggtcgctgtgcgtgacggtggacagccgccactctctgccaccgccacgcttcatctggtcttcgcagacaacttgcaagagatactgccagacctcagcgaccgccctgtactctctgacccccaggctgaactgcagttttacctggtggtggccttggccttaatctcagtgctcttcctcctcgccgtgattctggccattgccttgcgcctgcgacgctctctcagccctgctacttgggactgcttccatcctggtctctgtgtcaagtctggacctgtagttccccccaactacagtgaggggactttgccttattcttataatctgtgcattgcacatacgggtacaaaagagtttaatttcctaaaatgcagtgtgcccctacattccaatgaagacatggtttgcagtgtttctcctggagccttaattccacctcatggtggggaggatttgacttcacatcctgagactctgacttcgcaagccccgcccaacacggactggcgtttctctcaggcccagagacccggcaccagcggctcccaaaatggcgatgacaccggcacctggcccaacaaccagtttgacacagagatgctgcaagccatgatcttggcgtccgccagtgaagctgctgatgggagctccaccctgggagggggtgccggcaccatgggattgagcgcccgctacggaccccagttcaccctgcagcacgtgcccgactaccgccagaatgtctacatcccaggcagcaatgccacactgaccaacgcagctggcaagcgggatggcaaggccccagcaggtggcaatggcaacaagaagaagtcgggcaagaaggagaagaagtaacatggaggccaggccaagagccacagggcggcctctccccaaccagcccagcttctccttacctgcacccaggcctcagagtttcagggctaacccccagaatactggtaggggccaaggccatgctccccttgggaaacagaaacaagtgcccagtcagcacctaccccttcccccccagggggttgaatatgcaaaagcagttccgctgggaacccccatccaatcaactgctgtacccatgggggtagtggggttactgtagacaccaagaaccatttgccacaccccgtttagttacagctgaactcctccatcttccaaatcaatcaggcccatccatcccatgcctccctcctccccaccccactccaacagttcctctttcccgagtaaggtggttggggtgttgaagtaccaagtaacctacaagcctcctagttctgaaaagttggaagggcatcatgacctcttggcctctcctttgattctcaatcttcccccaaagcatggtttggtgccagccccttcacctccttccagagcccaagatcaatgctcaagttttggaggacatgatcaccatccccatggtactgatgcttgctggatttagggagggcattttgctaccaagcctcttcccaacgccctggggaccagtcttctgttttgtttttcattgtttgacgtttccactgcatgccttgacttcccccacctcctcctcaaacaagagactccactgcatgttccaagacagtatggggtggtaagataaggaagggaagtgtgtggatgtggatggtgggggcatggacaaagcttgacacatcaagttatcaaggccttggaggaggctctgtatgtcctcaggggactgacaacatcctccagattccagccataaaccaataactaggctggacccttcccactacataatagggctcagcccaggcagccagctttgggctgagctaacaggaccaatggattaaactggcatttcagtccaaggaagctcgaagcaggtttaggaccaggtccccttgagaggtcagaggggcctctgtgggtgctgggtactccagaggtgccactggtggaagggtcagcggagccccagcaggaagggtgggccagccaggccattcttagtccctgggttggggaggcagggagctagggcagggaccaaatgaacagaaagtctcagcccaggatggggcttcttcaacagggcccctgccctcctgaagcctcagtccttcaccttgccaggtgccgtttctcttccgtgaaggccactgcccaggtccccagtgcgccccctagtggccatagcctggttaaagttccccagtgcctccttgtgcatagaccttcttctcccacccccttctgcccctgggtccccggccatccagcggggctgccagagaaccccagacctgcccttacagtagtgtagcgccccctccctctttcggctggtgtagaatagccagtagtgtagtgcggtgtgcttttacgtgatggcgggtgggcagcgggcggcgggctccgcgcagccgtctgtccttgatctgcccgcggcggcccgtgttgtgttttgtgctgtgtccacgcgctaaggcgaccccctcccccgtactgacttctcctataagcgcttctcttcgcatagtcacgtagctcccaccccaccctcttcctgtgtctcacgcaagttttatactctaatatttatatggctttttttcttcgacaaaaaaataataaaacgtttcttctgaaaagctg

SEQ ID NO: 1763 - protein, 930 aa, Homo sapiens
MGGSCAQRRRAGPRQVLFPLLLPLFYPTLSEPIRYSIPEELAKGSVVGNLAKDLGLSVLDVSARKLRVSAEKLHFSVDAESGDLLVKNRIDREQICKERRRCELQLEAVVENPLNIFHVIVVIEDVNDHAPQFDKKEIHLEIFESASAGTRLSLDPATDPDININSIKDYKINSNPYFSLMVRVNSDGGKYPELSLEKLLDREEQRSHSLILTALDGGDPPRSATAHIEISVKDTNDNPPVFSRDEYRISLSENLPPGSPVLQVTATDQDEGVNAEINYYFRSTAQSTKHMFSLDEKTGMIKNNQSFDFEDVERYTMEVEAKDGGGLSTQCKVIIEILDENDNSPEIIITSLSDQILENSPPGMVVALFKTRDLDFGGNGEVRCNIETDIPFKIYSSSNNYYKLVTDGALDREQTPEYNVTIVATDRGKPPLSSSRSITLYVADINDNAPVFDQTSYVVHVAENNPPGASIAQVSASDPDLGLNGHISYSIVASDLEPLAVSSYVSVSAQSGVVFAQRAFDHEQLRAFALTLQARDHGSPTLSANVSLRVLVGDRNDNAPRVLYPALGPDGSAFFDMVPRSAEPGYLVTKVVAVDADSGHNAWLSYHVLQASEPGLFSLGLRTGEVRTARALGDRDAARQRLLVAVRDGGQPPLSATATLHLVFADNLQEILPDLSDRPVLSDPQAELQFYLVVALALISVLFLLAVILAIALRLRRSLSPATWDCFHPGLCVKSGPVVPPNYSEGTLPYSYNLCIAHTGTKEFNFLKCSVPLHSNEDMVCSVSPGALIPPHGGEDLTSHPETLTSQAPPNTDWRFSQAQRPGTSGSQNGDDTGTWPNNQFDTEMLQAMILASASEAADGSSTLGGGAGTMGLSARYGPQFTLQHVPDYRQNVYIPGSNATLTNAAGKRDGKAPAGGNGNKKKSGKKEKK

SEQ ID NO: 1764 - DNA, 4741 bp, Homo sapiens
gctgcgcagaccttgcccagcacaccagattgccagctccgagacccgggactcctcctgtcctgggccgaatgctcttttagcgcggtagagtgcactttctccaactggaaaagcggggacccagcgagaacccgagcgaacgatgggagggagctgcgcgcagaggcgccgggccggcccgcggcaggtactatttcctttgctgctgcctttgttctaccccacgctgtgtgagccgatccgctactcgattccggaggagctggccaagggctcggtggtggggaacctcgctaaggatctagggcttagtgtcctggatgtgtcggctcgcgagctgcgagtgagcgcggagaagctgcacttcagcgtagacgcgcagagcggggacttacttgtgaaggaccgaatagaccgtgagcaaatatgcaaagagagaagaagatgtgagttgcaattggaagctgtggtggaaaatcctttaaatatttttcatgtcattgtggtgattgaggatgttaatgaccacgcccctcaattccggaaagatgaaataaacttagaaatcagtgaatccgtcagcctggggatgggaacaattcttgagtctgcagaagatcctgatattagtatgaattcgctgagcaaataccaactaagtcctaacgagtatttctcattggtggagaaagacaatcctgatggtggcaaatatccagaattagtattgcagaagactctggaccgagaaacgcagagcgctcaccacttggtactgaccgccttagatggtggggaccctccccgaagcggtactgctcagataagaatcctggtaatagatgccaatgacaaccccccagtgttcagccaggacgtgtacagggttagccttcgggaagacgtgcctccaggcacctccatcctgagagtgaaggccactgaccaggacgagggcatcaactcagagatcacttattccttctttggtgtggctgacaaagctcagcacgtgttctctctggattacactacaggaaacattctaactcagcagcctttggattttgaagaagtagaaagatatacgataaacatagaagcaaaagaccgaggatctctctcaacacggtgtaaagtaattgtagaagttgtagacgaaaacgacaacagcccagaaataatcatcacgtcactctctgatcagattatggaggattcccctccaggagtggttgttgccctcttcaaaacacgggaccaagactcaggggaaaatggggaagtcaggtgtagcttaagtagaggtgttccatttaagattcattcttcttctaataattactacaagctagtaacagatgaggccctggatcgggagcagaccccagagtacaacgtcaccatcgcagccacagacaggggcaagcctccgttatcctccagcaaaaccataaccctgcacattactgacgtcaatgacaacgcgccggttttcggacagtcagcctacctggtccacgtgccagaaaacaaccagccgggtgcctccatagcgcaagtcagtgcctctgacccagacttcgggctcaacggccgtgtctcctactctctcattgccagcgacctggagtcacgaacgctgtcgtcctacgtgtccgtgagcgcgcagagcggggtggtgttcgcgcagcgcgccttcgaccacgagcagctgcgcaccttcgagctcacgctgcaggcccgcgaccagggctcgcccgcgctcagcgccaatgtgagcctgcgcgtgttggtgggcgaccgtaacgacaacgcaccgcgggtgctgtaccctgcgctgggtcccgacggctccgcgctcttcgacacagtgccgcgggccgcgcagccaggctacctggtgaccaaggtggtggccgtggacgcggactcggggcacaatgcctggctgtcctaccacgtggtgcaggccagtgagcccgggctcttcagcctggggctgcgaacaggcgaggtgcgcatggtgcgtgctttgggtgacaaggactcggtccgccagcgcctgctagtcgctgtaagagatggaggacagccacccctttcagccactgccacgctgcacctggtgttcgcagatagcttgcaagaggtactgccggatttcagcgaccatcccacaccctctgactcccaggctgagatgcagttttacctggtggtggccttggccttgatttctgtgctctttctcctcgcggtgattctagctattgctctacgcctgcgacagtctttcagccctactgcaggagactgctttgagtcagttctctgctccaagtccggacctgtgggtccccccaactacagtgagggaacgttgccctatgcctataatttttgtgtgcctggggatcaaatgaatccagaatttaattttttcacatctgttgatcattgtccagccacacaagataacctcaacaaagatagcatgctactggctagcattttaactcccagcgttgaagcagataagaagattcttaaacagcaagccccgcccaacacggactggcgtttctctcaggcccagagacccggcaccagcggctcccaaaatggcgatgacaccggcacctggcccaacaaccagtttgacacagagatgctgcaagccatgatcttggcgtccgccagtgaagctgctgatgggagctccaccctgggagggggtgccggcaccatgggattgagcgcccgctacggaccccagttcaccctgcagcacgtgcccgactaccgccagaatgtctacatcccaggcagcaatgccacactgaccaacgcagctggcaagcgggatggcaaggccccagcaggtggcaatggcaacaagaagaagtcgggcaagaaggagaagaagtaacatggaggccaggccaagagccacagggcggcctctccccaaccagcccagcttctccttacctgcacccaggcctcagagtttcagggctaacccccagaatactggtaggggccaaggccatgctccccttgggaaacagaaacaagtgcccagtcagcacctaccccttcccccccagggggttgaatatgcaaaagcagttccgctgggaacccccatccaatcaactgctgtacccatgggggtagtggggttactgtagacaccaagaaccatttgccacaccccgtttagttacagctgaactcctccatcttccaaatcaatcaggcccatccatcccatgcctccctcctccccaccccactccaacagttcctctttcccgagtaaggtggttggggtgttgaagtaccaagtaacctacaagcctcctagttctgaaaagttggaagggcatcatgacctcttggcctctcctttgattctcaatcttcccccaaagcatggtttggtgccagccccttcacctccttccagagcccaagatcaatgctcaagttttggaggacatgatcaccatccccatggtactgatgcttgctggatttagggagggcattttgctaccaagcctcttcccaacgccctggggaccagtcttctgttttgtttttcattgtttgacgtttccactgcatgccttgacttcccccacctcctcctcaaacaagagactccactgcatgttccaagacagtatggggtggtaagataaggaagggaagtgtgtggatgtggatggtgggggcatggacaaagcttgacacatcaagttatcaaggccttggaggaggctctgtatgtcctcaggggactgacaacatcctccagattccagccataaaccaataactaggctggacccttcccactacataatagggctcagcccaggcagccagctttgggctgagctaacaggaccaatggattaaactggcatttcagtccaaggaagctcgaagcaggtttaggaccaggtccccttgagaggtcagaggggcctctgtgggtgctgggtactccagaggtgccactggtggaagggtcagcggagccccagcaggaagggtgggccagccaggccattcttagtccctgggttggggaggcagggagctagggcagggaccaaatgaacagaaagtctcagcccaggatggggcttcttcaacagggcccctgccctcctgaagcctcagtccttcaccttgccaggtgccgtttctcttccgtgaaggccactgcccaggtccccagtgcgccccctagtggccatagcctggttaaagttccccagtgcctccttgtgcatagaccttcttctcccacccccttctgcccctgggtccccggccatccagcggggctgccagagaaccccagacctgcccttacagtagtgtagcgccccctccctctttcggctggtgtagaatagccagtagtgtagtgcggtgtgcttttacgtgatggcgggtgggcagcgggcggcgggctccgcgcagccgtctgtccttgatctgcccgcggcggcccgtgttgtgttttgtgctgtgtccacgcgctaaggcgaccccctcccccgtactgacttctcctataagcgcttctcttcgcatagtcacgtagctcccaccccaccctcttcctgtgtctcacgcaagttttatactctaatatttatatggctttttttcttcgacaaaaaaataataaaacgtttcttctgaaaagctg

SEQ ID NO: 1765 - protein, 929 aa, Homo sapiens
MGGSCAQRRRAGPRQVLFPLLLPLFYPTLCEPIRYSIPEELAKGSVVGNLAKDLGLSVLDVSARELRVSAEKLHFSVDAQSGDLLVKDRIDREQICKERRRCELQLEAVVENPLNIFHVIVVIEDVNDHAPQFRKDEINLEISESVSLGMGTILESAEDPDISMNSLSKYQLSPNEYFSLVEKDNPDGGKYPELVLQKTLDRETQSAHHLVLTALDGGDPPRSGTAQIRILVIDANDNPPVFSQDVYRVSLREDVPPGTSILRVKATDQDEGINSEITYSFFGVADKAQHVFSLDYTTGNILTQQPLDFEEVERYTINIEAKDRGSLSTRCKVIVEVVDENDNSPEIIITSLSDQIMEDSPPGVVVALFKTRDQDSGENGEVRCSLSRGVPFKIHSSSNNYYKLVTDEALDREQTPEYNVTIAATDRGKPPLSSSKTITLHITDVNDNAPVFGQSAYLVHVPENNQPGASIAQVSASDPDFGLNGRVSYSLIASDLESRTLSSYVSVSAQSGVVFAQRAFDHEQLRTFELTLQARDQGSPALSANVSLRVLVGDRNDNAPRVLYPALGPDGSALFDTVPRAAQPGYLVTKVVAVDADSGHNAWLSYHVVQASEPGLFSLGLRTGEVRMVRALGDKDSVRQRLLVAVRDGGQPPLSATATLHLVFADSLQEVLPDFSDHPTPSDSQAEMQFYLVVALALISVLFLLAVILAIALRLRQSFSPTAGDCFESVLCSKSGPVGPPNYSEGTLPYAYNFCVPGDQMNPEFNFFTSVDHCPATQDNLNKDSMLLASILTPSVEADKKILKQQAPPNTDWRFSQAQRPGTSGSQNGDDTGTWPNNQFDTEMLQAMILASASEAADGSSTLGGGAGTMGLSARYGPQFTLQHVPDYRQNVYIPGSNATLTNAAGKRDGKAPAGGNGNKKKSGKKEKK

SEQ ID NO: 1766 - DNA, 4623 bp, Homo sapiens
atgctccgcaaggtgagaagctggacagaaatctggcggtgggctacccttttgttcctcttttaccacctgggttacgtttgtgggcagatccgctacccggtcccagaggagtcacaggaagggacttttgtagggaatgtcgctcaagatttcctgctggatacggacagtctgtcagctcgcaggctgcaggtcgctggagaggtgaaccaaagacacttccgtgtggatttggacagcggagccctgctcatcaagaacccaatcgaccgagaggcactgtgtgggctcagtgccagctgcatcgtgcccctggagtttgtcaccgaaggtcctttggaaatgtaccgagcagaggtagagatcgtagatgtgaatgatcacgccccccgttttccgcggcagcagctggacttggaaattggggaggcagctcctccaggacagcgtttcccgttggaaaaggctcaggatgcagatgtggggagcaattcgattagcagctataggctgagctccaatgaacactttgcactggatgtgaagaagcgcagcgacggcagcctggtcccagagctgctcctggagaagcctttggatcgagagaagcaatcggactaccgcctggtgctgactgctgtcgatggagggaacccgccgagatctggcaccgcagagctccgggtatccgtgctggacgtaaacgacaacgccccagccttccagcaatccagctacaggattagtgtgttggagagcgcaccagcgggcatggtgctcatccagctcaatgcctcagacccggacctgggtcccagtggtaacgtcaccttttatttcagtggtcatacccctgatcgtgtaagaaacctctttagcctgcaccccactactggaaagcttactcttttggggcccctagactttgagagtgagaattactatgaatttgatgtgcgggctcgcgatgggggttctccagccatggagcaacattgcagccttcgagtggatctgctggacgtaaatgacaatgccccttacatcacagtgacctcagagcttggaaccctccccgagagtgcagaacctggcactgtggtggcacttatcagtgtgcaggatccagactcagggtcaaacggagatgtgagcctccgcattcctgaccacttgccatttgccctcaagtctgccttcaggaaccagttctccctggtgactgctggacccttggatcgagaggccaaatctagctatgacatcatggtcactgcttctgatgctgggaaccctcctctcagtacccacagaactattttcctcaatatttcagatgtgaatgataatccaccctctttctttcagaggtcacatgaggtgtttgttcctgagaacaatcgcccaggggacctgctttgctcccttgcagcctctgacccagactctggcttgaatgcgcttatctcctactcactcctggagcccaggaatcgagatgtatcagcttcctctttcatctctctgaacccccagacaggagctgttcatgctactcgatcctttgactatgagcaaacccagacactgcagtttgaggtgcaggcccgggatcggggcaacccaccccttagcagcactgtaacagttcgtctatttgtgctggacctcaatgacaatgctccagctgtgctccgtcctcgggcccggcctggttccttatgtccccaagcactgcctccatcagttggtgctggccacctaatcacaaaggtgactgctgtggacttggattcaggttacaatgcttgggtttcctatcagctcctggaggccccagatcccagcctgtttgcagtctctcgatatgctggggaggtgcggacggctgttcctatcccagctgacctcccaccacagaagctggtcattgtggtaaaggatagtggtagtccaccactctctacctctgttactctcttagtgtccttagaggaagacactcatccagttgtcccagatcttcgagaatcttcagctccaagggaaggagaatctcgtctaaccctctacttggctgtgtccctagtggcaatttgctttgtctcctttggctcattcgtggcactactctctaagtgtcttcgtggggcagcctgtggagtcacatgctttcctgctggcacctgtgcctgtctcaccagatctcgaaggagggaggggcttcccccttccaatgggatcctccgaatccagctagggtcagatgaccctatcaagtttgttgatgtgggaggccactctcatggctgtacacccttggcttctgcacccactcggagtgatagcttcatgatggtgaagtcacccagtgcacctatggcaggggagcctgttcgcccaagctgcccaccctctgatcttctctatgggctagagcaagccccgcccaacacggactggcgtttctctcaggcccagagacccggcaccagcggctcccaaaatggcgatgacaccggcacctggcccaacaaccagtttgacacagagatgctgcaagccatgatcttggcgtccgccagtgaagctgctgatgggagctccaccctgggagggggtgccggcaccatgggattgagcgcccgctacggaccccagttcaccctgcagcacgtgcccgactaccgccagaatgtctacatcccaggcagcaatgccacactgaccaacgcagctggcaagcgggatggcaaggccccagcaggtggcaatggcaacaagaagaagtcgggcaagaaggagaagaagtaacatggaggccaggccaagagccacagggcggcctctccccaaccagcccagcttctccttacctgcacccaggcctcagagtttcagggctaacccccagaatactggtaggggccaaggccatgctccccttgggaaacagaaacaagtgcccagtcagcacctaccccttcccccccagggggttgaatatgcaaaagcagttccgctgggaacccccatccaatcaactgctgtacccatgggggtagtggggttactgtagacaccaagaaccatttgccacaccccgtttagttacagctgaactcctccatcttccaaatcaatcaggcccatccatcccatgcctccctcctccccaccccactccaacagttcctctttcccgagtaaggtggttggggtgttgaagtaccaagtaacctacaagcctcctagttctgaaaagttggaagggcatcatgacctcttggcctctcctttgattctcaatcttcccccaaagcatggtttggtgccagccccttcacctccttccagagcccaagatcaatgctcaagttttggaggacatgatcaccatccccatggtactgatgcttgctggatttagggagggcattttgctaccaagcctcttcccaacgccctggggaccagtcttctgttttgtttttcattgtttgacgtttccactgcatgccttgacttcccccacctcctcctcaaacaagagactccactgcatgttccaagacagtatggggtggtaagataaggaagggaagtgtgtggatgtggatggtgggggcatggacaaagcttgacacatcaagttatcaaggccttggaggaggctctgtatgtcctcaggggactgacaacatcctccagattccagccataaaccaataactaggctggacccttcccactacataatagggctcagcccaggcagccagctttgggctgagctaacaggaccaatggattaaactggcatttcagtccaaggaagctcgaagcaggtttaggaccaggtccccttgagaggtcagaggggcctctgtgggtgctgggtactccagaggtgccactggtggaagggtcagcggagccccagcaggaagggtgggccagccaggccattcttagtccctgggttggggaggcagggagctagggcagggaccaaatgaacagaaagtctcagcccaggatggggcttcttcaacagggcccctgccctcctgaagcctcagtccttcaccttgccaggtgccgtttctcttccgtgaaggccactgcccaggtccccagtgcgccccctagtggccatagcctggttaaagttccccagtgcctccttgtgcatagaccttcttctcccacccccttctgcccctgggtccccggccatccagcggggctgccagagaaccccagacctgcccttacagtagtgtagcgccccctccctctttcggctggtgtagaatagccagtagtgtagtgcggtgtgcttttacgtgatggcgggtgggcagcgggcggcgggctccgcgcagccgtctgtccttgatctgcccgcggcggcccgtgttgtgttttgtgctgtgtccacgcgctaaggcgaccccctcccccgtactgacttctcctataagcgcttctcttcgcatagtcacgtagctcccaccccaccctcttcctgtgtctcacgcaagttttatactctaatatttatatggctttttttcttcgacaaaaaaataataaaacgtttcttctgaaaagctg

SEQ ID NO: 1767 - protein, 938 aa, Homo sapiens
MLRKVRSWTEIWRWATLLFLFYHLGYVCGQIRYPVPEESQEGTFVGNVAQDFLLDTDSLSARRLQVAGEVNQRHFRVDLDSGALLIKNPIDREALCGLSASCIVPLEFVTEGPLEMYRAEVEIVDVNDHAPRFPRQQLDLEIGEAAPPGQRFPLEKAQDADVGSNSISSYRLSSNEHFALDVKKRSDGSLVPELLLEKPLDREKQSDYRLVLTAVDGGNPPRSGTAELRVSVLDVNDNAPAFQQSSYRISVLESAPAGMVLIQLNASDPDLGPSGNVTFYFSGHTPDRVRNLFSLHPTTGKLTLLGPLDFESENYYEFDVRARDGGSPAMEQHCSLRVDLLDVNDNAPYITVTSELGTLPESAEPGTVVALISVQDPDSGSNGDVSLRIPDHLPFALKSAFRNQFSLVTAGPLDREAKSSYDIMVTASDAGNPPLSTHRTIFLNISDVNDNPPSFFQRSHEVFVPENNRPGDLLCSLAASDPDSGLNALISYSLLEPRNRDVSASSFISLNPQTGAVHATRSFDYEQTQTLQFEVQARDRGNPPLSSTVTVRLFVLDLNDNAPAVLRPRARPGSLCPQALPPSVGAGHLITKVTAVDLDSGYNAWVSYQLLEAPDPSLFAVSRYAGEVRTAVPIPADLPPQKLVIVVKDSGSPPLSTSVTLLVSLEEDTHPVVPDLRESSAPREGESRLTLYLAVSLVAICFVSFGSFVALLSKCLRGAACGVTCFPAGTCACLTRSRRREGLPPSNGILRIQLGSDDPIKFVDVGGHSHGCTPLASAPTRSDSFMMVKSPSAPMAGEPVRPSCPPSDLLYGLEQAPPNTDWRFSQAQRPGTSGSQNGDDTGTWPNNQFDTEMLQAMILASASEAADGSSTLGGGAGTMGLSARYGPQFTLQHVPDYRQNVYIPGSNATLTNAAGKRDGKAPAGGNGNKKKSGKKEKK

SEQ ID NO: 1768 - DNA, 4641 bp, Homo sapiens
atggggcccaagacactcccacagctcgctgggaaatggcaagtgctgtgcatgttgtccttgtgctgctggggctgggtgtctgggcagcttcgttactcagtggtggaggagtctgagccggggacgctggtggggaatgttgctcaggatctgggcttaaagatgacagatctgttgagccggcggctgcaattgggctctgaggagaatgggcgctatttttccctgagcttgatgagtggtgccctggcagtgaatcaaaagattgaccgagaaagcctatgtggagccagcaccagctgcctgctgccagtgcaggtggtgactgaacaccccctggagctaatccgtgtagaggtagagatcctggatctcaatgacaactctcctagctttgccacccctgagcgagagatgcgcatctcagaatcagcagcatctggggcacgattcccactggacagtgcccaggatccggatgtgggcaccaatactgtgagcttttacactctaagccccaacagccacttctctctgaatgtgaagaccctaaaagatgggaagccattcccagagctggtgctagagcagcagctggatcgtgaagcccaggcaagacatcagctggtgcttactgctgtggatggggggaccccagcccgctcagggaccacccttatctctgtcatcgtgctggacatcaatgataatgctccaaccttccaatcctcagttctacgtgtgggaatcccagagaatgcacccattggtactctgctgctccgcctcaatgccactgatccagacgagggcaccaacggccaactagactattcttttggagaccacacatctgaggcagtgcggaacctctttggcctagaccctagcagtggggcaatccatgtgttgggtcccatagactttgaggagtcacgtttctatgaaattcatgcaagagcccgtgaccagggacagcctgccatggagggccactgtgtgattcaagtggatgtgggggatgtcaatgacaatgccccagaggtgctattggcctctttggccaaccctgtcctagagagcacaccagtgggcacagtagtggggttgtttaatgtgcgagaccgggactcaggtagaaatggtgaagtgagccttgatatctctccggacctgccatttcagattaagccttctgagaaccactactcgctgctaaccagccagcctttggaccgggaggccacatcccactatatcatcgagctgctggccagcgatgctggttcaccttccctacacaaacatctcaccatcaggctcaacatttcagatgtcaatgacaatgcaccccgcttcaaccagcagctttacactgcttacatcctagaaaaccggcctccgggctcccttctttgcactgtggctgcctcagatccagacactggggataatgcccgcctcacctactccattgtaggaaatcaggttcagggagccccagcctcctcctttgtgtatgtcaacccagaggatggacggatctttgcccagcgtacctttgactatgaattgctgcagatgctgcagattgtggtgggggttcgagactccggctctcccccattgcatgccaacacatctctgcatgtgtttgtcctagacgagaatgataatgccccagctgtgctgcacccacggccagactgggaacactcagccccccagcgtctccctcgctctgctcctcctggctccttggtcaccaaggtgacagccgtggatgctgatgcaggccacaatgcgtggctctcctactcactgttgccacagtccacagccccaggactgttcctcgtgtctacacacactggtgaggtgcgcacagcccgggccttactggaggatgactctgacacccagcaggtggtggtcctggtgagggacaatggtgacccttcactctcctccacagccacagtgctgctggttctggaggatgaggaccctgaggaaatgcccaaatccagtgacttcctcatacaccctcctgagcgttcagaccttaccctttacctcattgtggctctagcgaccgtcagtctcttatccctagtcaccttcacctttctgtcagcgaagtgccttcagggaaacgcagacggggacgggggtggagggcagtgctgcaggcgccaggactcaccctccccggacttctataagcagtccagccccaacctgcaggtgagctcggacggcacgctcaagtacatggaggtgacgctgcggcccacagactcgcagagccactgctacaggacgtgcttttcaccggcctcggacggcagtgacttcacttttctaagacccctcagcgttcagcagcccacagctctggcgctggagcctgacgccatccggtcccgctctaatacgctgcgggagcggagccagcaagccccgcccaacacggactggcgtttctctcaggcccagagacccggcaccagcggctcccaaaatggcgatgacaccggcacctggcccaacaaccagtttgacacagagatgctgcaagccatgatcttggcgtccgccagtgaagctgctgatgggagctccaccctgggagggggtgccggcaccatgggattgagcgcccgctacggaccccagttcaccctgcagcacgtgcccgactaccgccagaatgtctacatcccaggcagcaatgccacactgaccaacgcagctggcaagcgggatggcaaggccccagcaggtggcaatggcaacaagaagaagtcgggcaagaaggagaagaagtaacatggaggccaggccaagagccacagggcggcctctccccaaccagcccagcttctccttacctgcacccaggcctcagagtttcagggctaacccccagaatactggtaggggccaaggccatgctccccttgggaaacagaaacaagtgcccagtcagcacctaccccttcccccccagggggttgaatatgcaaaagcagttccgctgggaacccccatccaatcaactgctgtacccatgggggtagtggggttactgtagacaccaagaaccatttgccacaccccgtttagttacagctgaactcctccatcttccaaatcaatcaggcccatccatcccatgcctccctcctccccaccccactccaacagttcctctttcccgagtaaggtggttggggtgttgaagtaccaagtaacctacaagcctcctagttctgaaaagttggaagggcatcatgacctcttggcctctcctttgattctcaatcttcccccaaagcatggtttggtgccagccccttcacctccttccagagcccaagatcaatgctcaagttttggaggacatgatcaccatccccatggtactgatgcttgctggatttagggagggcattttgctaccaagcctcttcccaacgccctggggaccagtcttctgttttgtttttcattgtttgacgtttccactgcatgccttgacttcccccacctcctcctcaaacaagagactccactgcatgttccaagacagtatggggtggtaagataaggaagggaagtgtgtggatgtggatggtgggggcatggacaaagcttgacacatcaagttatcaaggccttggaggaggctctgtatgtcctcaggggactgacaacatcctccagattccagccataaaccaataactaggctggacccttcccactacataatagggctcagcccaggcagccagctttgggctgagctaacaggaccaatggattaaactggcatttcagtccaaggaagctcgaagcaggtttaggaccaggtccccttgagaggtcagaggggcctctgtgggtgctgggtactccagaggtgccactggtggaagggtcagcggagccccagcaggaagggtgggccagccaggccattcttagtccctgggttggggaggcagggagctagggcagggaccaaatgaacagaaagtctcagcccaggatggggcttcttcaacagggcccctgccctcctgaagcctcagtccttcaccttgccaggtgccgtttctcttccgtgaaggccactgcccaggtccccagtgcgccccctagtggccatagcctggttaaagttccccagtgcctccttgtgcatagaccttcttctcccacccccttctgcccctgggtccccggccatccagcggggctgccagagaaccccagacctgcccttacagtagtgtagcgccccctccctctttcggctggtgtagaatagccagtagtgtagtgcggtgtgcttttacgtgatggcgggtgggcagcgggcggcgggctccgcgcagccgtctgtccttgatctgcccgcggcggcccgtgttgtgttttgtgctgtgtccacgcgctaaggcgaccccctcccccgtactgacttctcctataagcgcttctcttcgcatagtcacgtagctcccaccccaccctcttcctgtgtctcacgcaagttttatactctaatatttatatggctttttttcttcgacaaaaaaataataaaacgtttcttctgaaaagctg

SEQ ID NO: 1769 - protein, 944 aa, Homo sapiens
MGPKTLPQLAGKWQVLCMLSLCCWGWVSGQLRYSVVEESEPGTLVGNVAQDLGLKMTDLLSRRLQLGSEENGRYFSLSLMSGALAVNQKIDRESLCGASTSCLLPVQVVTEHPLELIRVEVEILDLNDNSPSFATPEREMRISESAASGARFPLDSAQDPDVGTNTVSFYTLSPNSHFSLNVKTLKDGKPFPELVLEQQLDREAQARHQLVLTAVDGGTPARSGTTLISVIVLDINDNAPTFQSSVLRVGIPENAPIGTLLLRLNATDPDEGTNGQLDYSFGDHTSEAVRNLFGLDPSSGAIHVLGPIDFEESRFYEIHARARDQGQPAMEGHCVIQVDVGDVNDNAPEVLLASLANPVLESTPVGTVVGLFNVRDRDSGRNGEVSLDISPDLPFQIKPSENHYSLLTSQPLDREATSHYIIELLASDAGSPSLHKHLTIRLNISDVNDNAPRFNQQLYTAYILENRPPGSLLCTVAASDPDTGDNARLTYSIVGNQVQGAPASSFVYVNPEDGRIFAQRTFDYELLQMLQIVVGVRDSGSPPLHANTSLHVFVLDENDNAPAVLHPRPDWEHSAPQRLPRSAPPGSLVTKVTAVDADAGHNAWLSYSLLPQSTAPGLFLVSTHTGEVRTARALLEDDSDTQQVVVLVRDNGDPSLSSTATVLLVLEDEDPEEMPKSSDFLIHPPERSDLTLYLIVALATVSLLSLVTFTFLSAKCLQGNADGDGGGGQCCRRQDSPSPDFYKQSSPNLQVSSDGTLKYMEVTLRPTDSQSHCYRTCFSPASDGSDFTFLRPLSVQQPTALALEPDAIRSRSNTLRERSQQAPPNTDWRFSQAQRPGTSGSQNGDDTGTWPNNQFDTEMLQAMILASASEAADGSSTLGGGAGTMGLSARYGPQFTLQHVPDYRQNVYIPGSNATLTNAAGKRDGKAPAGGNGNKKKSGKKEKK

SEQ ID NO: 1770 - DNA, 5503 bp, Homo sapiens
ttcatctgtacctttcaagtattcaaatagaaaaatataaacaatgtaaataaaatagcaaaacaatgtaatatctcataaaactgcaatggtaaaagcatttatcctattgaaattccacaatttttatttgaaaatattatcgacatgtaattcaagtggcatttagaagaataatttaaaagcaacaactctatagaaagcttgtaaaatgattaagtagtttaaaccaaataaaacaatttctgagtcagtcatctccagtaggtctattttagtctcaagataaattcatttctggtgacaactgaagttcttagttatttgttagtatatattggagacatttacaataaagcttagagcacaatgggaaatgaaagtatcatgttttttttaagaccaaatgtattgcagaaatgtgagtaatttaatccgatgctacaatctgatcattctgatctaatctgatcatttaataacactaaataaaaccttcatctcacattctttggctgtttcttttaaaatatgggtttacggataaatcaaataaattcaaaacaaagtaataagcaaatgatttttttttctcagtaatctagtagagtattacatttagaagtaatctgtatctcagtgcagtaactatttaggactgtaagcgccgctgttcacctactggaagacaaatgcaaccgaaaacactcagatctcacacctcacgaagacccgcagatgccacaaactaactgctggactgcagcgaaacccgacccctgtttggaggcactccaggtttccggaggattgtcatctccatagctgcggcaagaaactaaataagacccatttatgcacagtgaagattctgagaggattctgcagcaaaacaacaatggccgctccacagagtcgccccagacgcggcgagctgatcctgctgtgcgcgctgctgggaacgctgtgggaaatcgggaggggacagattcgctactctgtgccagaagagacggacaaaggctccttcgtgggtaatatctccaaggacctggggctggacccccggaagctggcgaagcacggagtccgtatcgtctccagaggtaggacgcagctctttgctctgaacccgcgcagcggcagcttgatcaccgcgggcaggatagatcgggaggagctctgcgctcagagcccgcggtgtctgataaatattaacaccctggttgaggataaaggaaaactctttggggtagaaatagaaataattgatattaacgataataacccaaaattccaggtcgaagatctagaagtaaaaattaacgaaatcgcggttcctggagcacgttatccactcccagaagctgttgacccggatgtgggcgtgaactccctccagagctaccagctcagccccaatcaccacttctccctggacgtgcagactggagacaatggagccataaacccagagctggtgctggagcgcgccctggacagggaggaagaggctgctcaccacctggtcctcacggcctcggatggcggcaagccgcctcgctctagcacagtgcgcatccacgtgacagtgttggatacaaatgacaatgccccggtttttcctcacccgatttaccgagtgaaagtccttgagaacatgcccccaggcacgcggctgcttactgtaacagccagcgacccggatgagggaatcaacggaaaagtggcatacaaattccggaaaattaatgaaaaacaaactccgttattccagcttaatgaaaatactggggaaatatcaatagcaaaaagtctagattatgaagaatgttcattttatgaaatggaaatacaagccgaagatgtgggggcacttctggggaggaccaaattgctcatttcggtggaagatgtaaatgacaatagaccagaagtgatcattacgtctttgtttagcccagtgttagaaaattctcttcccgggacagtaattgccttcttgagtgtgcatgaccaagactctggaaagaatggtcaagttgtctgttacacacgtgataatttaccttttaaattagaaaagtcaataggtaattattatagattagtgacaaggaaatatttggaccgagaaaatgtctctatctacaatatcacagtgatggcctcagatctaggaacaccacctctgtccactgaaactcaaatcgctctgcacgtggcagacattaacgacaaccctcctactttccctcatgcctcctactcagcgtatatcctagagaacaacctgagaggagcctccatcttttccttgactgcacacgaccccgacagccaggagaatgcccaggtcacttactctgtgaccgaggacacgctgcagggggcgcccctgtcctcgtatatctccatcaactctgacaccggtgtcctgtatgcgctgcaatctttcgactatgagcagatccgagacctgcagctactggtaacagccagcgacagcggggacccgcccctcagcagcaacatgtcactgagcctgttcgtgctggaccagaatgacaacgcgcccgagatcctgtaccccgccctccccacagacggttccactggcgtggagctggcgccccgctccgcagagcgtggctacctggtgaccaaggtggtggcggtggacagagactcgggccagaacgcctggctgtcctaccgcctgctcaaggccagcgagccgggactcttctcggtgggtctgcacacgggcgaggtgcgcacggcgcgagccctgctggacagagatgcgctcaagcagagcctcgtggtggccgtccaggaccatggccagccccctctctccgccactgtcacgctcaccgtagccgtggctgacagcatccccgaagtcctgaccgagttgggcagtctgaagccttcggtcgacccgaacgattcgagccttacactctatctcgtggtggcagtggctgccatctcctgtgtcttcctcgcctttgtcgctgtgcttctggggctcaggctgaggcgctggcacaagtcacgcctgctccaggattccggtggcagattggtaggcgtgcctgcctcacattttgtgggtgttgaggaggtacaggctttcctgcagacctattcccaggaagtctccctcaccgccgactcgcggaagagtcacctgatctttccccagcccaactacgcagacatgctcatcagtcaggagggctgtgagaaaaatgattctttgttaacatccgtagattttcatgaatataagaatgaagctgatcatggtcagcaagccccgcccaacacggactggcgtttctctcaggcccagagacccggcaccagcggctcccaaaatggcgatgacaccggcacctggcccaacaaccagtttgacacagagatgctgcaagccatgatcttggcgtccgccagtgaagctgctgatgggagctccaccctgggagggggtgccggcaccatgggattgagcgcccgctacggaccccagttcaccctgcagcacgtgcccgactaccgccagaatgtctacatcccaggcagcaatgccacactgaccaacgcagctggcaagcgggatggcaaggccccagcaggtggcaatggcaacaagaagaagtcgggcaagaaggagaagaagtaacatggaggccaggccaagagccacagggcggcctctccccaaccagcccagcttctccttacctgcacccaggcctcagagtttcagggctaacccccagaatactggtaggggccaaggccatgctccccttgggaaacagaaacaagtgcccagtcagcacctaccccttcccccccagggggttgaatatgcaaaagcagttccgctgggaacccccatccaatcaactgctgtacccatgggggtagtggggttactgtagacaccaagaaccatttgccacaccccgtttagttacagctgaactcctccatcttccaaatcaatcaggcccatccatcccatgcctccctcctccccaccccactccaacagttcctctttcccgagtaaggtggttggggtgttgaagtaccaagtaacctacaagcctcctagttctgaaaagttggaagggcatcatgacctcttggcctctcctttgattctcaatcttcccccaaagcatggtttggtgccagccccttcacctccttccagagcccaagatcaatgctcaagttttggaggacatgatcaccatccccatggtactgatgcttgctggatttagggagggcattttgctaccaagcctcttcccaacgccctggggaccagtcttctgttttgtttttcattgtttgacgtttccactgcatgccttgacttcccccacctcctcctcaaacaagagactccactgcatgttccaagacagtatggggtggtaagataaggaagggaagtgtgtggatgtggatggtgggggcatggacaaagcttgacacatcaagttatcaaggccttggaggaggctctgtatgtcctcaggggactgacaacatcctccagattccagccataaaccaataactaggctggacccttcccactacataatagggctcagcccaggcagccagctttgggctgagctaacaggaccaatggattaaactggcatttcagtccaaggaagctcgaagcaggtttaggaccaggtccccttgagaggtcagaggggcctctgtgggtgctgggtactccagaggtgccactggtggaagggtcagcggagccccagcaggaagggtgggccagccaggccattcttagtccctgggttggggaggcagggagctagggcagggaccaaatgaacagaaagtctcagcccaggatggggcttcttcaacagggcccctgccctcctgaagcctcagtccttcaccttgccaggtgccgtttctcttccgtgaaggccactgcccaggtccccagtgcgccccctagtggccatagcctggttaaagttccccagtgcctccttgtgcatagaccttcttctcccacccccttctgcccctgggtccccggccatccagcggggctgccagagaaccccagacctgcccttacagtagtgtagcgccccctccctctttcggctggtgtagaatagccagtagtgtagtgcggtgtgcttttacgtgatggcgggtgggcagcgggcggcgggctccgcgcagccgtctgtccttgatctgcccgcggcggcccgtgttgtgttttgtgctgtgtccacgcgctaaggcgaccccctcccccgtactgacttctcctataagcgcttctcttcgcatagtcacgtagctcccaccccaccctcttcctgtgtctcacgcaagttttatactctaatatttatatggctttttttcttcgacaaaaaaataataaaacgtttcttctgaaaagctg

SEQ ID NO: 1771 - protein, 932 aa, Homo sapiens
MAAPQSRPRRGELILLCALLGTLWEIGRGQIRYSVPEETDKGSFVGNISKDLGLDPRKLAKHGVRIVSRGRTQLFALNPRSGSLITAGRIDREELCAQSPRCLININTLVEDKGKLFGVEIEIIDINDNNPKFQVEDLEVKINEIAVPGARYPLPEAVDPDVGVNSLQSYQLSPNHHFSLDVQTGDNGAINPELVLERALDREEEAAHHLVLTASDGGKPPRSSTVRIHVTVLDTNDNAPVFPHPIYRVKVLENMPPGTRLLTVTASDPDEGINGKVAYKFRKINEKQTPLFQLNENTGEISIAKSLDYEECSFYEMEIQAEDVGALLGRTKLLISVEDVNDNRPEVIITSLFSPVLENSLPGTVIAFLSVHDQDSGKNGQVVCYTRDNLPFKLEKSIGNYYRLVTRKYLDRENVSIYNITVMASDLGTPPLSTETQIALHVADINDNPPTFPHASYSAYILENNLRGASIFSLTAHDPDSQENAQVTYSVTEDTLQGAPLSSYISINSDTGVLYALQSFDYEQIRDLQLLVTASDSGDPPLSSNMSLSLFVLDQNDNAPEILYPALPTDGSTGVELAPRSAERGYLVTKVVAVDRDSGQNAWLSYRLLKASEPGLFSVGLHTGEVRTARALLDRDALKQSLVVAVQDHGQPPLSATVTLTVAVADSIPEVLTELGSLKPSVDPNDSSLTLYLVVAVAAISCVFLAFVAVLLGLRLRRWHKSRLLQDSGGRLVGVPASHFVGVEEVQAFLQTYSQEVSLTADSRKSHLIFPQPNYADMLISQEGCEKNDSLLTSVDFHEYKNEADHGQQAPPNTDWRFSQAQRPGTSGSQNGDDTGTWPNNQFDTEMLQAMILASASEAADGSSTLGGGAGTMGLSARYGPQFTLQHVPDYRQNVYIPGSNATLTNAAGKRDGKAPAGGNGNKKKSGKKEKK

SEQ ID NO: 1772 - DNA, 4317 bp, Homo sapiens
agaatgggctctaggcgccgctgctcaccaatcagggaatgggaagctgcgcgccattgagtccctccctcccccgcctctaccacacaaagcggaatgagatggatactcacagatcctgacactggagacttagaagtattttccttcgctttctgatatattttggatgtagtcggcctaggacttcatagatacataagccgattcacaaccaaccagctcgagaaaccgcggaatatcggcttagagcctgccatggcgaatcggctacagcgcggggaccgcagtcggctgctgctgctgctgtgcattttcctggggacgctgcgggggttccgggccaggcagatccgatattcggtgccagaagagaccgaaaagggctccttcgtgggcaatatctccaaggacctggggctggagccccgggagctggcgaagcgcggagtccgcatcgtctccagagggaagacacagcttttcgctgtgaatccgcgaagcggcagcttgatcacggcaggcaggatagaccgggaggagctctgtgagacggtgtcctcctgttttttaaatatggaacttctcgtggaagacaccttgaagatttacggagtggaggtggaaataatagatattaatgataacgcccccagcttccaggaggacgaagtggagataaaagtcagtgagcacgcaattcctggggcgcgatttgctcttcctaatgctagggatccagatgtgggcgtgaactccctccagagctaccagctcagccctaataattacttttccttgcaactgcggggcagaacggatggggccaagaatccagagctagtactggagggaagcctggaccgagagaaagaggctgctcacctgctcctcctcacagctttagatggaggcgatcccatccgaaagggcgcagttcccattcgtgtggtggtcctcgatgtaaatgatcacatcccaatgtttacacagtccgtatatcgcgtgagtgttccagaaaacatcagctccggaactcgggtgctgatggttaatgcaacggatccagacgagggaatcaacggggaagtaatgtattcatttcggaacatggaaagcaaggcttctgaaatattccaattggattcacaaactggagaagttcaagtacgggggtctctggattttgaaaaatatagattctatgagatggaaattcaaggccaagatggtggaggtctctttaccaccacgacgatgttgatcactgttgtggatgtgaatgataacgctccagaaataactatcacctcttctattaattcaattctggaaaactctcctccaggtacagtgattgctcttctaaatgtgcaagatcaagattctggagaaaatggtcaagtctcctgttttattcctaaccacctgccttttaaattagaaaagacttatggaaattattacaaattgataacaagcagagtgctggacagggagttggtccagagctacaatataacgttgacagccacagaccagggaagcccgcctttgtctgcagaaactcatgtctggctgaatgtggcagatgacaacgataaccctcccgtttttcctcactcctcttactctgcctacattcccgaaaacaaccccaggggtgcctccatcttctcagtgaccgccctcgacccggacagcaaacagaatgccctggtcacttactctctgacggatgacactgtccagggggtgcctctgtcctcctatgtctctattaactccaacactggtgttctctatgccctacaatccttcgactatgagcagtttcgagacttagaactgagagtgatagcacgtgacagcggggacccgcccctcagcagcaacgtgtcgctgagcctgttcgtgctggaccagaacgacaatgcgcccgagatcctgtaccctgccctccccacagacggctccactggcgtggagctggcgccccgctctgcggaacctggctacctggtgaccaaggtggttgcggtggacaaagattcaggccagaacgcctggctgtcctatcgcctgcttaaggccagcgagccgggactcttcgcggtgggggagcacacgggcgagcaagccccgcccaacacggactggcgtttctctcaggcccagagacccggcaccagcggctcccaaaatggcgatgacaccggcacctggcccaacaaccagtttgacacagagatgctgcaagccatgatcttggcgtccgccagtgaagctgctgatgggagctccaccctgggagggggtgccggcaccatgggattgagcgcccgctacggaccccagttcaccctgcagcacgtgcccgactaccgccagaatgtctacatcccaggcagcaatgccacactgaccaacgcagctggcaagcgggatggcaaggccccagcaggtggcaatggcaacaagaagaagtcgggcaagaaggagaagaagtaacatggaggccaggccaagagccacagggcggcctctccccaaccagcccagcttctccttacctgcacccaggcctcagagtttcagggctaacccccagaatactggtaggggccaaggccatgctccccttgggaaacagaaacaagtgcccagtcagcacctaccccttcccccccagggggttgaatatgcaaaagcagttccgctgggaacccccatccaatcaactgctgtacccatgggggtagtggggttactgtagacaccaagaaccatttgccacaccccgtttagttacagctgaactcctccatcttccaaatcaatcaggcccatccatcccatgcctccctcctccccaccccactccaacagttcctctttcccgagtaaggtggttggggtgttgaagtaccaagtaacctacaagcctcctagttctgaaaagttggaagggcatcatgacctcttggcctctcctttgattctcaatcttcccccaaagcatggtttggtgccagccccttcacctccttccagagcccaagatcaatgctcaagttttggaggacatgatcaccatccccatggtactgatgcttgctggatttagggagggcattttgctaccaagcctcttcccaacgccctggggaccagtcttctgttttgtttttcattgtttgacgtttccactgcatgccttgacttcccccacctcctcctcaaacaagagactccactgcatgttccaagacagtatggggtggtaagataaggaagggaagtgtgtggatgtggatggtgggggcatggacaaagcttgacacatcaagttatcaaggccttggaggaggctctgtatgtcctcaggggactgacaacatcctccagattccagccataaaccaataactaggctggacccttcccactacataatagggctcagcccaggcagccagctttgggctgagctaacaggaccaatggattaaactggcatttcagtccaaggaagctcgaagcaggtttaggaccaggtccccttgagaggtcagaggggcctctgtgggtgctgggtactccagaggtgccactggtggaagggtcagcggagccccagcaggaagggtgggccagccaggccattcttagtccctgggttggggaggcagggagctagggcagggaccaaatgaacagaaagtctcagcccaggatggggcttcttcaacagggcccctgccctcctgaagcctcagtccttcaccttgccaggtgccgtttctcttccgtgaaggccactgcccaggtccccagtgcgccccctagtggccatagcctggttaaagttccccagtgcctccttgtgcatagaccttcttctcccacccccttctgcccctgggtccccggccatccagcggggctgccagagaaccccagacctgcccttacagtagtgtagcgccccctccctctttcggctggtgtagaatagccagtagtgtagtgcggtgtgcttttacgtgatggcgggtgggcagcgggcggcgggctccgcgcagccgtctgtccttgatctgcccgcggcggcccgtgttgtgttttgtgctgtgtccacgcgctaaggcgaccccctcccccgtactgacttctcctataagcgcttctcttcgcatagtcacgtagctcccaccccaccctcttcctgtgtctcacgcaagttttatactctaatatttatatggctttttttcttcgacaaaaaaataataaaacgtttcttctgaaaagctg

SEQ ID NO: 1773 - protein, 750 aa, Homo sapiens
MANRLQRGDRSRLLLLLCIFLGTLRGFRARQIRYSVPEETEKGSFVGNISKDLGLEPRELAKRGVRIVSRGKTQLFAVNPRSGSLITAGRIDREELCETVSSCFLNMELLVEDTLKIYGVEVEIIDINDNAPSFQEDEVEIKVSEHAIPGARFALPNARDPDVGVNSLQSYQLSPNNYFSLQLRGRTDGAKNPELVLEGSLDREKEAAHLLLLTALDGGDPIRKGAVPIRVVVLDVNDHIPMFTQSVYRVSVPENISSGTRVLMVNATDPDEGINGEVMYSFRNMESKASEIFQLDSQTGEVQVRGSLDFEKYRFYEMEIQGQDGGGLFTTTTMLITVVDVNDNAPEITITSSINSILENSPPGTVIALLNVQDQDSGENGQVSCFIPNHLPFKLEKTYGNYYKLITSRVLDRELVQSYNITLTATDQGSPPLSAETHVWLNVADDNDNPPVFPHSSYSAYIPENNPRGASIFSVTALDPDSKQNALVTYSLTDDTVQGVPLSSYVSINSNTGVLYALQSFDYEQFRDLELRVIARDSGDPPLSSNVSLSLFVLDQNDNAPEILYPALPTDGSTGVELAPRSAEPGYLVTKVVAVDKDSGQNAWLSYRLLKASEPGLFAVGEHTGEQAPPNTDWRFSQAQRPGTSGSQNGDDTGTWPNNQFDTEMLQAMILASASEAADGSSTLGGGAGTMGLSARYGPQFTLQHVPDYRQNVYIPGSNATLTNAAGKRDGKAPAGGNGNKKKSGKKEKK

SEQ ID NO: 1774 - DNA, 2326 bp, Homo sapiens
cagaaagccatgtcggactcggcgcccagcgcccaagcgctaacccgctgaaagtttctcagcgaaatctcagggacgatctggaccccgctgagaggaactgcttttgagtgagatggtcccagaggcctggaggagcggactgcaagccccgcccaacacggactggcgtttctctcaggcccagagacccggcaccagcggctcccaaaatggcgatgacaccggcacctggcccaacaaccagtttgacacagagatgctgcaagccatgatcttggcgtccgccagtgaagctgctgatgggagctccaccctgggagggggtgccggcaccatgggattgagcgcccgctacggaccccagttcaccctgcagcacgtgcccgactaccgccagaatgtctacatcccaggcagcaatgccacactgaccaacgcagctggcaagcgggatggcaaggccccagcaggtggcaatggcaacaagaagaagtcgggcaagaaggagaagaagtaacatggaggccaggccaagagccacagggcggcctctccccaaccagcccagcttctccttacctgcacccaggcctcagagtttcagggctaacccccagaatactggtaggggccaaggccatgctccccttgggaaacagaaacaagtgcccagtcagcacctaccccttcccccccagggggttgaatatgcaaaagcagttccgctgggaacccccatccaatcaactgctgtacccatgggggtagtggggttactgtagacaccaagaaccatttgccacaccccgtttagttacagctgaactcctccatcttccaaatcaatcaggcccatccatcccatgcctccctcctccccaccccactccaacagttcctctttcccgagtaaggtggttggggtgttgaagtaccaagtaacctacaagcctcctagttctgaaaagttggaagggcatcatgacctcttggcctctcctttgattctcaatcttcccccaaagcatggtttggtgccagccccttcacctccttccagagcccaagatcaatgctcaagttttggaggacatgatcaccatccccatggtactgatgcttgctggatttagggagggcattttgctaccaagcctcttcccaacgccctggggaccagtcttctgttttgtttttcattgtttgacgtttccactgcatgccttgacttcccccacctcctcctcaaacaagagactccactgcatgttccaagacagtatggggtggtaagataaggaagggaagtgtgtggatgtggatggtgggggcatggacaaagcttgacacatcaagttatcaaggccttggaggaggctctgtatgtcctcaggggactgacaacatcctccagattccagccataaaccaataactaggctggacccttcccactacataatagggctcagcccaggcagccagctttgggctgagctaacaggaccaatggattaaactggcatttcagtccaaggaagctcgaagcaggtttaggaccaggtccccttgagaggtcagaggggcctctgtgggtgctgggtactccagaggtgccactggtggaagggtcagcggagccccagcaggaagggtgggccagccaggccattcttagtccctgggttggggaggcagggagctagggcagggaccaaatgaacagaaagtctcagcccaggatggggcttcttcaacagggcccctgccctcctgaagcctcagtccttcaccttgccaggtgccgtttctcttccgtgaaggccactgcccaggtccccagtgcgccccctagtggccatagcctggttaaagttccccagtgcctccttgtgcatagaccttcttctcccacccccttctgcccctgggtccccggccatccagcggggctgccagagaaccccagacctgcccttacagtagtgtagcgccccctccctctttcggctggtgtagaatagccagtagtgtagtgcggtgtgcttttacgtgatggcgggtgggcagcgggcggcgggctccgcgcagccgtctgtccttgatctgcccgcggcggcccgtgttgtgttttgtgctgtgtccacgcgctaaggcgaccccctcccccgtactgacttctcctataagcgcttctcttcgcatagtcacgtagctcccaccccaccctcttcctgtgtctcacgcaagttttatactctaatatttatatggctttttttcttcgacaaaaaaataataaaacgtttcttctgaaaagctg

SEQ ID NO: 1775 - protein, 134 aa, Homo sapiens
MVPEAWRSGLQAPPNTDWRFSQAQRPGTSGSQNGDDTGTWPNNQFDTEMLQAMILASASEAADGSSTLGGGAGTMGLSARYGPQFTLQHVPDYRQNVYIPGSNATLTNAAGKRDGKAPAGGNGNKKKSGKKEKK

SEQ ID NO: 1776 - DNA, 2794 bp, Homo sapiens
cagaaagccatgtcggactcggcgcccagcgcccaagcgctaacccgctgaaagtttctcagcgaaatctcagggacgatctggaccccgctgagaggaactgcttttgagtgagatggtcccagaggcctggaggagcggactggtaagcaccgggagggtagtgggagttttgcttctgcttggtgccttgaacaaggcttccacggtcattcactatgagatcccggaggaaagagagaagggtttcgctgtgggcaacgtggtcgcgaaccttggtttggatctcggtagcctctcagcccgcaggttccgggtggtgtctggagctagccgaagattctttgaggtgaaccgggagaccggagagatgtttgtgaacgaccgtctggatcgagaggagctgtgtgggacactgccctcttgcactgtaactctggagttggtagtggagaacccgctggagctgttcagcgtggaagtggtgatccaggacatcaacgacaacaatcctgctttccctacccaggaaatgaaattggagattagcgaggccgtggctccggggacgcgctttccgctcgagagcgcgcacgatcccgatgtgggaagcaactctttacaaacctatgagctgagccgaaatgaatactttgcgcttcgcgtgcagacgcgggaggacagcaccaagtacgcggagctggtgttggagcgcgccctggaccgagaacgggagcctagtctccagttagtgctgacggcgttggacggagggaccccagctctctccgccagcctgcctattcacatcaaggtgctggacgcgaatgacaatgcgcctgtcttcaaccagtccttgtaccgggcgcgcgtcctggaggatgcaccctccggcacgcgcgtggtacaagtccttgcaacggatctggatgaaggccccaacggtgaaattatttactccttcggcagccacaaccgcgccggcgtgcggcaactattcgccttagaccttgtaaccgggatgctgacaatcaagggtcggctggacttcgaggacaccaaactccatgagatttacatccaggccaaagacaagggcgccaatcccgaaggagcacattgcaaagtgttggtggaggttgtggatgtgaatgacaacgccccggagatcacagtcacctccgtgtacagcccagtacccgaggatgcccctctggggactgtcatcgctttgctcagtgtgactgacctggatgctggcgagaacgggctggtgacctgcgaagttccaccgggtctccctttcagccttacttcttccctcaagaattacttcactttgaaaaccagtgcagacctggatcgggagactgtgccagaatacaacctcagcatcaccgcccgagacgccggaaccccttccctctcagcccttacaatagtgcgtgttcaagtgtccgacatcaatgacaaccctccacaatcttctcaatcttcctacgacgtttacattgaagaaaacaacctccccggggctccaatactaaacctaagtgtctgggaccccgacgccccgcagaatgctcggctttctttctttctcttggagcaaggagctgaaaccgggctagtgggtcgctatttcacaataaatcgtgacaatggcatagtgtcatccttagtgcccctagactatgaggatcggcgggaatttgaattaacagctcatatcagcgatgggggcaccccggtcctagccaccaacatcagcgtgaacatatttgtcactgatcgcaatgacaatgccccccaggtcctatatcctcggccaggtgggagctcggtggagatgctgcctcgaggtacctcagctggccacctagtgtcacgggtggtaggctgggacgcggatgcagggcacaatgcctggctctcctacagtctcttgggatcccctaaccagagcctttttgccatagggctgcacactggtcaaatcagtactgcccgtccagtccaagacacagattcacccaggcagactctcacggtcttgatcaaagacaatggggagccttcgctctccaccactgctaccctcactgtgtcagtaaccgaggactctcctgaagcccgagccgagttcccctctggctctgccccccgggagcagaaaaaaaatctcaccttttatctacttctttctctaatcctggtttctgtggggtttgtggtcacagtgttcggagtaatcatattcaaagtttacaagtggaagcagtctagagacctataccgagccccggtgagctcactgtaccgaacaccagggccctccttgcacgcggacgccgtgcggggaggcctgatgtcgccgcacctttaccatcaggtgtatctcaccacggactcccgccgcagcgacccgctgctgaagaaacctggtgcagccagtccactggccagccgccagaacacgctgcggagctgtgatccggtgttctataggcaggtgttgggtgcagagagcgcccctcccggacaggtaaggtttagcaagtcatgcttgaccctgttagtgcttttttattcctacatcatattgaggaaggaatggagctgtttttttagtgatgaagatgttttcctggtgatgcattcacactttcaactggcccttcctagatcaaagttagtgcctttgtgagatggtggcctgccagagtgtggtttgtggtcccatttcagggggaagatacttgactcatctgtggacctaattcacatcctcagc

SEQ ID NO: 1777 - protein, 863 aa, Homo sapiens
MVPEAWRSGLVSTGRVVGVLLLLGALNKASTVIHYEIPEEREKGFAVGNVVANLGLDLGSLSARRFRVVSGASRRFFEVNRETGEMFVNDRLDREELCGTLPSCTVTLELVVENPLELFSVEVVIQDINDNNPAFPTQEMKLEISEAVAPGTRFPLESAHDPDVGSNSLQTYELSRNEYFALRVQTREDSTKYAELVLERALDREREPSLQLVLTALDGGTPALSASLPIHIKVLDANDNAPVFNQSLYRARVLEDAPSGTRVVQVLATDLDEGPNGEIIYSFGSHNRAGVRQLFALDLVTGMLTIKGRLDFEDTKLHEIYIQAKDKGANPEGAHCKVLVEVVDVNDNAPEITVTSVYSPVPEDAPLGTVIALLSVTDLDAGENGLVTCEVPPGLPFSLTSSLKNYFTLKTSADLDRETVPEYNLSITARDAGTPSLSALTIVRVQVSDINDNPPQSSQSSYDVYIEENNLPGAPILNLSVWDPDAPQNARLSFFLLEQGAETGLVGRYFTINRDNGIVSSLVPLDYEDRREFELTAHISDGGTPVLATNISVNIFVTDRNDNAPQVLYPRPGGSSVEMLPRGTSAGHLVSRVVGWDADAGHNAWLSYSLLGSPNQSLFAIGLHTGQISTARPVQDTDSPRQTLTVLIKDNGEPSLSTTATLTVSVTEDSPEARAEFPSGSAPREQKKNLTFYLLLSLILVSVGFVVTVFGVIIFKVYKWKQSRDLYRAPVSSLYRTPGPSLHADAVRGGLMSPHLYHQVYLTTDSRRSDPLLKKPGAASPLASRQNTLRSCDPVFYRQVLGAESAPPGQVRFSKSCLTLLVLFYSYIILRKEWSCFFSDEDVFLVMHSHFQLALPRSKLVPL

SEQ ID NO: 1778 - DNA, 856 bp, Homo sapiens
cctcagtttccttgtttgtaaaatagttgaactaaatcttgaccctttaatgcttgttttgaaatccaaggcaaaaaacaattgcaagcgcccttacttccgtgttgcttcatactcctcttgcgcctgcgctgtctccttggagcagaggcggggccaacaagcctgttttagaaaccctccagtccttagctcgtttagaacacaagactccaagcttattggagggctatcttgccttacggctccaagccgctttttacggcgtttttcagctcgccattcacttcgctgtgaagatggcgtcgggcagcggggtaggtgttgtgtctgaggaggaggttttgcggggtggggaatggtttttcagacctgaatagagacaaactcctgcacccgactggcttcccgatatctcctcgagatcccagggttcaggttcaagaactccccagtaataggccttggcagagggtcagtagaatcgcggaggtttctcgggttggggtcttgaggctacctcagtcttctcgtacagtccaaagaggcttcgctttcaaaacgtcctgtagacacctggaccgcgagggcgcggttccctgcttctctaggggcccagacacggcgacggatcttgacgctttttcctccccacagacaaaaaacttggactttcgccgaaagtgggacaaagatgaatatgagaaactcgccgagaagaggctcacggaagagagagaaaagaaagatggaaaaccagtgcagcctgtcaagcgagagcttttacggcatagggactacaaggtggacttggaatccaagcttgggaagacaattgtcattaccaagacaaccc

SEQ ID NO: 1779 - DNA, 1981 bp, Homo sapiens
tcgatagccggaagtcatccttgctgaggctggggcaaccaccgcaggtcgagacagcaggcggctcaagtggacagccgggatggcagagcgtgcggcgctggaggagctggtgaaacttcagggagagcgcgtgcgaggcctcaagcagcagaaggccagcgccgagctgatcgaggaggaggtggcgaaactcctgaaactgaaggcacagctgggtcctgatgaaagcaaacagaaatttgtgctcaaaacccccaagggcacaagagactatagtccccggcagatggcagttcgcgagaaggtgtttgacgtaatcatccgttgcttcaagcgccacggtgcagaagtcattgatacacctgtatttgaactaaaggaaacactgatgggaaagtatggggaagactccaagcttatctatgacctgaaggaccagggcggggagctcctgtcccttcgctatgacctcactgttccttttgctcggtatttggcaatgaataaactgaccaacattaaacgctaccacatagcaaaggtatatcggcgggataacccagccatgacccgtggccgataccgggaattctaccagtgtgattttgacattgctgggaactttgatcccatgatccctgatgcagagtgcctgaagatcatgtgcgagatcctgagttcacttcagataggcgacttcctggtcaaggtaaacgatcgacgcattctagatgggatgtttgctatctgtggtgtttctgacagcaagttccgtaccatctgctcctcagtagacaagctggacaaggtgtcctgggaagaggtgaagaatgagatggtgggagagaagggccttgcacctgaggtggctgaccgcattggggactatgtccagcaacatggtggggtatccctggtggaacagctgctccaggatcctaaactatcccaaaacaagcaggccttggagggcctgggagacctgaagttgctctttgagtacctgaccctatttggcattgatgacaaaatctcctttgacctgagccttgctcgagggctggattactacactggggtgatctatgaggcagtgctgctacagaccccagcccaggcaggggaagagcccctgggtgtgggcagtgtggctgctggaggacgctatgatgggctagtgggcatgttcgaccccaaagggcgcaaggtgccatgtgtggggctcagcattggggtggagcggattttctccatcgtggaacagagactagaggctttggaggagaagatacggaccacggagacacaggtgcttgtggcatctgcacagaagaagctgctagaggaaagactaaagcttgtctcagaactgtgggatgctgggatcaaggctgagctgctgtacaagaagaacccaaagctactgaaccagttacagtactgtgaggaggcaggcatcccactggtggctatcatcggcgagcaggaactcaaggatggggtcatcaagctccgttcagtgacgagcagggaagaggtggatgtccgaagagaagaccttgtggaggaaatcaaaaggagaacaggccagcccctctgcatctgctgaactgaacaaactatcagaggaaaggaagtgggactggcactatttgaggttaagacaaactgcatatgtacttcaattgctttgcacttttccgtttcagcggaagacctgaagagtggtcagaacagagcctttgatttttattatggttattttattgattattactggcaaaaacggccaggtacaacacctttttcatacaaggcccaggaggcttagtccagtctgtgctcctgggctacaaggacccagcctgagatggtcccatctgcagggccccgcaccagttggagcagatgcctccccaccaccaattgccaaaggtccaataaaatgcctcaaccacggaaaaaaaaaaaaaaaaaa

SEQ ID NO: 1780 - protein, 509 aa, Homo sapiens
MAERAALEELVKLQGERVRGLKQQKASAELIEEEVAKLLKLKAQLGPDESKQKFVLKTPKGTRDYSPRQMAVREKVFDVIIRCFKRHGAEVIDTPVFELKETLMGKYGEDSKLIYDLKDQGGELLSLRYDLTVPFARYLAMNKLTNIKRYHIAKVYRRDNPAMTRGRYREFYQCDFDIAGNFDPMIPDAECLKIMCEILSSLQIGDFLVKVNDRRILDGMFAICGVSDSKFRTICSSVDKLDKVSWEEVKNEMVGEKGLAPEVADRIGDYVQQHGGVSLVEQLLQDPKLSQNKQALEGLGDLKLLFEYLTLFGIDDKISFDLSLARGLDYYTGVIYEAVLLQTPAQAGEEPLGVGSVAAGGRYDGLVGMFDPKGRKVPCVGLSIGVERIFSIVEQRLEALEEKIRTTETQVLVASAQKKLLEERLKLVSELWDAGIKAELLYKKNPKLLNQLQYCEEAGIPLVAIIGEQELKDGVIKLRSVTSREEVDVRREDLVEEIKRRTGQPLCIC

SEQ ID NO: 1781 - DNA, 1784 bp, Homo sapiens
acgcaaagcagtgtgggttgattctgaggtgcactgtgggaaagagcttgtcgctgcggtgttgctgttggagactcgattgttggtgacagcgaaagaacgataacaaaatgccggagcgagatagtgagccgttctccaaccctttggcccccgatggccacgatgtggatgatcctcactccttccaccaatcaaaactcaccaatgaagacttcaggaaacttctcatgacccccagggctgcacctacctctgcaccaccttctaagtcacgtcaccatgagatgccaagggagtacaatgaggatgaagacccagctgcacgaaggaggaaaaagaaaagttattatgccaagctacgccaacaagaaattgagagagagagagagctagcagagaagtaccgggatcgtgccaaggaacggagagatggagtgaacaaagattatgaagaaaccgagcttatcagcaccacagctaactatagggctgttggccccactgctgaggcggacaaatcagctgcagagaagagaagacagttgatccaggagtccaaattcttgggtggtgacatggaacacacccatttggtgaaaggcttggattttgctctgcttcaaaaggtacgagctgagattgccagcaaagagaaagaggaagaggaactgatggaaaagccccagaaagaaaccaagaaagatgaggatcctgaaaataaaattgaatttaaaacacgtctgggccgcaatgtttaccgaatgctttttaagagcaaagcatatgagcggaatgagttgttcctgccgggccgcatggcctatgtggtagacctggatgatgagtatgctgacacagatatccccaccactcttatccgcagcaaggctgattgccccaccatggaggcccagaccacactgaccacaaatgacattgtcattagcaagctgacccagatcctttcatacctgaggcagggaacccgtaacaagaagcttaagaagaaggataaagggaagctggaagagaagaaacctcctgaggctgacatgaatatttttgaagacattggggattacgtaccctccacaaccaagacacctcgggacaaggagcgggagagatatcgggaacgggagcgtgatcgggaaagagacagagaccgtgaccgagagcgagagcgagaacgagatcgggaacgagagcgagagcgggaccgagagagagaagaggaaaagaagagacacagctactttgagaagccaaaagtagatgatgagcccatggacgttgacaaaggacctgggtctaccaaggagttgatcaagtccatcaatgaaaagtttgctgggtctgctggctgggaaggcacagaatcgctgaagaagccagaagacaaaaagcagctgggagatttctttggcatgtccaacagttatgcagagtgctacccagccacgatggatgacatggctgtggatagtgatgaggaggtggattatagcaaaatggaccagggtaacaagaaggggcccttaggccgttgggactttgatacccaggaagaatacagcgagtatatgaacaacaaagaagctttgcccaaggctgcattccagtatggtatcaaaatgtctgaagggcggaaaaccaggcgcttcaaggaaaccaatgacaaagcagagcttgatcgccagtggaagaagattagtgcaatcattgagaagaggaagaagatggaagctgatggggttgaagtcaaaagaccaaaatactaa

SEQ ID NO: 1782 - protein, 557 aa, Homo sapiens
MPERDSEPFSNPLAPDGHDVDDPHSFHQSKLTNEDFRKLLMTPRAAPTSAPPSKSRHHEMPREYNEDEDPAARRRKKKSYYAKLRQQEIERERELAEKYRDRAKERRDGVNKDYEETELISTTANYRAVGPTAEADKSAAEKRRQLIQESKFLGGDMEHTHLVKGLDFALLQKVRAEIASKEKEEEELMEKPQKETKKDEDPENKIEFKTRLGRNVYRMLFKSKAYERNELFLPGRMAYVVDLDDEYADTDIPTTLIRSKADCPTMEAQTTLTTNDIVISKLTQILSYLRQGTRNKKLKKKDKGKLEEKKPPEADMNIFEDIGDYVPSTTKTPRDKERERYRERERDRERDRDRDRERERERDRERERERDREREEEKKRHSYFEKPKVDDEPMDVDKGPGSTKELIKSINEKFAGSAGWEGTESLKKPEDKKQLGDFFGMSNSYAECYPATMDDMAVDSDEEVDYSKMDQGNKKGPLGRWDFDTQEEYSEYMNNKEALPKAAFQYGIKMSEGRKTRRFKETNDKAELDRQWKKISAIIEKRKKMEADGVEVKRPKY

SEQ ID NO: 1783 - DNA, 2657 bp, Homo sapiens
gtgaccccaggccctggtcactccatgctttggagggtgcttttgtcaaagaggcctcctttccctcacccagagctggatttccaagaggctcccatacctagctgccctggcagactcccagggaggaaaaacagcgtggccttggcagctgccccgaggaaggagcccacaggtgacagggagaagccattgccattccctgtcctggcccccttcagcaaccctgaacactctgctccagccaaggtggtgagggcagctgttcctaaacagcgcaaaggcagcaaggttggtgactttggagatgcaatcaattggcccacacctggagagatagcccacaagagtgttcagccacagtcccacaagcctcagcctacccgtaaactgccacccaagaaggacatgaaggaacaggagaaaggagaagggagtgatagtaaggagagtccaaaaaccaaatcagatgaatcaggggaggaaaagaatggagatgaggattgccagcgaggcgggcagaagaagaaaggaaacaaacacaagtgggttccattacaaatagacatgaagcctgaagtgcccagagagaaactggcttcacgccccactcgcccaccggagcctagacacatacctgccaatcgcggagagatcaaagggtctgagtctgccacctacgtgcccgtggccccccccaccccagcctggcaaccagagatcaaaccggagcctgcctggcacgaccaggatgagacatcgagtgtgaagagtgatggggctggtggggcgcgggcttccttccgtggccgtggacgggggcgtggtcgcggccggggacgcggccggggtggcactcgaacccattttgactaccagtttggctaccgaaagtttgatggtgtggaggggcctcgtacgcccaagtacatgaacaacatcacctactactttgacaatgtcagcagcaccgagctttacagtgtggatcaggaactgctcaaagactacatcaagcgccagattgaatactacttcagcgtggacaatttagagcgagacttcttcctgcgaaggaaaatggatgctgatggtttcctacccatcacccttattgcttccttccaccgagtgcaggcccttaccactgacatttcactcatctttgcggccctaaaggacagcaaggtggtggagatcgttgatgagaaagttcgtaggagggaggaaccagaaaagtggcctcttcccccaatagtggattattcacagactgatttctcccagcttctcaactgccctgaatttgttccccgtcagcactaccaaaaggagacagagtcggcacctggctctcctcgtgcagtcaccccagtgccaaccaaaacagaggaggtcagcaacctaaagacactacccaagggcctgtctgccagcctgcctgacctggattctgagaactggattgaagtgaagaagaggcctcggccatccccagcacggcccaagaagtcagaggagtccagattttcccacctgacctctctgcctcagcagctgccttcccagcagctgatgtccaaggatcaggatgagcaagaggaactggattttctgtttgacgaggagatggagcagatggatgggcggaagaacaccttcactgcctggtctgatgaggaatctgactatgagattgatgacagggatgtcaacaagatcctcattgtcacccagacaccacattacatgcgccggcacccagggggggaccgcacaggcaaccacacctcgcgtgccaagatgagcgccgaactggccaaggtcattaatgatggcctcttctactatgagcaggacctgtgggctgaaaagtttgaacctgagtattcccagatcaagcaagaagtcgagaacttcaaaaaggtcaatatgatcagccgggagcagtttgacacactgacccctgagccccctgtggatcccaaccaggaagttcctcctgggccacctcggttccagcaagttcctacggatgccctggccaacaagttgtttggtgctcctgagccctccaccatcgcccgctctctaccaaccactgtcccagagtcaccaaactaccgcaacaccaggacccctcgcactccccggacaccacagctcaaagactcaagccagacatcacggttttacccagtggtgaaagaaggacggacactggatgccaagatgcctcgaaaaagaaagacaagacacagttcaaacccacccttggagagccatgtgggctgggtgatggattcccgtgagcacaggccccgtactgcttccatcagtaagatggccccagtgtgtgtttcctgtttcccaaagcaagctttgagagccacctacctatgaccaatgctctctactccctgcagagatggcacagactgcaaataggcatgcttttgaagaaaatatacaattgatctttgaacaacgaagggcgtggggtgcccagctgcacacagttgaaaatccgtgtataacttttgactctccaaaagcctactgttaaccagaagccttaccaataacatatagtcaattagcacatgttttgcatattatatgtattacatactgtattcttacaataagctaaataa

SEQ ID NO: 1784 - protein, 891 aa, Homo sapiens
MKEQEKGEGSDSKESPKTKSDESGEEKNGDEDCQRGGQKKKGNKHKWVPLQIDMKPEVPREKLASRPTRPPEPRHIPANRGEIKGSESATYVPVAPPTPAWQPEIKPEPAWHDQDETSSVKSDGAGGARASFRGRGRGRGRGRGRGRGGTRTHFDYQFGYRKFDGVEGPRTPKYMNNITYYFDNVSSTELYSVDQELLKDYIKRQIEYYFSVDNLERDFFLRRKMDADGFLPITLIASFHRVQALTTDISLIFAALKDSKVVEIVDEKVRRREEPEKWPLPPIVDYSQTDFSQLLNCPEFVPRQHYQKETESAPGSPRAVTPVPTKTEEVSNLKTLPKGLSASLPDLDSENWIEVKKRPRPSPARPKKSEESRFSHLTSLPQQLPSQQLMSKDQDEQEELDFLFDEEMEQMDGRKNTFTAWSDEESDYEIDDRDVNKILIVTQTPHYMRRHPGGDRTGNHTSRAKMSAELAKVINDGLFYYEQDLWAEKFEPEYSQIKQEVENFKKVNMISREQFDTLTPEPPVDPNQEVPPGPPRFQQVPTDALANKLFGAPEPSTIARSLPTTVPESPNYRNTRTPRTPRTPQLKDSSQTSRFYPVVKEGRTLDAKMPRKRKTRHSSNPPLESHVGWVMDSREHRPRTASISSSPSEGTPTVGSYGCTPQSLPKFQHPSHELLKENGFTQHVYHKYRRRCLNERKRLGIGQSQEMNTLFRFWSFFLRDHFNKKMYEEFKQLALEDAKEGYRYGLECLFRYYSYGLEKKFRLDIFKDFQEETVKDYEAGQLYGLEKFWAFLKYSKAKNLDIDPKLQEYLGKFRRLEDFRVDPPMGEEGNHKRHSVVAGGGGGEGRKRCPSQSSSRPAAMISQPPTPPTGQPVREDAKWTSQHSNTQTLGK

SEQ ID NO: 1785 - DNA, 2552 bp, Homo sapiens
ggcacgagggaagagctcccaccttctctggatgtgcctgggcttggactggctagaatctttctctggactgttgcatgtacagtgcctccatcctggaggcaagagagttgggagtggctcgaatcagagccgtgcccaagatatccctgctgttgcatcgtttgaagctgacgtcctgtgtctgtacactgctgccactgttgtgtcctcgctctgcttgctgttgcctcacgccaggccccgtcctgccgtgacacccttcatcctacccttggaaccccaaggccaagttggttcaaactgttggagaacagagttggcctgcatctggaacacacttgtcctcagcttaccatctcctcacaccccagagtggaaaggtgaacacctgcagctgaggcttggaaacgtttcttgtgttgccctgaaaaatctttgagacctcagggaggctctgtctctcttaaaaggtggagaaagatgccattctctccctaaggtctggtggagtctccccatcttgcatacccttctgcaagccatctatctctgctcactctccaattgacccgcctgggaacaagggatgaggaggagttgggggctggggggaatcctgccagttggtgaagccctgtggcaggaaggtatatgtggacatagagtatacctgattctctttcttcagccactgactgcttgggttgggctgtgaatgataatggaatggctggagtctgctgttgtcagaaggcagggagggtgatgaaggactgacccacatggactgggatgtgtgtcggttatgggcatgactgcacgttcactctcagtgggatctgggcaacatggagttcattgtcctgttgcttacttactgcaatgtctttggccctccttttcaactggttcctctgttgggcccaaaggttgggagtaggagacagtatcccaggctgacaagggcttgccctttaccttgggcaccttgttaatttttagcctgtgcccttccccacctttgccctcccagtggttggtatgtgggaagcccatctcagttcctgtgacttcatgtctcaaaccaaggatgagcgtctggtctctgctatgatggtggtatccgaggcctttccctgcccagtctggtgcctgccccacattgtaccggacactggattcctggacccccttctcctttcctttctttccttcaggtcacgcagccctgtactgtatccagcaccacagaaacctcagtgtttttcctctgctggtttggggcacaaggaagccttagggtatggggaaaggctgttattacctagagtttactcccaggccagggggctgccatcttcttcacagacatccctgaaaggaagcccctttggggcagggaggtgaggacttcatctcaacatcggctggtggttggtaggggagctttttcttttctttcctttttttttgtttttgtttttgtttttgtttttggtaacatgttaggagttaatgttgcaaagagtagtttacatcttcactttctgaagacacttgaatttaggaccgatgtatctgtgacaagcatgccagaagtggcaggggccatcagggctaaccacttcacacctaccatcgtcccatggggatccaagacctgagataaagcaacagcctgcccagatccctctgttcatcctatcccttccaaggttggtccatgccaacataacctctgggcatcagacatcagcaggtctgtgtgcctcagccctgttaaggggcaggtttctctttagccctcttcctgcacttgggagcaaaggcactaccagtagagaagggccatccagccgtgccccagcctggacccctggggctcagatagaggtgctgagcccctgtgtcaaagttgttaaatgtttttgttttgttccattgtagctctttttttttttttccctttcctggtgattgattttacaaaagaaagtaagctgcttagaaggccctggaagggaagtgaggaggagggacaaggaagatgactagttacggagggtgagggttgttttttgccaaaaagcctgggtagagtgatctgaattatctggcaccctcctgaatggaaccccagagtacctcctgtgtggaagggtccctggattttccctaacacccaccctctcccccttcagccatgctgatggcagagaagataagaacttggagcccatttctcactggagaggaaaacttgtcatctggctttgcggagaaggttccaccttacgctcgtagtacattatctttactatgtgctaggatatcatatttaaaaggacaaaaaaatgtaaaatacttgaatgagcttgtattataacattaatattattgagagtatctgctttccaggctgaagtgattcattcattattctagtcctgctttagtcctttgtaatttgtggtaattatgcttttctttttaatacaaaaaaatgtataaaaataaacacttgaaaaggcaaaaaaaaaaaaaaaaaa

SEQ ID NO: 1786 - protein, 53 aa, Homo sapiens
MLGVNVAKSSLHLHFLKTLEFRTDVSVTSMPEVAGAIRANHFTPTIVPWGSKT

SEQ ID NO: 1787 - DNA, 1750 bp, Homo sapiens
gcggtcttatataagccagatccgcaggggagtccgcagaagggttaaacaggtctttgggcttcggcgacctcgcccgcggcagaaaccggtaagaagacagtgggctgcgcgtctcattttcagccttgcccggactctcccaaagccggcgcccagtagtggctccagagcccacaggtggcccccggcagtctctggggcgcatggagcggcgttaatagggctggcggcgcaggccagtagccgctccaacatgaacctcgtgggcagctacgcacaccatcaccaccatcaccacccgcaccctgcgcaccccatgctccacgaacccttcctcttcggtccggcctcgcgctgtcatcaggaaaggccctacttccagagctggctgctgagcccggctgacgctgccccggacttccctgcgggcgggccgccgcccgcggccgctgcagccgccaccgcctatggtcctgacgccaggcctgggcagagccccgggcggctggaggcgcttggcggccgtcttggccggcggaaaggctcaggacccaagaaggagcggagacgcactgagagcattaacagcgcattcgcggagttgcgcgagtgcatccccaacgtgccggccgacaccaagctctccaagatcaagactctgcgcctagccaccagctacatcgcctacctgatggacgtgctggccaaggatgcacagtctggcgatcccgaggccttcaaggctgaactcaagaaggcggatggcggccgtgagagcaagcggaaaagggagctgcagcagcacgaaggttttcctcctgccctgggcccagtcgagaagaggattaaaggacgcaccggctggccgcagcaagtctgggcgctggagttaaaccagtgagccgaggcccgcgccgaggacctggccaggccagccactcctgaagccccgggaggagaggaaggcagcggcgaacgccaggctctgggctccggcgactggtgctacgcatcccgcggagcttctgctgagcgccggcaggtcgtcggctgcaaccacacacttggatcgcacgtgcaatgtcctttgattttttttaatacattaagagaaagagaaatatatatatatccacccccagcccaaccgagggcggcccttggcggcaacatgcaagaaggagggactgtcgaacccaagggctcaaagacgcactcttccacccttttggagcgaatttagaacctcagccctatctccatttccctatctggctctttctctcttgtccctccatatgatccgccccgacgccgtcttctctaattaaaatgcaataaggaatcaattcttttcttgcctgagaaagagaaccagacgcaggaagatgaaaggctgccctttgttcttcgaatcgtggtggttttattttatttttctttttgtcgctgcacttcctgtttagttccaagggaaacactttctctctttctctgtctctctcttttcttccttcttttccttcctttttgtttctatctaaataaaagctttccctgtgttggaaagtttttatgtatttaaactacctaccatgcctgttgtgctcaggtgtttgttcatcctgccatccccaacccttttctacctcaagtctgtgtgaccactcacagcccccctcccttcgccaaagcagtgtctatgctcttgattaataaaacattttctgaaatcaaaaaaaaaaaa

SEQ ID NO: 1788 - protein, 215 aa, Homo sapiens
MNLVGSYAHHHHHHHPHPAHPMLHEPFLFGPASRCHQERPYFQSWLLSPADAAPDFPAGGPPPAAAAAATAYGPDARPGQSPGRLEALGGRLGRRKGSGPKKERRRTESINSAFAELRECIPNVPADTKLSKIKTLRLATSYIAYLMDVLAKDAQSGDPEAFKAELKKADGGRESKRKRELQQHEGFPPALGPVEKRIKGRTGWPQQVWALELNQ

SEQ ID NO: 1789 - DNA, 321 bp, Homo sapiens
atgcactattctaaggaatataggcagatgtacagaactgaaattcgaatgacaaggatggcaagaaaagctggcaacttctatgtacctgcagaacccaaattggagtttgtcatcaggatcagaggtatcaatggtgatcagattcataagatctatactgttggaaaacgcttcaaagaagcaaataactttctgtggcccttcaaattaccttttccaccaggcagagtgaagaaaaagaccacttattttgtagaaggtggaaatgctggcaacagggaggaccagatcaacaggcttattagaagaatgaactaa

SEQ ID NO: 1790 - protein, 106 aa, Homo sapiens
MHYSKEYRQMYRTEIRMTRMARKAGNFYVPAEPKLEFVIRIRGINGDQIHKIYTVGKRFKEANNFLWPFKLPFPPGRVKKKTTYFVEGGNAGNREDQINRLIRRMN

SEQ ID NO: 1791 - DNA, 1578 bp, Homo sapiens
gatcagggccgagttgtctcggcggcgctgccgaggcctccacccaggacagtccccctccccgggcctctctcctcttgcctacgagtcccctctcctcgtaggcctctcggatctgatatcgtggggtgaggtgagcaggcccggggagggtggttaccgctgaggagctgcagtctctgtcaagatgatagaggtactgacaacaactgactctcagaaactgctacaccagctgaatgccctgttggaacaggagtctagatgtcagccaaaggtctgtggtttgagactaattgagtctgcacacgataatggcctcagaatgactgcaagactaagggactttgaagtaaaagatcttcttagtctaactcagttctttggctttgacacagagacattttctctagctgtgaatttactggacagattcctgtctaaaatgaaggtacagcccaagcaccttgggtgtgttggactgagctgcttttatttggctgtaaaatcaatagaagaggaaaggaatgtcccattggcaactgacttgatccgaataagtcaatataggtttacggtttcagacttgatgagaatggaaaagattgtattggagaaggtgtgttggaaagtcaaagctactactgcctttcaatttctgcaactgtattattcactccttcaagagaacttgccacttgaaaggagaaatagcattaattttgaaagactagaagctcaactgaaggcatgtcattgcaggatcatattttctaaagcaaagccttctgtgttggcattgtctatcattgcattagagatccaagcacagaagtgtgtagagttaacagaaggaatagaatgtcttcagaaacattccaagataaatggcagagatctgaccttctggcaagagcttgtatccaaatgtttaactgaatattcatcaaataagtgttccaaaccaaatgttcagaagttgaaatggattgtttctgggcgtactgcacggcaattgaagcatagctactacagaataactcaccttccaacaattcctgaaatggtcccttaactggattattacagcaccaaaaaacttctctgaagcctttctccacaaccttgttctatggattccataatgttacaatggatttaagctatgaagcctcaaaacatcacgagataagcatgatggtctcagacttgggaaaactgcctaatattatgctgtagtggaattatgtttatgatttgaattcatctgtgaaggcattcaaatcaaagctaaaagcctaaatgtgaaatgctaatgacaagcctgagaaggtaaactatgaatcttcatttctatcattgatctaactttagatattggatcaatatatttaggtggtattgaaaatgctattggaggagtcacactaatactatcaactatcagtcttcccacagcttcaatcactgtcattattctaatcctactcctacttaaattttaagttatgaggtttatgtcgaaagcaacatttcacaaatgtacttttaaggcataataagggttaacattctagg

SEQ ID NO: 1792 - protein, 295 aa, Homo sapiens
MIEVLTTTDSQKLLHQLNALLEQESRCQPKVCGLRLIESAHDNGLRMTARLRDFEVKDLLSLTQFFGFDTETFSLAVNLLDRFLSKMKVQPKHLGCVGLSCFYLAVKSIEEERNVPLATDLIRISQYRFTVSDLMRMEKIVLEKVCWKVKATTAFQFLQLYYSLLQENLPLERRNSINFERLEAQLKACHCRIIFSKAKPSVLALSIIALEIQAQKCVELTEGIECLQKHSKINGRDLTFWQELVSKCLTEYSSNKCSKPNVQKLKWIVSGRTARQLKHSYYRITHLPTIPEMVP

SEQ ID NO: 1793 - DNA, 4367 bp, Homo sapiens
gtagagttaaggaagggcctcttcctctgtgagaattcagcattttgcaaccatccaaaaatgttgagggcatgctttgcttccagggcagacagagcagcacagtgagcatgggacacaggatccctgacttgctgtgtgcccttaaaccagccactacctctctgacgttcaaaattgagcaatggaaggcagcctgcccaactgttacctgcctgtcatcatgaaagcctgcggatgagtgcagaatacagaaactgcagccatgaccacgcacgtcaccctggaagatgccctgtccaacgtggacctgcttgaagagcttcccctccccgaccagcagccatgcatcgagcctccaccttcctccatcatgtaccaggctaactttgacacaaactttgaggacaggaatgcatttgtcacgggcattgcaaggtacattgagcaggctacagtccactccagcatgaatgagatgctggaggaaggacatgagtatgcggtcatgctgtacacctggcgcagctgttcccgggccattcccaggtgaaatgcaacgagcagcccaaccgagtagagatctatgagaagacagtagaggtgctggagccggaggtcaccaagctcatgaagttcatgtattttcagcgcaaggccatcgagcggttctgcagcgaggtgaagcggctgtgccatgccgagcgcaggaaggactttgtctctgaggcctacctcctgacccttggcaagttcatcaacatgtttgctgtcctggatgagctaaagaacatgaagtgcagcgtcaagaatgaccactctgcctacaagagggcagcacagttcctgcggaagatggcagatccccagtctatccaggagtcgcagaacctttccatgttcctggccaaccacaacaggatcacccagtgtctccaccagcaacttgaagtgatcccaggctatgaggagctgctggctgacattgtcaacatctgtgtggattactacgagaacaagatgtacctgactcccagtgagaaacatatgctcctcaaggtgatgggctttggcctctacctaatggatggaaatgtcagtaacatttacaaactggatgccaagaagagaattaatcttagcaaaattgataaattctttaagcagctgcaggtggtgccccttttcggcgacatgcagatagagctggccagatacattaagaccagtgctcactatgaagagaacaagtccaagtggacgtgcacccagagcagcatcagcccccagtacaatatctgcgagcagatggttcagatccgggatgaccacatccgcttcatctccgagctcgctcgctacagcaacagtgaggtggtgacgggctcagggctggacagccagaagtcagacgaggagtatcgcgagctcttcgacctagccctgcggggtctgcagcttctatccaagtggagcgcccacgtcatggaggtgtactcttggaagctggttcatcccacagacaagttctgcaacaaggactgtcctggcaccgcggaggaatatgagagagccacacgctacaattacaccagtgaggaaaaatttgccttcgttgaggtgatcgccatgatcaaaggcctgcaggtgctcatgggcaggatggagagcgtcttcaaccaggccatcaggaacaccatctacgcggcattgcaggacttcgcccaggtgacgctgcgtgagcccctgcggcaggcggtacggaagaagaagaatgtcctcatcagcgtcctacaggcaattcgaaagaccatctgtgactgggagggagggcgagagccccctaatgacccatgcttgagaggggagaaggaccccaaaggtggatttgatatcaaggtgccccggcgtgctgtggggccatccagcacacagctgtacatggtgcggaccatgcttgaatcactcattgcagacaaaagcggctccaagaagaccctgaggagcagcctggatggacccattgtcctcgccatagaggactttcacaaacagtccttcttcttcacacatctgctcaacatcagtgaagccctgcagcagtgttgtgacctctcccagctctggttccgagaattcttcctggagttaaccatgggccgacgaatccagttccccatcgagatgtccatgccctggattctaacggaccatatcctggaaaccaaagaaccttccatgatggagtatgtcctctaccctctggatctgtacaacgacagcgcctactatgctctgaccaagtttaaaaagcagttcctgtacgatgagatagaagctgaggtgaacctgtgttttgatcagtttgtctacaagctggcagaccagatctttgcttactacaaagccatggctggcagtgtcctgttggataaacgttttcgagctgagtgtaagaattatggcgtcatcattccgtatccaccgtccaatcgctatgaaacactgctgaagcagagacacgtccagctgttgggtagatcaattgacttgaacagactcattacccagcgcatctctgccgccatgtataaatccttggaccaagctatcagccgctttgagagtgaggacctgacctccattgtggagctggagtggctgctggagattaaccggctcacgcatcggctgctctgtaagcatatgacgctggacagcttcgatgccatgttccgagaggccaatcacaatgtgtccgccccctatggccgtatcaccctgcatgtcttctgggaactgaactttgactttctccccaactactgctacaatgggtccactaaccgttttgtgcggactgccattcctttcacccaagaaccacaacgagacaaacctgccaacgtccagccttattacctctatggatccaagcctctcaacattgcctacagccacatctacagctcctacaggaatttcgtggggccacctcatttcaagactatctgcagactcctgggttatcagggcatcgctgtggtcatggaggaactgctaaagattgtgaagagcttgctccaaggaaccattctccagtatgtgaaaacactgatagaggtgatgcccaagatatgccgcttgccccgacatgagtatggctccccagggatcctggagttcttccaccaccagctgaaggacatcattgagtacgcagagctcaaaacagacgtgttccagagcctgagggaagtgggcaatgccatcctcttctgcctcctcatagagcaagctctgtctcaggaggaggtctgcgatttgctccatgccgcacccttccaaaacatcttgcctagagtctacatcaaagagggggagcgcctggaggtccggatgaaacgtctggaagccaagtatgccccgctccacctggtccctctgatcgagcggctggggacccctcagcaaatcgccattgctcgcgagggtgacctcctgaccaaggagcggctgtgctgtggcctgtccatgttcgaggtcatcctgacccgcattcggagctacctgcaggaccccatctggcggggcccaccgcccaccaatggcgtcatgcacgtcgatgagtgtgtggagttccaccggctgtggagcgccatgcagttcgtgtactgcatccctgtgggaaccaacgagttcacagctgagcagtgtttcggcgatggcttgaactgggctggttgctccatcattgtcctgctgggccagcagcgtcgctttgacctgttcgacttctgttaccacctgctaaaagtgcagaggcaggacgggaaggatgaaatcattaagaatgtgcccctgaagaagatggccgaccggatcaggaagtatcagatcttgaacaatgaggtttttgccatcctgaacaaatacatgaagtccgtggagacagacagttccactgtggagcatgtgcgctgcttccagccacccatccaccagtccttggccaccacttgctaagcagaagatcctgcagacccttatctggaggaggaagagaagcaggagagagaaagccacagccagcctgccataggatccaactggacaacgtgtgggatggacctggaaacaagcacctccccaaacacatcaccactccctagggcggggcctgtgcatgctctcccatgacatctccatgctggtttctccatagcataaatgaaaaaaaaaaaaaaaaagtaaacagggcagtgtgtgctttttcttttctcccccctcaactatattaagaactcctagtttcaccctttctccatcccatcatcccacctatctgtggttgcttcccaagacct

SEQ ID NO: 1794 - protein, 1131 aa, Homo sapiens
MKFMYFQRKAIERFCSEVKRLCHAERRKDFVSEAYLLTLGKFINMFAVLDELKNMKCSVKNDHSAYKRAAQFLRKMADPQSIQESQNLSMFLANHNRITQCLHQQLEVIPGYEELLADIVNICVDYYENKMYLTPSEKHMLLKVMGFGLYLMDGNVSNIYKLDAKKRINLSKIDKFFKQLQVVPLFGDMQIELARYIKTSAHYEENKSKWTCTQSSISPQYNICEQMVQIRDDHIRFISELARYSNSEVVTGSGLDSQKSDEEYRELFDLALRGLQLLSKWSAHVMEVYSWKLVHPTDKFCNKDCPGTAEEYERATRYNYTSEEKFAFVEVIAMIKGLQVLMGRMESVFNQAIRNTIYAALQDFAQVTLREPLRQAVRKKKNVLISVLQAIRKTICDWEGGREPPNDPCLRGEKDPKGGFDIKVPRRAVGPSSTQLYMVRTMLESLIADKSGSKKTLRSSLDGPIVLAIEDFHKQSFFFTHLLNISEALQQCCDLSQLWFREFFLELTMGRRIQFPIEMSMPWILTDHILETKEPSMMEYVLYPLDLYNDSAYYALTKFKKQFLYDEIEAEVNLCFDQFVYKLADQIFAYYKAMAGSVLLDKRFRAECKNYGVIIPYPPSNRYETLLKQRHVQLLGRSIDLNRLITQRISAAMYKSLDQAISRFESEDLTSIVELEWLLEINRLTHRLLCKHMTLDSFDAMFREANHNVSAPYGRITLHVFWELNFDFLPNYCYNGSTNRFVRTAIPFTQEPQRDKPANVQPYYLYGSKPLNIAYSHIYSSYRNFVGPPHFKTICRLLGYQGIAVVMEELLKIVKSLLQGTILQYVKTLIEVMPKICRLPRHEYGSPGILEFFHHQLKDIIEYAELKTDVFQSLREVGNAILFCLLIEQALSQEEVCDLLHAAPFQNILPRVYIKEGERLEVRMKRLEAKYAPLHLVPLIERLGTPQQIAIAREGDLLTKERLCCGLSMFEVILTRIRSYLQDPIWRGPPPTNGVMHVDECVEFHRLWSAMQFVYCIPVGTNEFTAEQCFGDGLNWAGCSIIVLLGQQRRFDLFDFCYHLLKVQRQDGKDEIIKNVPLKKMADRIRKYQILNNEVFAILNKYMKSVETDSSTVEHVRCFQPPIHQSLATTC

SEQ ID NO: 1795 - DNA, 728 bp, Homo sapiens
gcggcctcagatgaatgcggctgttaagacctgcaataatccagaatggctactctgatctatgttgataaggaaaatggagaaccaggcacccgtgtggttgctaaggatgggctgaagctggggtctggaccttcaatcaaagccttagatgggagatctcaagtttcaacaccacgttttggcaaaacgttcgatgccccaccagccttacctaaagctactagaaaggctttgggaactgtcaacagagctacagaaaagtctgtaaagaccaagggacccctcaaacaaaaacagccaagcttttctgccaaaaagatgactgagaagactgttaaagcaaaaagctctgttcctgcctcagatgatgcctatccagaaatagaaaaattctttcccttcaatcctctagactttgagagttttgacctgcctgaagagcaccagattgcgcacctccccttgagtggagtgcctctcatgatccttgacgaggagagagagcttgaaaagctgtttcagctgggccccccttcacctgtgaagatgccctctccaccatgggaatccaatctgttgcagtctccttcaagcattctgtcgaccctggatgttgaattgccacctgtttgctgtgacatagatatttaaatttcttagtgcttcagagtttgtgtgtatttgtattaataaagcattcttcaacagaaaaaaaaaaaaaaaaa

SEQ ID NO: 1796 - protein, 202 aa, Homo sapiens
MATLIYVDKENGEPGTRVVAKDGLKLGSGPSIKALDGRSQVSTPRFGKTFDAPPALPKATRKALGTVNRATEKSVKTKGPLKQKQPSFSAKKMTEKTVKAKSSVPASDDAYPEIEKFFPFNPLDFESFDLPEEHQIAHLPLSGVPLMILDEERELEKLFQLGPPSPVKMPSPPWESNLLQSPSSILSTLDVELPPVCCDIDI

SEQ ID NO: 1797 - DNA, 636 bp, Homo sapiens
atggccctggagtttctccctcagactaagaaccatccaccagtagcagaaactacatcctcagggggggttttcttcgtgaatgcaaatgtcccggcacctaaacggttcacattaccgcaggtgatttctgcagctgtaactaagttccatcctcagcaagaatcagaaccaccagagacagagcagagagacaccatgccctcacttgcgagagttcaaatggcactttcttggaaaaagaagattgggtgttcacagctttctgagcaacaacgatacaaagtggatgcaattcatccatcgtctctgaaaagtcttcgaccattgcatgagattgtagaggaagacaggcacaggaagaccaaacagcgtgtagaggatacgaagattggctacccaactgttgcatcagtaccccattctatcatcaacgggtacaaacgagtcctggccttgtctgtggagacggattacaccttcccactcgctgaaaaggtcaaggccttcttggctgatccatctgcctttggctttgatgtttcaagcaatgctgggtcaacccaaccactcagcacattcactggacctggtcgtgcccaagctcctccactgcatgattcagagttgagatag

SEQ ID NO: 1798 - DNA, 4267 bp, Homo sapiens
gcaactggacaacaaccacatcagctgcattgaagatggagccttccgagcgctgcgcgatttggagatccttaccctcaacaacaacaacatcagtcgcatcctggtcaccagcttcaaccacatgccgaagatccgaactctgcgcctccactccaaccacctgtactgcgactgccacctggcctggctctcggattggctgcgacagcgacggacagttggccagttcacactctgcatggctcctgtgcatttgaggggcttcaacgtggcggatgtgcagaagaaggagtacgtgtgcccagccccccactcggagcccccatcctgcaatgccaactccatctcctgcccttcgccctgcacgtgcagcaataacatcgtggactgtcgaggaaagggcttgatggagattcctgccaacttgccggagggcatcgtcgaaatacgcctagaacagaactccatcaaagccatccctgcaggagccttcacccagtacaagaaactgaagcgaatagacatcagcaagaatcagatatcggatattgctccagatgccttccagggcctgaaatcactcacatcgctggtcctgtatgggaacaagatcaccgagattgtcaagggactgtttgatgggctggtgtccctacagctgctcctcctcaatgccaacaagatcaactgcctgcgggtgaacacgtttcaggacctgcagaacctcaacttgctctccctgtatgacaacaagctgcagaccatcagcaaggggctcttcgcccctctgcagtccatccagacactccacttagcccaaaacccatttgtgtgcgactgccacttgaagtggctggccgactacctccaggacaaccccatcgagacaagcggggcccgctgcagcagcccgcgccgactcgccaacaagcgcatcagccagatcaagagcaagaagttccgctgctcaggctccgaggattaccgcagcaggttcagcagcgagtgcttcatggacctcgtgtgccccgagaagtgtcgctgtgagggcacgattgtggactgctccaaccagaagctggtccgcatcccaagccacctccctgaatatgtcaccgacctgcgactgaatgacaatgaggtatctgttctggaggccactggcatcttcaagaagttgcccaacctgcggaaaataaatctgagtaacaataagatcaaggaggtgcgagagggagctttcgatggagcagccagcgtgcaggagctgatgctgacagggaaccagctggagaccgtgcacgggcgcgtgttccgtggcctcagtggcctcaaaaccttgatgctgaggagtaacttgatcggctgtgtgagtaatgacacctttgccggcctgagttcggtgagactgctgtccctctatgacaatcggatcaccaccatcacccctggggccttcaccacgcttgtctccctgtccaccataaacctcctgtccaaccccttcaactgcaactgccacctggcctggctcggcaagtggttgaggaagaggcggatcgtcagtgggaaccctaggtgccagaagccatttttcctcaaggagattcccatccaggatgtggccatccaggacttcacctgtgatggcaacgaggagagtagctgccagctgagcccgcgctgcccggagcagtgcacctgtatggagacagtggtgcgatgcagcaacaaggggctccgcgccctccccagaggcatgcccaaggatgtgaccgagctgtacctggaaggaaaccacctaacagccgtgcccagagagctgtccgccctccgacacctgacgcttattgacctgagcaacaacagcatcagcatgctgaccaattacaccttcagtaacatgtctcacctctccactctgatcctgagctacaaccggctgaggtgcatccccgtccacgccttcaacgggctgcggtccctgcgagtgctaaccctccatggcaatgacatttccagcgttcctgaaggctccttcaacgacctcacatctctttcccatctggcgctgggaaccaacccactccactgtgactgcagtcttcggtggctgtcggagtgggtgaaggcggggtacaaggagcctggcatcgcccgctgcagtagccctgagcccatggctgacaggctcctgctcaccaccccaacccaccgcttccagtgcaaagggccagtggacatcaacattgtggccaaatgcaatgcctgcctctccagcccgtgcaagaataacgggacatgcacccaggaccctgtggagctgtaccgctgtgcctgcccctacagctacaagggcaaggactgcactgtgcccatcaacacctgcatccagaacccctgtcagcatggaggcacctgccacctgagtgacagccacaaggatgggttcagctgctcctgccctctgggctttgaggggcagcggtgtgagatcaacccagatgactgtgaggacaacgactgcgaaaacaatgccacctgcgtggacgggatcaacaactacgtgtgtatctgtccgcctaactacacaggtgagctatgcgacgaggtgattgaccactgtgtgcctgagctgaacctctgtcagcatgaggccaagtgcatccccctggacaaaggattcagctgcgagtgtgtccctggctacagcgggaagctctgtgagacagacaatgatgactgtgtggcccacaagtgccgccacggggcccagtgcgtggacacaatcaatggctacacatgcacctgcccccagggcttcagtggacccttctgtgaacaccccccacccatggtcctactgcagaccagcccatgcgaccagtacgagtgccagaacggggcccagtgcatcgtggtgcagcaggagcccacctgccgctgcccaccaggcttcgccggccccagatgcgagaagctcatcactgtcaacttcgtgggcaaagactcctacgtggaactggcctccgccaaggtccgaccccaggccaacatctccctgcaggtggccactgacaaggacaacggcatccttctctacaaaggagacaatgaccccctggcactggagctgtaccagggccacgtgcggctggtctatgacagcctgagttcccctccaaccacagtgtacagtgtggagacagtgaatgatgggcagtttcacagtgtggagctggtgacgctaaaccagaccctgaacctagtagtggacaaaggaactccaaagagcctggggaagctccagaagcagccagcagtgggcatcaacagccccctctaccttggaggcatccccacctccaccggcctctctgccttgcgccagggcacggaccggcctctaggcggcttccacggatgcatccatgaggtgcgcatcaacaacgagctgcaggacttcaaggccctcccaccacagtccctgggggtgtcaccaggctgcaagtcctgcaccgtgtgcaagcacggcctgtgccgctccgtggagaaggacagcgtggtgtgcgagtgccgcccaggctggaccggcccactctgcgatcaggaggcccgggacccctgcctcggccacagatgccaccatggaaaatgtgtggcaactgggacctcatacatgtgcaagtgtgccgagggctatggaggggacttgtgtgacaacaagaatgactctgccaatgcctgctcagccttcaagtgtcaccatgggcagtgccacatctcagaccaaggggagccctactgcctgtgccagcccggctttagcggcgagcactgccaacaagagaatccgtgcctgggacaagtagtccgagaggtgatccgccgccagaaaggttatgcatcatgtgccacagcctccaaggtgcccatcatggaatgtcgtgggggctgtgggccccagtgctgccagcccacccgcagcaagcggcggaaatacgtcttccagtgcacggacggctcctcgtttgtagaagaggtggagagacacttagagtgcggctgcctcgcgtgttcctaagcccctgcccgcctgcctgccacctctcggactccagcttgatggagttgggacagccatgtgggaccccctggtgattcagcatgaaggaaatgaagctggagaggaaggtaaagaagaagagaatattaagtatattgtaaaataaacaaaaaatagaacttatttttattatggaaa

SEQ ID NO: 1799 - DNA, 765 bp, Homo sapiens
gccatgggccgccgccccgcctgttgttaccggtattgtaagaacaagccgtacccaaagtctcgcttctgccgaggtgtccctgatgccaagattcgcatttttgacctggggcggaaaaaggcaaaagtggatgagtttccactttgtggccacatggtgtcagatgaatatgagcagctgtcctctgaagccctggaggctgcccgaatttgtgccaataagtacatggtaaaaagttgtggcaaagatggcttccatatccgggtgcggctccactccttccacgtcatccgcatcaacaagatgttgtcctgtgctggggctgacaggctccaaacaggcatgcgaggtgcctttggaaagccccagggcactttggccagggttcacactggccaagttatcatgtccatccgcaccaagctgcagaacaaggagcatgtgattgaggccctgggcagggccaagttcaagtttcctggccgccagaagatccacatctcaaagaagtggggcttcaccaagttcaatgctgatgaatttgaagacatggtggctgaaaagcggctcatcccagatggctgtggggtcaagtacatccccaatcgtggccctctggacaagtggcgggccctgcactcatgagggcttccaatgtgctgcccccctcttaatactcaccaataaattctactaactctccaaaaaaaaaaaaaaaaatagaaaaaaaaaaaaaaatagaccaaaaaaaaaaaaaaaaaa

SEQ ID NO: 1800 - DNA, 2139 bp, Homo sapiens
ggcacgagggtgagacgctgatgggaggatggacgtactggtgtctgagtgctccgcgcggctgctgcagcaggaagaagagattaaatctctgactgctgaaattgaccggttgaaaaactgtggctgtttaggagcttctccaaatttggagcagttacaagaagaaaatttaaaattaaagtatcgactgaatattcttcgaaagagtcttcaggcagaaaggaacaaaccaactaaaaatatgattaacattattagccgcctacaagaggtctttggtcatgcaattaaggctgcatatccagatttggaaaatcctcctctgctagtgacaccaagtcagcaggccaagtttggggactatcagtgtaatagtgctatgggtatttctcagatgctcaaaaccaaggaacagaaagttaatccaagagaaattgctgaaaacattaccaaacacctcccagacaatgaatgtattgaaaaagttgaaattgctggtcctggttttattaatgtccacttaagaaaggattttgtatcagaacaattgaccagtcttctagtgaatggagttcaactacctgctctgggagagaataaaaaggttatagttgacttttcctcccctaatatagctaaagagatgcatgtaggccacctgaggtcaactatcataggagagagtataagccgcctctttgaatttgcagggtatgacgtgctcaggttaaatcatgtaggagactgggggacccagtttggcatgctcatcgctcacctgcaagacaaatttccagattatctaacagtttcacctcctattggggatcttcaggtcttttataaggaatctaagaagaggtttgatactgaggaggaatttaagaagcgagcatatcagtgtgtagttctgctccagggtaaaaacccagatattacaaaagcttggaagcttatctgtgatgtctcccgccaagagttaaataaaatctatgatgcattggacgtctctttaatagagagaggggaatccttctatcaagataggatgaatgatattgtaaaggaatttgaagatagaggatttgtgcaggtggatgatggcagaaagattgtatttgtcccagggtgttccataccattaaccatagtaaaatcagatggaggttatacctatgatacatctgacctggctgctattaaacaaagactatttgaggaaaaagcagatatgattatctatgttgtggacaatggacaatctgtgcacttccagacaatatttgctgctgctcaaatgattggttggtatgaccctaaagtaactcgagtcttccatgctggatttggtgtggtgctaggggaagacaagaaaaagtttaaaacacgttcgggtgaaacagtgcgcctcatggatcttctgggagaaggactaaaacgatccatggacaagttgaaggaaaaagaaagagacaaggtcttaactgcagaggaattgaatgctgctcagacatccgttgcatatggctgcatcaaatatgctgacctttcccataaccggttgaatgactacatcttctcctttgacaaaatgctagatgacagaggaaatacagctgcttacttgttgtatgccttcactagaatcaggtctattgcacgtctggccaatattgatgaagaaatgctccaaaaagctgctcgagaaaccaagattcttttggatcatgagaaggaatggaaactaggccggtgcattttacggttccctgagattctgcaaaagattttagatgacttatttctccacactctctgtgattatatatatgagctggcaactgctttcacagagttctatgatagctgctactgtgtggagaaagatagacagactggaaaaatattgaaggtgaacatgtggcgtatgctgctatgtgaagcagtagctgctgtcatggccaaggggtttgatatcctgggaataaaacctgtccaaaggatgtaatccttcataggtttgaacactgtgtgtttttaccaaagtggccattggcactgtttgcttttttacaatcatgtggacacaagcataagtaaagaaaatttgtcaaccaaaaaaaaaaaaaaaaaaaa

SEQ ID NO: 1801 - protein, 660 aa, Homo sapiens
MDVLVSECSARLLQQEEEIKSLTAEIDRLKNCGCLGASPNLEQLQEENLKLKYRLNILRKSLQAERNKPTKNMINIISRLQEVFGHAIKAAYPDLENPPLLVTPSQQAKFGDYQCNSAMGISQMLKTKEQKVNPREIAENITKHLPDNECIEKVEIAGPGFINVHLRKDFVSEQLTSLLVNGVQLPALGENKKVIVDFSSPNIAKEMHVGHLRSTIIGESISRLFEFAGYDVLRLNHVGDWGTQFGMLIAHLQDKFPDYLTVSPPIGDLQVFYKESKKRFDTEEEFKKRAYQCVVLLQGKNPDITKAWKLICDVSRQELNKIYDALDVSLIERGESFYQDRMNDIVKEFEDRGFVQVDDGRKIVFVPGCSIPLTIVKSDGGYTYDTSDLAAIKQRLFEEKADMIIYVVDNGQSVHFQTIFAAAQMIGWYDPKVTRVFHAGFGVVLGEDKKKFKTRSGETVRLMDLLGEGLKRSMDKLKEKERDKVLTAEELNAAQTSVAYGCIKYADLSHNRLNDYIFSFDKMLDDRGNTAAYLLYAFTRIRSIARLANIDEEMLQKAARETKILLDHEKEWKLGRCILRFPEILQKILDDLFLHTLCDYIYELATAFTEFYDSCYCVEKDRQTGKILKVNMWRMLLCEAVAAVMAKGFDILGIKPVQRM

SEQ ID NO: 1802 - DNA, 3171 bp, Homo sapiens
cagttcacagtgttcatcaggcgagatacttttggacccacaaagccagttttttggggggatgctcagtgtctacctgcagtgccaaagttttgcttgaacagccctcttctgccgcgcctcccagctccaccccctatcacgtgggtgctggctgcttctgcgtgaggagcttcctctgatcacctgtagcatctttagtgccttcgtccagtcggcctgcaaatcccatttcccagagaggcttgggcagggcccacttgccacttggccctgtgcccagagcgttgggggcagatggcagccaggggaagaagggaggtggggaagggccgccaccgcttgagggtcccctcccttgagaggaggccccatggcagttttcctgagttcttgatccactttggtttaaacaacttttgtgaagctatgtgagatttgactgcatttcaaaagacaaaacacatgtttttttctgatttgctctttgcctttcagcgacgctttcagatactttgtgagtgtctactctgtgctaggtgctgagtagactgggatgtgtgtggctccatccctggctggaagagctttgagtcctgtctgctgacttcactgaaggagtttctctcttgcttcattccttcctcccgggggtcagctgggtaggagcagacttgccctgccttcctctaggcagaaagttttcctgcaaatgaaagaatctgccattctcttttgctatgatgatgatgattattctgacatgacccgcgggtactgaagccacagtcctctctgttcactgttctctccttgagtcatatctatggcctgaggacgtctgtatccagctccttttcctacaatggtagacacttccccaggcagtgggtgggtcagggtggccagtcactctcctagctgtccttgcctggggacttagatttaccccatccaggactgtggtcgctattctgtgagcgattgatggcgcatatgcagaactcccctggagtcatggctctagaaagtgtccaggcccatcgtgacaatggtgccaagcaccgggctggtgaccagtgcctaaacacacacgctcctttaatccttacggcaagcctgtgaggcggataggaccagccctgatctatagtgagaaaattaaggttcagagggagaaggtccaaatagtggccaagctgggactgagatctcgagtttgggtttgtttggttttgttgttgttgttctttccctcgtgtccatgacttttctctgccattagcagggaagtgtgcggagggcttccagggaatcaagtgaccctccctctgaatttcggtgcctcttccccccgccccttgctcacacatttcagtaggtcacaggccaaatggcagcccaaaaggtgggcagagatttttttttcttcccctcacccctgcttattaacacaattgtgacaactactttaccttacatcccagggcaaacggacagcttgcggtacctccaaaaatttggaaaaccctgagtctaagaccacctcttgataaaagaggcctttgctcacatgttctgctcggaatctttctttgccattggtgggtgtatgtcgtcccagctgagactgcgggagagctgagctccagcttaaaccgcttttaatggcccttccctactgggggatcgctggagcccatgccaggttacggtagtcattttaaacctctgccacaaggccacgccatagaatcaatttccaagtcaatgttcttggccctaaaatgtttgcgcccactgaggatttcattaccaggtggaagatgggggaacatatgccacgttaaagagcaagtgctgagtgtgccaggacttgagaaggaccttaggctgaggagtggacagtctggtatttatttcgcctctcccaagtacccagcacagagtgggaaaaagaagaaactgctcctgccttccagtagctggcaacttgacatcaagaacaaaaacattcgtagctggacccccgtcctttcatcgtgcccaagtcttacatgttggcttaagctgcccccttggaggccgtacctttctctttggactgtgacagtggacacctaacagcctgagccatgtgtggctgtcttatcccccaagggttgtccaggcccgttctgcagggctgttgtgtagactgcagacatccatacctcaccacagaccaaagatgacctcgtgtcagactgtgggctgatgagaggtagagcagcatgcatcgaggcctgagggtgcagggcgccctctcttggcctggaggaattgctcctaactagagtaagtttccacgagggtcccaggcagagctgcagagctggaaccggaggctccacagtccttgcctgctcatggacctccttcagagcacctttctacagactggactgcccagctccgtggggtggcatctggtttctggtgctattctgccaagttatcgagctcctcctcatgtttcaacattccatcttcccgtttctatcctcgactccaaagtaagccttcttagctccaatcagggatgaggggctcaacctcttctgtcctcaaagaggccaaacgcagtgccacagtcggtagccttcacttttagatgtcctattcatgtaaaaaagaaggtgcccccaccaggcttacatcagcaataagcaattctaatgcaacgatggtgtccacattttaccccagtgtgtgcccatgtatgcctttgtgcccgtgtaattattgttagcgcccctttcacttagaggggtgatgataaactgtggccaccttgattacaacccacatttcctgctttggggagcttccaagtaacaggccatttcttacctccctccaggaacagtgggcactgcccaccacctcgtgtctgctcataggatgacgctggagatccccacacttactctaccctcttggcaaattggcattccggtggtggtttttgtttcctttaacacattaaataaatgagtatataggatgtgaggggaggggtgagaacaactagctgtagcatgtgtaggctatatactttaccatttgacttctttcctttttttttttttaaataaaaaaagtgcttgactggtttcaagcttcatcatg

SEQ ID NO: 1803 - DNA, 1347 bp, Homo sapiens
ggggcctggtgtgattccgtcctgcgcggttgttctctggagcagcgttcttttatctccgtccgccttctctcctacctaagtgcgtgccgccacccgatggaagattcgatggacatggacatgagccccctgaggccccagaactatcttttcggttgtgaactaaaggccgacaaagattatcactttaaggtggataatgatgaaaatgagcaccagttatctttaagaacggtcagtttaggggctggtgcaaaggatgagttgcacattgttgaagcagaggcaatgaattacgaaggcagtccaattaaagtaacactggcaactttgaaaatgtctgtacagccaacggtttcccttgggggctttgaaataacaccaccagtggtcttaaggttgaagtgtggttcagggccagtgcatattagtggacagcacttagtagctgtggaggaagatgcagagtcagaagatgaagaggaggaggatgtgaaactcttaagtatatctggaaagcggtctgcccctggaggtggtagcaaggttccacagaaaaaagtaaaacttgctgctgatgaagatgatgacgatgatgatgaagaggatgatgatgaagatgatgatgatgatgattttgatgatgaggaagctgaagaaaaagcgccagtgaagaaatctatacgagatactccagccaaaaatgcacaaaagtcaaatcagaatggaaaagactcaaaaccatcatcaacaccaagatcaaaaggacaagaatccttcaagaaacaggaaaaaactcctaaaacaccaaaaggacctagttctgtagaagacattaaagcaaaaatgcaagcaagtatagaaaaaggtggttctcttcccaaagtggaagccaaattcatcaattatgtgaagaattgcttccggatgactgaccaagaggctattcaagatctctggcagtggaggaagtctctttaagaaaatagtttaaacaatttgttaaaaaattttccgtcttatttcatttctgtaacagttgatatctggctgtcctttttataatgcagagtgagaactttccctaccgtgtttgataaatgttgtccaggttctattgccaagaatgtgttgtccaaaatgcctgtttagtttttaaagatggaactccaccctttgcttggttttaagtatgtatggaatgttatgataggacatagtagtagcggtggtcagacatggaaatggtggggagacaaaaatacacatgtgaaataaaactcagtattttaataaagtaaaaaaaaaaaaaaccaaaaaaaaaaaaaaaaaaaaaaaaaaaaa

SEQ ID NO: 1804 - protein, 294 aa, Homo sapiens
MEDSMDMDMSPLRPQNYLFGCELKADKDYHFKVDNDENEHQLSLRTVSLGAGAKDELHIVEAEAMNYEGSPIKVTLATLKMSVQPTVSLGGFEITPPVVLRLKCGSGPVHISGQHLVAVEEDAESEDEEEEDVKLLSISGKRSAPGGGSKVPQKKVKLAADEDDDDDDEEDDDEDDDDDDFDDEEAEEKAPVKKSIRDTPAKNAQKSNQNGKDSKPSSTPRSKGQESFKKQEKTPKTPKGPSSVEDIKAKMQASIEKGGSLPKVEAKFINYVKNCFRMTDQEAIQDLWQWRKSL

SEQ ID NO: 1805 - DNA, 1793 bp, Homo sapiens
gggcggcgcccaatgggctgcgcggagcgtcacttcccggcagcgggaggcgagtggcgagtggcgagtggcgagtgtcaggggggcggccggcgggggcggggcggccggaggaggcgttggcagcgggctcggacccacgcggcgccgcggcccgcctggcctgcagcgctcccacccccggcggcggcacgatgccctttgacttcaggaggtttgacatctacaggaaggtgcccaaggaccttacgcagccaacgtacaccggggccattatctccatctgctgctgcctcttcatcctcttcctcttcctctcggagctcaccggatttataacgacagaagttgtgaacgagctctatgtcgatgacccagacaaggacagcggtggcaagatcgacgtcagtctgaacatcagtttacccaatctgcactgcgagttggttgggcttgacattcaggatgagatgggcaggcacgaagtgggccacatcgacaactccatgaagatcccgctgaacaatggggcaggctgccgcttcgaggggcagttcagcatcaacaaggtccccggcaacttccacgtgtccacacacagtgccacagcccagccacagaacccagacatgacgcatgtcatccacaagctctcctttggggacacgctacaggtccagaacatccacggagctttcaatgctctcgggggagcagacagactcacctccaaccccctggcctcccacgactacatcctgaagattgtgcccacggtttatgaggacaagagtggcaagcagcggtactcctaccagtacacggtggccaacaaggaatacgtcgcctacagccacacgggccgcatcatccctgcaatctggttccgctacgacctcagccccatcacggtcaagtacacagagagacggcagccgctgtacagattcatcaccacgatctgtgccatcattggcgggaccttcaccgtcgccggcatcctggactcatgcatcttcacagcctctgaggcctggaagaagatccagctgggcaagatgcattgacgccacacccagcctaatggccgaggaccctgggcatcgccagccttgcctccagtgccctgtctcctttggccctcaatctggtcccaaatctggctgtgtcccaaagggtgtgtgggaagtggggggaaagtagaggatggctcgatgttttgcagctacctcttttccccgtgtttctttttagacaaattacactgcctgaagttgcagttcccctttccctggggagccccaagaacagagtcaggcaaggggtggggagtccaggggaacatcccagaatgcatatcgatcagctctcagccaggcttcgacaatctcgcagcccccactaggtggacacattaatgatttggtttctcccctgggcagccaacctgccccagaggcaccagacctgggctttcagctttgggaccaggctgcccaaaggtactcctttatacacccggcaccttccacgaaagatggtacttcccaagcaagcccctatgatttgtcactatagatggaaatgtgtggcatgcacatgagttgaaattcttttatgcatttttttgaagaaaaaaaaaaaaacaactctgaggacataggggatgtcagtttcctatggaagagacacctctgacccgttattcttataatcaaaatctgaagggaaaaaaatgttttagttctttccccactcgttgggttcaactagattaaaaggctgattttcag

SEQ ID NO: 1806 - protein, 290 aa, Homo sapiens
MPFDFRRFDIYRKVPKDLTQPTYTGAIISICCCLFILFLFLSELTGFITTEVVNELYVDDPDKDSGGKIDVSLNISLPNLHCELVGLDIQDEMGRHEVGHIDNSMKIPLNNGAGCRFEGQFSINKVPGNFHVSTHSATAQPQNPDMTHVIHKLSFGDTLQVQNIHGAFNALGGADRLTSNPLASHDYILKIVPTVYEDKSGKQRYSYQYTVANKEYVAYSHTGRIIPAIWFRYDLSPITVKYTERRQPLYRFITTICAIIGGTFTVAGILDSCIFTASEAWKKIQLGKMH

SEQ ID NO: 1807 - DNA, 588 bp, Homo sapiens
atggcgtatcacggcctcactgtgcctctcattgtgatgagcgtgttctggggcttcgtcggcttcttggtgccttggttcatccctaagggtcctaaccggggagttatcattaccatgttggtgacctgttcagtttgctgctatctcttagctagtttgagcacaggacataatcacttcccaggggcctgggtgcaccgctttggtttccaaccaaaccatgactccatgagcgtgaaccaggactattctgctcaccttgtgtctgcacacagtaggtgcttaacaaacacctggggtatcttcaagtccattccctcatctgaccctcacagcagccctctgaggaaggcagcctgcacactggaggagacaggtctgcactcagccattctgaagacggtaaaagtgagagccctggatgccatgggggcaaggaccatatctgttctgcttttttctgaagtccctgacccaatttgtgcccggtacattgaagaagctcaggacatggctattatttcaatcaagctgaaatctactgagctgagctggcccaaccaggaattcaagataagacagtag

SEQ ID NO: 1808 - DNA, 6522 bp, Homo sapiens
gaagccgcccatcccgccccaagtggaggaagagtattacaccatcgccgaattccagacaaccatcccagacggcatcagcttccaggcaggcctgaaggtcgaggtgatcgagaaaaacttgagtggctggtggtacattcagattgaagataaggaagggtgggccccggccaccttcattgacaagtacaagaagacgagcaacgcgtcgagacccaactttctggctcccctgccccacgaggtgacccagctccggctgggggaagcagcagcgctggagaacaacacgggcagcgaagccacgggcccctcccggcccctgcctgacgcaccgcatggtgtcatggactcggggttgccatggtctaaagactggaagggcagtaaggatgtcctgaggaaggcatcttcagacatgtctgcgtcagcaggctacgaggagatctcagaccccgacatggaggagaagcccagcctccctccgcggaaagaatccatcatcaagtcggagggggagctgctggagcgggagcgggagcggcagaggacggagcagctccggggccccactcccaagcctccgggcgtgattttgccgatgatgccagccaaacacatccctccagcccgggacagcaggaggccagagcccaaacctgacaaaagcagactgttccagctgaaaaatgacatggggctggagtgtggccacaaggtcttggccaaggaagtgaagaagcccaacctccggcccatctccaaatccaaaactgacctgccagaggagaagccagatgccactccccagaatcccttcttgaagtccagacctcaggttaggccaaaaccagctccttcccccaaaacggagccacctcagggcgaagaccaagtcgacatctgcaacctcaggagtaagctcaggcctgccaagtcccaagacaagtccttgttggatggggagggcccccaggcagtagggggccaagacgtggccttcagccgaagcttcctcccaggagaggggcctggccgcgcccaggacaggacgggcaaacaggatggtctcagcccaaaagagatttcctgcagagcccctccgaggccagccaagaccacagatcctgtgtctaagagcgtgcctgttcctctccaagaggctccccagcagagacctgtggtcccaccccgcagaccacctcccccaaagaaaacctcttcgtcatccaggccgctcccagaggtcagaggtccacagtgtgaaggccacgaaagcagggcagctcccaccccaggccgtgctctcctcgtccctccaaaagccaaaccttttctctccaactctttggggggccaggatgacacgcgaggcaaaggcagcctggggccatgggggaccggcaagattggagaaaacagggagaaagcagctgcagcctctgtccccaatgccgacggcctgaaggactctttgtatgtggccgtggccgactttgaaggagacaaagacaccagcagcttccaggaagggacagtgtttgaagtccgggagaagaacagcagtggctggtggttctgccaggtcctgagcggagccccttcctgggaagggtggattccttccaactatctcagaaagaagccgtagccgactccctttctgcctagagggcccgctggtccttgctggctttacccacgtatttaatacgcctcttaatttatcattctccacgcagcttccaaggcagacagactctggggtactgtgacttcttgcctcccatgggtggagagtgagtttcggacacctcgggcgcccctgggcctgatccctcctatcacagcatcactggaggctcagaacccacagcctttgctttctgtccatgtcagcatccctgccttaagagaactcctcctggccaatggcattgccacccagcagtgggaccaagactctccaagacctccaggactggatcccattgcctggagaaactccagcaagggtctctcatggcttggacatggcacagtaaggggcagccaacccagtccatgatgacttttgctccaacttcttcatgtttctaaaagcccagtggctttattcactcctcctaaattgcctgctaccagaaggaacttcatcctgaagaaatgcattccattaccagttccagggaaagtgtccccttccccaaagcctcaggcccgtgggcctctgaggttccactggatgcggctcccccaggagtgggcctggagatccgctcagccgccctgcctcccaccttctatcttgggaccgtggtcagccctgaagggtggttccagccccgcgtatgctgcgctttgctgctgcaggctccggtccctccagggcttttcaatgagagttcccaccccaacttggagcatttcatttttgcctacctaaagcaagaatctcaaagtttgtttgaataagaggcccattcacaagtcgtgcccttgtgagcacccctttgctgagtgcctcgtgggtgccaaacactgtacttggcgctttgcattcatgctttgaccctcacaacctccctttatagatgaggaaattcacgctccatgtgcccaaggacacaccagccaggaggaagagggaagaggatttgagtccaggcctgcctgacttcagtgcctgtgccctcccctctgtaaaagacaaaccaggcagggaagagatagaagctggctaagtggtggccaagtggcttcattgtgaggggggtgagggggcattcgtggctgctcccacacccaccatccctccagcccacagcagcctataccaaaggctgccctggactcaacagctgcatctccatgacaggagaatgccagggtcctggtggttgacacagagccctgttccctcttctaagctgttgccccctggggaatagagcttatggagcaacgggagctgaggtggcctcgagggccagcctggagggctctgagcatagcatgcagcggtcccatagggaggcaggtaaccaagggccaggcagagctgcttcctgtgcctctccggcatttgtaatgtttttttcttttttcacgcactgccaaatctgttttctcccttgaagaaacccagggcagatgtggtcatctgtcaaactgaggtctggagaggcatgactaaatcactgcagaagcaaaatcaggacccagcatttctagctcccagcccagagtaagagagcagagcagaaccccttcccattctacccgaccgaggcagccctgccctgccctgccccgcccctccccaccctgccctgccccagagatctccagttcacagtgttcatcaggcgagatacttttggacccacaaagccagttttttggggggatgctcagtgtctacctgcagtgccaaagttttgcttgaacagccctcttctgccgcgcctcccagctccaccccctatcacgtgggtgctggctgcttctgcgtgaggagcttcctctgatcacctgtagcatctttagtgccttcgtccagtcggcctgcaaatcccatttcccagagaggcttgggcagggcccacttgccacttggccctgtgcccagagcgttgggggcagatggcagccaggggaagaagggaggtggggaagggccgccaccgcttgagggtcccctcccttgagaggaggccccatggcagttttcctgagttcttgatccactttggtttaaacaacttttgtgaagctatgtgagatttgactgcatttcaaaagacaaaacacatgtttttttctgatttgctctttgcctttcagcgacgctttcagatactttgtgagtgtctactctgtgctaggtgctgagtagactgggatgtgtgtggctccatccctggctggaagagctttgagtcctgtctgctgacttcactgaaggagtttctctcttgcttcattccttcctcccgggggtcagctgggtaggagcagacttgccctgccttcctctaggcagaaagttttcctgcaaatgaaagaatctgccattctcttttgctatgatgatgatgattattctgacatgacccgcgggtactgaagccacagtcctctctgttcactgttctctccttgagtcatatctatggcctgaggacgtctgtatccagctccttttcctacaatggtagacacttccccaggcagtgggtgggtcagggtggccagtcactctcctagctgtccttgcctggggacttagatttaccccatccaggactgtggtcgctattctgtgagcgattgatggcgcatatgcagaactcccctggagtcatggctctagaaagtgtccaggcccatcgtgacaatggtgccaagcaccgggctggtgaccagtgcctaaacacacacgctcctttaatccttacggcaagcctgtgaggcggataggaccagccctgatctatagtgagaaaattaaggttcagagggagaaggtccaaatagtggccaagctgggactgagatctcgagtttgggtttgtttggttttgttgttgttgttctttccctcgtgtccatgacttttctctgccattagcagggaagtgtgcggagggcttccagggaatcaagtgaccctccctctgaatttcggtgcctcttccccccgccccttgctcacacatttcagtaggtcacaggccaaatggcagcccaaaaggtgggcagagatttttttttcttcccctcacccctgcttattaacacaattgtgacaactactttaccttacatcccagggcaaacggacagcttgcggtacctccaaaaatttggaaaaccctgagtctaagaccacctcttgataaaagaggcctttgctcacatgttctgctcggaatctttctttgccattggtgggtgtatgtcgtcccagctgagactgcgggagagctgagctccagcttaaaccgcttttaatggcccttccctactgggggatcgctggagcccatgccaggttacggtagtcattttaaacctctgccacaaggccacgccatagaatcaatttccaagtcaatgttcttggccctaaaatgtttgcgcccactgaggatttcattaccaggtggaagatgggggaacatatgccacgttaaagagcaagtgctgagtgtgccaggacttgagaaggaccttaggctgaggagtggacagtctggtatttatttcgcctctcccaagtacccagcacagagtgggaaaaagaagaaactgctcctgccttccagtagctggcaacttgacatcaagaacaaaaacattcgtagctggacccccgtcctttcatcgtgcccaagtcttacatgttggcttaagctgcccccttggaggccgtacctttctctttggactgtgacagtggacacctaacagcctgagccatgtgtggctgtcttatcccccaagggttgtccaggcccgttctgcagggctgttgtgtagactgcagacatccatacctcaccacagaccaaagatgacctcgtgtcagactgtgggctgatgagaggtagagcagcatgcatcgaggcctgagggtgcagggcgccctctcttggcctggaggaattgctcctaactagagtaagtttccacgagggtcccaggcagagctgcagagctggaaccggaggctccacagtccttgcctgctcatggacctccttcagagcacctttctacagactggactgcccagctccgtggggtggcatctggtttctggtgctattctgccaagttatcgagctcctcctcatgtttcaacattccatcttcccgtttctatcctcgactccaaagtaagccttcttagctccaatcagggatgaggggctcaacctcttctgtcctcaaagaggccaaacgcagtgccacagtcggtagccttcacttttagatgtcctattcatgtaaaaaagaaggtgcccccaccaggcttacatcagcaataagcaattctaatgcaacgatggtgtccacattttaccccagtgtgtgcccatgtatgcctttgtgcccgtgtaattattgttagcgcccctttcacttagaggggtgatgataaactgtggccaccttgattacaacccacatttcctgctttggggagcttccaagtaacaggccatttcttacctccctccaggaacagtgggcactgcccaccacctcgtgtctgctcataggatgacgctggagatccccacacttactctaccctcttggcaaattggcattccggtggtggtttttgtttcctttaacacattaaataaatgagtatataggatgtgaggggaggggtgagaacaactagctgtagcatgtgtaggctatatactttaccatttgacttctttcctttttttttttttaaataaaaaaagtgcttgactggtttcaagcttcatcatg

SEQ ID NO: 1809 - protein, 434 aa, Homo sapiens
MDSGLPWSKDWKGSKDVLRKASSDMSASAGYEEISDPDMEEKPSLPPRKESIIKSEGELLERERERQRTEQLRGPTPKPPGVILPMMPAKHIPPARDSRRPEPKPDKSRLFQLKNDMGLECGHKVLAKEVKKPNLRPISKSKTDLPEEKPDATPQNPFLKSRPQVRPKPAPSPKTEPPQGEDQVDICNLRSKLRPAKSQDKSLLDGEGPQAVGGQDVAFSRSFLPGEGPGRAQDRTGKQDGLSPKEISCRAPPRPAKTTDPVSKSVPVPLQEAPQQRPVVPPRRPPPPKKTSSSSRPLPEVRGPQCEGHESRAAPTPGRALLVPPKAKPFLSNSLGGQDDTRGKGSLGPWGTGKIGENREKAAAASVPNADGLKDSLYVAVADFEGDKDTSSFQEGTVFEVREKNSSGWWFCQVLSGAPSWEGWIPSNYLRKKP

SEQ ID NO: 1810 - DNA, 622 bp, Homo sapiens
ttggctgattgcaattctggcccaactcaaccctctctttggaccgcaattgaaaaatgaaaccatctggtatctgaagtatcattggccttgaggaagaagacatgctctacagtgctcagtctttgaggtcacgagaagagaatgccttctagatgcaaaatcacctccaaaccagaccacttttcttgacttgcctgttttggccattagctgccttaaacgttaacagcacatttgaatgccttattctacaatgcagcgtgttttcctttgccttttttgcactttggtgaattacgtgcctccataacctgaactgtgccgactccacaaaacgattatgtactcttctgagatagaagatgctgttcttctgagagatacgttactctctccttggaatctgtggatttgaagatggctcctgccttctcacgtgggaatcagtgaagtgtttagaaactgctgcaagacaaacaagactccagtggggtggtcagtaggagagcacgttcagagggaagagccatctcaacagaatcgcaccaaactatactttcaggatgaatttcttctttctgccatcttttggaataaatattttcctcctttctatgga

SEQ ID NO: 1811 - DNA, 1245 bp, Homo sapiens
gtccccaacatggcggctccccaagacgtccacgtccggatctgtaaccaagagattgtcaaatttgacctggaggtgaaggcgcttattcaggatatccgtgattgttcaggacccttaagtgctcttactgaactgaatactaaagtaaaagagaaatttcaacagttgcgtcacagaatacagccagttctctatcaaagggcatttatttggactgcttccacatttttttttaagctaacttattccctgacagacttttcttcaactcagcatgacttcaactctccaactacacctgttaccttcagtgacctggagcagttggctaaagagcaagacaaagaatcagagaaacaacttctactccaggaagtggagaatcacaaaaagcagatgctcagcaatcaggcctcatggaggaaagctaatctcacctgcaaaattgcaatcgacaatctagagaaagcagaacttcttcagggaggagatctcttaaggcaaaggaaaaccaccaaagagagcctggcccagacatccagtaccatcactgagagcctcatggggatcagcaggatgatggcccagcaggtccagcagagcgaggaggccatgcagtctctagtcacttcttcacgaacgatcctggatgcaaatgaagaatttaagtccatgtcgggcaccatccagctgggccggaagcttatcacaaaatacaatcgccgggagctgacggacaagcttctcatcttccttgcgctagccctgtttcttgctacggtcctctatattgtgaaaaagcggctctttccatttttgtgagatcccaaaggtgccagttctggccctttcagctcctgtttcaggatctgtcctggttcctgagctctaggctgctaagctgagccacacacccctccgtttgcaccagttgcctgcaggttggatggaacacagtgccccacttttctgcaagtagctggcttgtaaagggtgaacagagccatgggaggaaggtctggcattgggatgccgccctggggacatacgaaccgcctccttccaccattgtgcactatgggaggccgctgctgcgtggagcacttaaagtccagcctccaggaccggatgcccctcctgtctcccgctcccatcgtgcccttaaatgccagatctggtggagggaagagagaagaggtaggaagaaaggtgatgaaaactcctggtcattccttgaataaa

SEQ ID NO: 1812 - DNA, 2380 bp, Homo sapiens
gaggaggagggaaaaggcgagcaaaaaggaagagtgggaggaggaggggaagcggcgaaggaggaagaggaggaggaggaagaggggagcacaaaggatccaggtctcccgacgggaggttaataccaagaaccatgtgtgccgagcggctgggccagttcatgaccctggctttggtgttggccacctttgacccggcgcgggggaccgacgccaccaacccacccgagggtccccaagacaggagctcccagcagaaaggccgcctgtccctgcagaatacagcggagatccagcactgtttggtcaacgctggcgatgtggggtgtggcgtgtttgaatgtttcgagaacaactcttgtgagattcggggcttacatgggatttgcatgacttttctgcacaacgctggaaaatttgatgcccagggcaagtcattcatcaaagacgccttgaaatgtaaggcccacgctctgcggcacaggttcggctgcataagccggaagtgcccggccatcagggaaatggtgtcccagttgcagcgggaatgctacctcaagcacgacctgtgcgcggctgcccaggagaacacccgggtgatagtggagatgatccatttcaaggacttgctgctgcacgaaccctacgtggacctcgtgaacttgctgctgacctgtggggaggaggtgaaggaggccatcacccacagcgtgcaggttcagtgtgagcagaactggggaagcctgtgctccatcttgagcttctgcacctcggccatccagaagcctcccacggcgccccccgagcgccagccccaggtggacagaaccaagctctccagggcccaccacggggaagcaggacatcacctcccagagcccagcagtagggagactggccgaggtgccaagggtgagcgaggtagcaagagccacccaaacgcccatgcccgaggcagagtcgggggccttggggctcagggaccttccggaagcagcgagtgggaagacgaacagtctgagtattctgatatccggaggtgaaatgaaaggcctggccacgaaatctttcctccacgccgtccattttcttatctatggacattccaaaacatttaccattagagaggggggatgtcacacgcaggattctgtggggactgtggacttcatcgaggtgtgtgttcgcggaacggacaggtgagatggagacccctggggccgtggggtctcaggggtgcctggtgaattctgcacttacacgtactcaagggagcgcgcccgcgttatcctcgtacctttgtcttctttccatctgtggagtcagtgggtgtcggccgctctgttgtgggggaggtgaaccagggaggggcagggcaaggcagggcccccagagctgggccacacagtgggtgctgggcctcgccccgaagcttctggtgcagcagcctctggtgctgtctccgcggaagtcagggcggctggattccaggacaggagtgaatgtaaaaataaatatcgcttagaatgcaggagaagggtggagaggaggcaggggccgagggggtgcttggtgccaaactgaaattcagtttcttgtgtggggccttgcggttcagagctcttggcgagggtggagggaggagtgtcatttctatgtgtaatttctgagccattgtactgtctgggctgggggggacactgtccaagggagtggcccctatgagtttatattttaaccactgcttcaaatctcgatttcactttttttatttatccagttatatctacatatctgtcatctaaataaatggctttcaaacaaagcaactgggtcattaaaaccagctcaaagggggtttaaaaaaaaaaaaaccagcccatcctttgaggctgatttttcttttttttaagttctattttaaaagctatcaaacagcgacatagccatacatctgactgcctgacatggactcctgcccacttgggggaaaccttatacccagaggaaaatacacacctggggagtacatttgacaaatttcccttaggatttcgttatctcaccttgaccctcagccaagattggtaaagctgcgtcctggcgattccaggagacccagctggaaacctggcttctccatgtgaggggatgggaaaggaaagaagagaatgaagactacttagtaattcccatcaggaaatgctgaccttttacataaaatcaaggagactgctgaaaatctctaagggacaggattttccagatcctaattggaaatttagcaataaggagaggagtccaaggggacaaataaaggcagagagagagagagagagagggagaggaagaaaagagagagagaaaagagcctcgtgcc

SEQ ID NO: 1813 - protein, 302 aa, Homo sapiens
MCAERLGQFMTLALVLATFDPARGTDATNPPEGPQDRSSQQKGRLSLQNTAEIQHCLVNAGDVGCGVFECFENNSCEIRGLHGICMTFLHNAGKFDAQGKSFIKDALKCKAHALRHRFGCISRKCPAIREMVSQLQRECYLKHDLCAAAQENTRVIVEMIHFKDLLLHEPYVDLVNLLLTCGEEVKEAITHSVQVQCEQNWGSLCSILSFCTSAIQKPPTAPPERQPQVDRTKLSRAHHGEAGHHLPEPSSRETGRGAKGERGSKSHPNAHARGRVGGLGAQGPSGSSEWEDEQSEYSDIRR

SEQ ID NO: 1814 - DNA, 1577 bp, Homo sapiens
gcggcgccaggactgactgcgccgtggaggctgctgcagtgttgtgagttggaagctggggagctcggcatggcggtccccgctgcagccatggggccctcggcgttgggccagagcggccccggctcgatggccccgtggtgctcagtgagcagcggcccgtcgcgctacgtgcttgggatgcaggagctgttccggggccacagcaagacgcgcgagttcctggcgcacagcgccaaggtgcactcggtggcctggagttgcgacgggcgtcgcctagcctcggggtccttcgacaagacggccagcgtcttcttgctggagaaggaccggttggtcaaagaaaacaattatcggggacatggggatagtgtggaccagctttgttggcatccaagtaatcctgacctatttgttacggcgtctggagataaaaccattcgcatctgggatgtgaggactacaaaatgcattgccactgtgaacactaaaggggagaacattaatatctgctggagtcctgatgggcagaccattgctgtaggcaacaaggatgatgtggtgacctttattgatgccaagacacaccgttccaaagcagaagagcagttcaagttcgaggtcaacgaaatctcctggaacaatgacaataatatgttcttcctgacaaatggcaatggttgtatcaacatcctcagctacccagaactgaagcctgtgcagtccatcaacgcccatccttccaactgcatctgtatcaagtttgaccccatggggaagtactttgccacaggaagtgcagatgctttggtcagcctctgggatgtggatgagttagtgtgtgttcggtgcttttccaggctggattggcctgtaagaaccctcagtttcagccatgatgggaaaatgctggcgtcagcatcggaagatcattttattgacattgctgaagtggagacaggggacaaactatgggaggtacagtgtgagtctccgaccttcacagtggcgtggcaccccaaaaggcctctgctggcatttgcctgtgatgacaaagacggcaaatatgacagcagccgggaagccggaactgtgaagctgtttgggcttcctaatgattcttgagaggaggttgtagggagaggaggccccggcagaggtcttccttcatgtggttagtttggtctgttctctcggagttggtgggcaccctaaatatttgtaagttggtataaattgtaaacgtctctggtcaggctgcgcatttcgttcttttgctttgtctgtgtattagctctttccattctttgcccccagcatgagttaactcgcgtggactctgcagtgcgagtagtgaccccagcataccttgtcctctggacctcctgtcttctctgcttctgggtgcatggtagactttgtggcatttgatacaacttggacaatacctagtttggagggaggggaatggaagggcatggaagtttttttaaataattaaaaatatatacatataattttgagaattgagcatttaataaactgacttttgttattatggaaaaaaaaaaaaaaaa

SEQ ID NO: 1815 - protein, 351 aa, Homo sapiens
MAVPAAAMGPSALGQSGPGSMAPWCSVSSGPSRYVLGMQELFRGHSKTREFLAHSAKVHSVAWSCDGRRLASGSFDKTASVFLLEKDRLVKENNYRGHGDSVDQLCWHPSNPDLFVTASGDKTIRIWDVRTTKCIATVNTKGENINICWSPDGQTIAVGNKDDVVTFIDAKTHRSKAEEQFKFEVNEISWNNDNNMFFLTNGNGCINILSYPELKPVQSINAHPSNCICIKFDPMGKYFATGSADALVSLWDVDELVCVRCFSRLDWPVRTLSFSHDGKMLASASEDHFIDIAEVETGDKLWEVQCESPTFTVAWHPKRPLLAFACDDKDGKYDSSREAGTVKLFGLPNDS

SEQ ID NO: 1816 - DNA, 1024 bp, Homo sapiens
ataaactgaaagctgagcgtgaacgtggtatcaccattgatatctccttgtggaaatttgagaccagcaagtactatgtgactatcactgatgctccaggacacagagacttcatcaaaaacatgattacagggacatctcaggctgactgtgctgtcccgattgttgctgctggtgttggtgaatttgaagctggtatctctaagaatgggcagacccgagagcatgcccttctggcttacacactgggtgtgaaacaactaattgttggtgttaacaaaatggaagtcagcacttacattaagaaaattggctacaaccccgacacagtagcatttgtgccaatttctggttggaatggtaacaacatgctggagccaagtgctaacatgccttggttcaagggatggaaagtcacccgtaaggatggcaatgccagtggaaccatgctgcttgaggctctggactgcatcctaccaccaactcgtccaactgacaagccggccaaataagcgcgtggctatgccccatgtaattggattgtccacacggctacatattgcatgcaagtttgctgagctgaaggaaaagattgatcgccgttctggtaaaaagctggaagatggccctaaattcttgaagtccggtgatgctgccattgttgatatggttcctggcaagcccatgtgtgctgagagcttctcagactatccacctttgggtcgctttgctgttcgtgatatgagacacacagttgcggtgggtgtcatcaaagcagtggacaagaaggctgctggagctggcaaggtcaccaactctgcccagaaagctcagatggctaaatgaatattatccctaatacctgccaccccactcttaatcagtggtggaagaacggtctcagaactgtttgtttcaattggccatttaagtttagtagtaaaagactggtactttttaatggaaacaacttgaccaaaaatttgtcacagaattttgagacccattaaaaaagtttaatgag

SEQ ID NO: 1817 - DNA, 784 bp, Homo sapiens
gggtcagaacactggcggccgatcccaacgaggctccctggagcccgacgcagagcagcgccctggccgggccaagcaggagccggcatcatggattccttcaaagtagtgctggaggggccagcaccttggggcttccggctgcaagggggcaaggacttcaatgtgcccctctccatttcccggctcactcctgggggcaaagcggcgcaggccggagtggccgtgggtgactgggtgctgagcatcgatggcgagaatgcgggtagcctcacacacatcgaagctcagaacaagatccgggcctgcggggagcgcctcagcctgggcctcagcagggcccagccggttcagagcaaaccgcagaaggtacgaggctggccgggacatccgggcggtgggcggtgtgggcttggacggccaggcctgctcgccctcctggcacattctcggtaccccaatccctggccgggagtggagggcagaaaccggagctaaggcgggtctagggccctggagttgagccaggggctgctgcacggtcctggcaccacgcatgtccgcctgtctgtccgcctgtctgtccgcctgctgcctcccgccgccggcgctgcgtgctcgcccgcactcggtcagccctcggtcctgcgtggactgagatcgccactcccaaatgggccccttgaaacctgagtcgtcctctccccgtagcctccaaatagatgtagggggtggggtgggggtggggggctggagctgccgctgtcctctgctgcaggcgccc

SEQ ID NO: 1818 - DNA, 2083 bp, Homo sapiens
aatggaggagtcggaacccgaacggaagcgggctcgcaccgacgaggtgcctgccggaggaagccgctccgaggcggaagatgaggacgacgaggactacgtgccctatgtgccgttacggcagcgccggcagctactgctccagaagctgctgcagcgaagacgcaagggagctgcggaggaagagcagcaggacagcggtagtgaaccccggggagatgaggacgacatcccgctaggccctcagtccaacgtcagcctcctggatcagcaccagcaccttaaagagaaggctgaagcgcgcaaagagtctgccaaggagaagcagctgaaggaagaagagaagatcctggagagtgttgccgagggccgagcattgatgtcagtgaaggagatggctaagggcattacgtatgatgaccccatcaaaaccagctggactccaccccgttatgttctgagcatgtctgaagagcgacatgagcgcgtgcggaagaaataccacatcctggtggagggagacggtatcccaccacccatcaagagcttcaaggaaatgaagtttcctgcagccatcctgagaggcctgaagaagaaaggcattcaccacccaacacccattcagatccagggcatccccaccattctatctggccgtgacatgataggcatcgctttcacgggttcaggcaagacactggtgttcacgttgcccgtcatcatgttctgcctggaacaagagaagaggttacccttctcaaagcgcgaggggccctatggactcatcatctgcccctcgcgggagctggcccggcagacccatggcatcctggagtactactgccgcctgctgcaggaggacagctcaccactcctgcgctgcgccctctgcattgggggcatgtccgtgaaagagcagatggagaccatccgacacggtgtacacatgatggtggccaccccggggcgcctcatggatttgctgcagaagaagatggtcagcctagacatctgtcgctacctggccctggacgaggctgaccgcatgatcgacatgggcttcgagggtgacatccgtaccatcttctcctacttcaagggccagcgacagaccctgctcttcagtgccaccatgccgaagaagattcagaactttgctaagagtgcccttgtaaagcctgtgaccatcaatgtggggcgcgctggggctgccagcctggatgtcatccaggaggtagaatatgtgaaggaggaggccaagatggtgtacctgctcgagtgcctgcagaagacacccccgcctgtactcatctttgcagagaagaaggcagacgtggacgccatccacgagtacctgctgctcaagggggttgaggccgtagccatccatgggggcaaagaccaggaggaacggactaaggccatcgaggcattccgggagggcaagaaggatgtcctagtagccacagacgttgcctccaagggcctggacttccctgccatccagcacgtcatcaattatgacatgccagaggagattgagaactatgtacaccggattggccgcaccgggcgctcgggaaacacaggcatcgccactaccttcatcaacaaagcgtgtgatgagtcagtgctgatggacctcaaagcgctgctgctagaagccaagcagaaggtgccgcccgtgctgcaggtgctgcattgcggggatgagtccatgctggacattggaggagagcgcggctgtgccttctgcgggggcctgggtcatcggatcactgactgccccaaactcgaggctatgcagaccaagcaggtcagcaacatcggtcgcaaggactacctggcccacagctccatggacttctgagccgacagtcttcccttctctccaagaggcctcagtccccaagactgccaccagtctacacatacagcagccccctggacagaatcagcatttcagctcagctggcctgggatgggccaggctggtcctggctgcctgttccctgtgctcttcagaattactgtttttgtttccttttaccccagctgccattaaagcccaaacctctagccc

SEQ ID NO: 1819 - DNA, 791 bp, Homo sapiens
gcaagatggctgtggagctgggcgtgctgctcgtccggccccggcccggaaccgggctgggtagagtgatgcggaccctcctgctggtgctgtggctggcgacgcgcggaagcgcgctctactttcacatcggagagacggagaagaagtgctttattgaggagatcccggacgagaccatggtcataggaaactaccggacgcagctgtatgacaagcagcgggaggagtaccagccggccaccccggggcttggcatgtttgtggaggtgaaggacccagaggacaaggtcatcctggcccggcagtatggctccgagggcaggttcactttcacttcccatacccctggtgagcaccagatctgtcttcactccaattccaccaagttctccctctttgctggaggcatgctgagagttcacctggacatccaggtaggtgaacatgccaatgactatgcagaaattgctgctaaagacaagttgagtgagttgcagctacgagtgcgacagctggtggaacaagtggagcagatccagaaagagcagaactaccagcggtggcgagaggagcgcttccggcagaccagtgagagcaccaaccagcgggtgctgtggtggtccattctgcagaccctcatcctcgtggccatcggtgtctggcagatgcggcacctcaagagcttctttgaagccaagaagcttgtgtagctgtcccaggcgtcacaacccatcctcccaggctgggggaggggaatgggcaggcaagccagtcttctgtcttccttt

SEQ ID NO: 1820 - DNA, 1342 bp, Homo sapiens
gcctccgcccccgccgcggaccctccgcggtacaccttgcacccagcgtctccctctacaagacggcccggccctttggtgcgcccccgcccgctgacagcgccccgcagcagaatggacagccgctccgaccgctggtcccagatgccagcaagcagcggctgatggagaacacagaggactggcggccgcggccggggacaggccagtcgcgttccttccgcatccttgcccacctcacaggcaccgagttcatgcaagacccggatgaggagcacctgaagaaatcaagccaggtgcccaggacagaagccccagccccagcctcatctacaccccaggagccctggcctggccctaccgcccccagccctaccagccgcccgccctgggctgtggaccctgcgtttgccgagcgctatgccccggacaaaacgagcacagtgctgacccggcacagccagccggccacgcccacgccgctgcagagccgcacctccattgtgcaggcagctgccggaggggtgccaggagggggcagcaacaacggcaagactcccgtgtgtcaccagtgccacaaggtcatccggggccgctacctggtggcgctgggccacgcgtaccacccggaggagtttgtgtgtagccagtgtgggaaggtcctggaagagggtggcttctttgaggagaagggcgccatcttctgcccaccatgctatgacgtgcgctatgcacccagctgtgccaagtgcaagaagaagattacaggcgagatcatgcacgccctgaagatgacctggcacgtgcactgctttacctgtgctgcctgcaagacgcccatccggaacagggccttctacatggaggagggcgtgccctattgcgagcgagactatgagaagatgtttggcacgaaatgccatggctgtgacttcaagatcgacgctggggaccgcttcctggaggccctgggcttcagctggcatgacacctgcttcgtctgtgcgatatgtcagatcaacctggaaggaaagaccttctactccaagaaggacaggcctctctgcaagagccatgccttctctcatgtgtgagccccttctgcccacagctgccgcggtggcccctagcctgaggggcctggagtcgtggccctgcatttctgggtagggctggcaatggttgccttaaccctggctcctggcccgagcctggggctccctgggccctgccccacccaccttatcctcccaccccactccctccaccaccacagcacaccggtgctggccacaccagccccctttcacctccagtgccacaataaacctgtacccagctg

SEQ ID NO: 1821 - DNA, 1413 bp, Homo sapiens
aggtggagcaagatggctgtggagctgggcgtgctgctcgtccggccccggcccggaaccgggctgggtagagtgatgcggaccctcctgctggtgctgtggctggcgacgcgcggaagcgcgctctactttcacatcggagagacggagaagaagtgctttattgaggagatcccggacgagaccatggtcataggaaactaccggacgcagctgtatgacaagcagcgggaggagtaccagccggccaccccggggcttggcatgtttgtggaggtgaaggacccagaggacaaggtcatcctggcccggcagtatggctccgagggcaggttcactttcacttcccatacccctggtgagcaccagatctgtcttcactccaattccaccaagttctccctctttgctggaggcatgctgagagttcacctggacatccaggtaggtgaacatgccaatgactatgcagaaattgctgctaaagacaagttgagtgagttgcagctacgagtgcgacagctggtggaacaagtggagcagatccagaaagagcagaactaccagcggtggcgagaggagcgcttccggcagaccagtgagagcaccaaccagcgggtgctgtggtggtccattctgcagaccctcatcctcgtggccatcggtgtctggcagatgcggcacctcaagagcttctttgaagccaagaagcttgtgtagctgtcccaggcgtcacaacccatcctcccaggctgggggagaaaggacctcctggaactgacttcttctgtcaggaggactggtttccagccatacctgttctggaagggagaggggctggaggcacccacaggcacaagctgaaggcagcagcttggctaatactgagcaggtagtggggcaaattcctgccctctctctctggcctctgggccgtttggtagtaatcacccaggggctggtaaagcccctcctcttggcacctcagaatcacagtgttactgatcagggatgtgaggctgctgttgggggtggggggaggggaatgggcaggcaagccagtcttctgtcttcctttgctaacttagggttttgagcaggttggggtatggtgcctgtcatacccacctgccaccctgggaacctcactgttctctctttcagcctagacctgctgatccagggtgtgtgtgagttgagggtgggtggaggggtttgcagtgtgggaatgtggccctgcagttgacctgagctgcttcacatggttgtccattctggggcttaaagaactgggaccagaccaagtagaggccttggtgctggttggggtggggcctgcagagtcttagttactgatttcattttcaataaatgtaggtttgttacatgagtttcccaataaaaaaaaaaatg

SEQ ID NO: 1822 - protein, 214 aa, Homo sapiens [sequence omitted]

SEQ ID NO: 1823 - DNA, 2083 bp, Homo sapiens
aatggaggagtcggaacccgaacggaagcgggctcgcaccgacgaggtgcctgccggaggaagccgctccgaggcggaagatgaggacgacgaggactacgtgccctatgtgccgttacggcagcgccggcagctactgctccagaagctgctgcagcgaagacgcaagggagctgcggaggaagagcagcaggacagcggtagtgaaccccggggagatgaggacgacatcccgctaggccctcagtccaacgtcagcctcctggatcagcaccagcaccttaaagagaaggctgaagcgcgcaaagagtctgccaaggagaagcagctgaaggaagaagagaagatcctggagagtgttgccgagggccgagcattgatgtcagtgaaggagatggctaagggcattacgtatgatgaccccatcaaaaccagctggactccaccccgttatgttctgagcatgtctgaagagcgacatgagcgcgtgcggaagaaataccacatcctggtggagggagacggtatcccaccacccatcaagagcttcaaggaaatgaagtttcctgcagccatcctgagaggcctgaagaagaaaggcattcaccacccaacacccattcagatccagggcatccccaccattctatctggccgtgacatgataggcatcgctttcacgggttcaggcaagacactggtgttcacgttgcccgtcatcatgttctgcctggaacaagagaagaggttacccttctcaaagcgcgaggggccctatggactcatcatctgcccctcgcgggagctggcccggcagacccatggcatcctggagtactactgccgcctgctgcaggaggacagctcaccactcctgcgctgcgccctctgcattgggggcatgtccgtgaaagagcagatggagaccatccgacacggtgtacacatgatggtggccaccccggggcgcctcatggatttgctgcagaagaagatggtcagcctagacatctgtcgctacctggccctggacgaggctgaccgcatgatcgacatgggcttcgagggtgacatccgtaccatcttctcctacttcaagggccagcgacagaccctgctcttcagtgccaccatgccgaagaagattcagaactttgctaagagtgcccttgtaaagcctgtgaccatcaatgtggggcgcgctggggctgccagcctggatgtcatccaggaggtagaatatgtgaaggaggaggccaagatggtgtacctgctcgagtgcctgcagaagacacccccgcctgtactcatctttgcagagaagaaggcagacgtggacgccatccacgagtacctgctgctcaagggggttgaggccgtagccatccatgggggcaaagaccaggaggaacggactaaggccatcgaggcattccgggagggcaagaaggatgtcctagtagccacagacgttgcctccaagggcctggacttccctgccatccagcacgtcatcaattatgacatgccagaggagattgagaactatgtacaccggattggccgcaccgggcgctcgggaaacacaggcatcgccactaccttcatcaacaaagcgtgtgatgagtcagtgctgatggacctcaaagcgctgctgctagaagccaagcagaaggtgccgcccgtgctgcaggtgctgcattgcggggatgagtccatgctggacattggaggagagcgcggctgtgccttctgcgggggcctgggtcatcggatcactgactgccccaaactcgaggctatgcagaccaagcaggtcagcaacatcggtcgcaaggactacctggcccacagctccatggacttctgagccgacagtcttcccttctctccaagaggcctcagtccccaagactgccaccagtctacacatacagcagccccctggacagaatcagcatttcagctcagctggcctggaatgggccaggctggtcctggctgcctgttccctgtgctcttcagaattactgtttttgtttccttttaccccagctgccattaaagcccaaacctctagccc

SEQ ID NO: 1824 - DNA, 1689 bp, Homo sapiens
cccaacgaggctccctggagcccgacgcagagcagcgccctggccgggccaagcaggagccggcatcatggattccttcaaagtagtgctggaggggccagcaccttggggcttccggctgcaagggggcaaggacttcaatgtgcccctctccatttcccggctcactcctgggggcaaagcggcgcaggccggagtggccgtgggtgactgggtgctgagcatcgatggcgagaatgcgggtagcctcacacacatcgaagctcagaacaagatccgggcctgcggggagcgcctcagcctgggcctcagcagggcccagccggttcagagcaaaccgcagaaggcctccgcccccgccgcggaccctccgcggtacacctttgcacccagcgtctccctcaacaagacggcccggccctttggggcgcccccgcccgctgacagcgccccgcagcagaatggacagccgctccgaccgctggtcccagatgccagcaagcagcggctgatggagaacacagaggactggcggccgcggccggggacaggccagtcgcgttccttccgcatccttgcccacctcacaggcaccgagttcatgcaagacccggatgaggagcacctgaagaaatcaagccaggtgcccaggacagaagccccagccccagcctcatctacaccccaggagccctggcctggccctaccgcccccagccctaccagccgcccgccctgggctgtggaccctgcgtttgccgagcgctatgccccggacaaaacgagcacagtgctgacccggcacagccagccggccacgcccacgccgctgcagagccgcacctccattgtgcaggcagctgccggaggggtgccaggagggggcagcaacaacggcaagactcccgtgtgtcaccagtgccacaaggtcatccggggccgctacctggtggcgctgggccacgcgtaccacccggaggagtttgtgtgtagccagtgtgggaaggtcctggaagagggtggcttctttgaggagaagggcgccatcttctgcccaccatgctatgacgtgcgctatgcacccagctgtgccaagtgcaagaagaagattacaggcgagatcatgcacgccctgaagatgacctggcacgtgcactgctttacctgtgctgcctgcaagacgcccatccggaacagggccttctacatggaggagggcgtgccctattgcgagcgagactatgagaagatgtttggcacgaaatgccatggctgtgacttcaagatcgacgctggggaccgcttcctggaggccctgggcttcagctggcatgacacctgcttcgtctgtgcgatatgtcagatcaacctggaaggaaagaccttctactccaagaaggacaggcctctctgcaagagccatgccttctctcatgtgtgagccccttctgcccacagctgccgcggtggcccctagcctgaggggcctggagtcgtggccctgcatttctgggtagggctggcaatggttgccttaaccctggctcctggcccgagcctggggctccctgggccctgccccacccaccttatcctcccaccccactccctccaccaccacagcacaccggtgctggccacaccagccccctttcacctccagtgccacaataaacctgtacccagctg

SEQ ID NO: 1825 - protein, 457 aa, Homo sapiens
MDSFKVVLEGPAPWGFRLQGGKDFNVPLSISRLTPGGKAAQAGVAVGDWVLSIDGENAGSLTHIEAQNKIRACGERLSLGLSRAQPVQSKPQKASAPAADPPRYTFAPSVSLNKTARPFGAPPPADSAPQQNGQPLRPLVPDASKQRLMENTEDWRPRPGTGQSRSFRILAHLTGTEFMQDPDEEHLKKSSQVPRTEAPAPASSTPQEPWPGPTAPSPTSRPPWAVDPAFAERYAPDKTSTVLTRHSQPATPTPLQSRTSIVQAAAGGVPGGGSNNGKTPVCHQCHKVIRGRYLVALGHAYHPEEFVCSQCGKVLEEGGFFEEKGAIFCPPCYDVRYAPSCAKCKKKITGEIMHALKMTWHVHCFTCAACKTPIRNRAFYMEEGVPYCERDYEKMFGTKCHGCDFKIDAGDRFLEALGFSWHDTCFVCAICQINLEGKTFYSKKDRPLCKSHAFSHV

SEQ ID NO: 1826 - DNA, 1510 bp, Homo sapiens
gggggcgcgcgccccgcgcctccagcccagcgctcggagccgctttcgctgccactgtctgctcccccgggccgccgccgcctccccccgcaggcccggggctctgtccgctgggcccgcgctgctcgccccgggccaggagaacgagctcgaggaggatgcctgggcccggtgcaaggttccccctctcacccgcagctgtggagaggaggaagcggaactagagatgcccatctggagtgagtgcaggaccaggtcccgcgcggccccgggtgaggcacgcccgcgcgcccgccggcgccatgggaaggagcgggcgccgctgctgtcccccgccggcgcgcgcacgacttgagacctgccacgggcagcccccggccgcgggtccccgagtgacgctggcggcacctgagagtgtggcgcgggcccggggccacgcagcggagcccagtgtccagtgaagcgtctgaggacccgccgcccgtgccgccgccatggtgatgtcccagggcacctacacgttcctcacgtgcttcgccggcttctggctcatctggggtctcatcgtcctgctctgctgcttctgcagcttcctgcgccgccgcctcaaacggcgccaggaggagcgactgcgcgagcagaacctgcgcgccctagagctggagcccctcgaactcgagggcagtctggccgggagtcccccgggcctggcgccgccgcagccaccaccacaccgtagccgcctggaggcgccggctcacgcgcactcgcatccgcacgtgcacgtgcacccgctgctgcaccacgggcccgcgcagccgcacgcgcacgcgcacccacacccgcaccaccacgcgctcccgcacccgccgcctacgcacctgtcggtgccgccacggccctggagctacccgcgccaagcggaatcggacatgtccaaaccaccgtgttacgaagaggcggtgctgatggcagagccgccgccgccctatagcgaggtgctcacggacacgcgcggcctctaccgcaagatcgtcacgcccttcctgagtcgccgcgacagcgcggagaagcaggagcagccgcctcccagctacaagccgctcttcctggaccggggctacacctcggcgctgcacctgcccagcgcccctcggcccgcgccgccctgcccagccctctgcctgcaggccgaccgtggccgccgggtcttccccagctggaccgactcagagctcagcagccgcgagcccctggagcacggagcttggcgtctgccggtctccatccccttgttcgggaggactacagccgtatagaggggcgcccggcgccccgggccccaccggcggactcctggcctgactgcggggctttttaaatgcttccctggactgcggggaggggcggggggagggagggatttcttatcccgtttgttacattttgaggataataaaggtgtgtgatctggtttggtgaaaaaaaaaaaaaaaaaaaaaaaaaaaaa

SEQ ID NO: 1827 - protein, 274 aa, Homo sapiens
MVMSQGTYTFLTCFAGFWLIWGLIVLLCCFCSFLRRRLKRRQEERLREQNLRALELEPLELEGSLAGSPPGLAPPQPPPHRSRLEAPAHAHSHPHVHVHPLLHHGPAQPHAHAHPHPHHHALPHPPPTHLSVPPRPWSYPRQAESDMSKPPCYEEAVLMAEPPPPYSEVLTDTRGLYRKIVTPFLSRRDSAEKQEQPPPSYKPLFLDRGYTSALHLPSAPRPAPPCPALCLQADRGRRVFPSWTDSELSSREPLEHGAWRLPVSIPLFGRTTAV

SEQ ID NO: 1828 - DNA, 2048 bp, Homo sapiens
ctattgatctggactcctggataggcagctggaccaacggacggacgccatgagggctctgctgctcctggggttcctgctggtgagcttggagtcaacactttcgattccaccttgggaagcccccaaggagcataagtacaaagctgaagagcacacagtcgttctcactgtcaccggggagccctgccacttccccttccagtaccaccggcagctgtaccacaaatgtacccacaagggccggccaggccctcagccctggtgtgctaccacccccaactttgatcaggaccagcgatggggatactgtttggagcccaagaaagtgaaagaccactgcagcaaacacagcccctgccagaaaggagggacctgtgtgaacatgccaagcggcccccactgtctctgtccacaacacctcactggaaaccactgccagaaagagaagtgctttgagcctcagcttctccggtttttccacaagaatgagatatggtatagaactgagcaagcagctgtggccagatgccagtgcaagggtcctgatgcccactgccagcggctggccagccaggcctgccgcaccaacccgtgcctccatgggggtcgctgcctagaggtggagggccaccgcctgtgccactgcccggtgggctacaccggacccttctgcgacgtggacaccaaggcaagctgctatgatggccgcgggctcagctaccgcggcctggccaggaccacgctctcgggtgcgccctgtcagccgtgggcctcggaggccacctaccggaacgtgactgccgagcaagcgcggaactggggactgggcggccacgccttctgccggaacccggacaacgacatccgcccgtggtgcttcgtgctgaaccgcgaccggctgagctgggagtactgcgacctggcacagtgccagaccccaacccaggcggcgcctccgaccccggtgtcccctaggcttcatgtcccactcatgcccgcgcagccggcaccgccgaagcctcagcccacgacccggaccccgcctcagtcccagaccccgggagccttgccggcgaagcgggagcagccgccttccctgaccaggaacggcccactgagctgcgggcagcggctccgcaagagtctgtcttcgatgacccgcgtcgttggcgggctggtggcgctacgcggggcgcacccctacatcgccgcgctgtactggggccacagtttctgcgccggcagcctcatcgccccctgctgggtgctgacggccgctcactgcctgcaggaccggcccgcacccgaggatctgacggtggtgctcggccaggaacgccgtaaccacagctgtgagccgtgccagacgttggccgtgcgctcctaccgcttgcacgaggccttctcgcccgtcagctaccagcacgacctggctctgttgcgccttcaggaggatgcggacggcagctgcgcgctcctgtcgccttacgttcagccggtgtgcctgccaagcggcgccgcgcgaccctccgagaccacgctctgccaggtggccggctggggccaccagttcgagggggcggaggaatatgccagcttcctgcaggaggcgcaggtaccgttcctctccctggagcgctgctcagccccggacgtgcacggatcctccatcctccccggcatgctctgcgcagggttcctcgagggcggcaccgatgcgtgccagggtgattccggaggcccgctggtgtgtgaggaccaagctgcagagcgccggctcaccctgcaaggcatcatcagctggggatcgggctgtggtgaccgcaacaagccaggcgtctacaccgatgtggcctactacctggcctggatccgggagcacaccgtttcctgattgctcagggactcatctttccctccttggtgattccgcagtgagagagtggctggggcatggaaggcaagattgtgtcccattcccccagtgcggccagctccgcgccaggatggcgaggaactcaataaagtgctttgaaaatgctgag

SEQ ID NO: 1829 - protein, 615 aa, Homo sapiens
MRALLLLGFLLVSLESTLSIPPWEAPKEHKYKAEEHTVVLTVTGEPCHFPFQYHRQLYHKCTHKGRPGPQPWCATTPNFDQDQRWGYCLEPKKVKDHCSKHSPCQKGGTCVNMPSGPHCLCPQHLTGNHCQKEKCFEPQLLRFFHKNEIWYRTEQAAVARCQCKGPDAHCQRLASQACRTNPCLHGGRCLEVEGHRLCHCPVGYTGPFCDVDTKASCYDGRGLSYRGLARTTLSGAPCQPWASEATYRNVTAEQARNWGLGGHAFCRNPDNDIRPWCFVLNRDRLSWEYCDLAQCQTPTQAAPPTPVSPRLHVPLMPAQPAPPKPQPTTRTPPQSQTPGALPAKREQPPSLTRNGPLSCGQRLRKSLSSMTRVVGGLVALRGAHPYIAALYWGHSFCAGSLIAPCWVLTAAHCLQDRPAPEDLTVVLGQERRNHSCEPCQTLAVRSYRLHEAFSPVSYQHDLALLRLQEDADGSCALLSPYVQPVCLPSGAARPSETTLCQVAGWGHQFEGAEEYASFLQEAQVPFLSLERCSAPDVHGSSILPGMLCAGFLEGGTDACQGDSGGPLVCEDQAAERRLTLQGIISWGSGCGDRNKPGVYTDVAYYLAWIREHTVS

SEQ ID NO: 1830 - DNA, 1407 bp, Homo sapiens
atggcggcggaaggctggatttggcgttggggctggggccggcggtgcctgggaaggcctgggcttctcggccccggccctggccccactacacctctctttcttcttttgttgttggggtctgtgactgcggatataactgacggcaacagtgaacatctcaagcgggagcattcgctcattaagccctaccaaggggtcggttccagctctatgcccctctgggacttccagggcagcactatgctcacgagccagtacgtacgtctgacccctgacgagcgcagcaaagagggctctatctggaaccaccagccgtgcttcctcaaagactgggaaatgcacgtccacttcaaagtccacggcacagggaagaagaacctccatggagacggcatcgccttgtggtacacccgggaccgcctcgtgccagggcctgtgtttggaagcaaagataacttccacggcttagccatcttcctggacacctaccccaatgatgagaccactgagcgcgtgttcccgtacatctcggtgatggtgaacaatggctccctgtcctacgaccacagcaaggatgggcgctggaccgagctggcgggctgcacggctgacttccgcaaccgcgatcacgacaccttcctggctgtgcgctactcccggggccgtctgacggtgatgaccgacctggaggacaagaacgagtggaagaactgcattgacatcacgggagtgcgcctgcccaccggctactacttcggggcctccgccggcaccggcgacctgtctgacaatcatgacatcatctccatgaagctgttccagctgatggtggagcacacgcccgacgaggagagcatcgactggaccaagatcgagcccagcgtcaacttcctcaagtcgcccaaagacaacgtggacgaccccacggggaacttccgcagcgggcccctgacggggtggcgggtgttcctgctgctgctgtgcgctctcctgggcatcgttgtctgcgccgtggtgggggccgtggtgttccagaagcggcaggagcggaacaagcgcttctactgagtggcgcctccggcggggcctgtccctgggcccaggagccaatgtgaacttttttttttaccgggattataaaagaacaacaagatgaccttatttcttaactgtttcaaataaatgattaaagtattttcatacattttgcttcttgcccagcagggacaggtggcagagccgaggcttagggtctggcaccccccacagctggagacggaggctctcctggggctggtgtctcaggagcaggggtctgtgtctacagatgggctgtggcccctgcaggcagctgttgaacactggagggtcccccggaccacactggggtgggctcctgaggac

SEQ ID NO: 1831 - protein, 356 aa, Homo sapiens
MAAEGWIWRWGWGRRCLGRPGLLGPGPGPTTPLFLLLLLGSVTADITDGNSEHLKREHSLIKPYQGVGSSSMPLWDFQGSTMLTSQYVRLTPDERSKEGSIWNHQPCFLKDWEMHVHFKVHGTGKKNLHGDGIALWYTRDRLVPGPVFGSKDNFHGLAIFLDTYPNDETTERVFPYISVMVNNGSLSYDHSKDGRWTELAGCTADFRNRDHDTFLAVRYSRGRLTVMTDLEDKNEWKNCIDITGVRLPTGYYFGASAGTGDLSDNHDIISMKLFQLMVEHTPDEESIDWTKIEPSVNFLKSPKDNVDDPTGNFRSGPLTGWRVFLLLLCALLGIVVCAVVGAVVFQKRQERNKRFY

SEQ ID NO: 1832 - DNA, 1091 bp, Homo sapiens
ggcacgagggcttgctccggccggcaccctaggccggcccgccgccagctgtcgccgacatggaacccttggccagcaacatccaggtcctgctgcaggcggccgagttcctggagcgccgtgagagagaggccgagcatggttatgcgtccctgtgcccgcatcgcagtccaggccccatccacaggaggaagaagcgacccccccaggctcctggcgcgcaggacagcgggcggtcagtgcacaatgaactggagaagcgcaggagggcccagttgaagcggtgcctggagcggctgaagcagcagatgcccctgggggccgactgtgcccggtacaccacgctgagcctgctgcgccgtgccaggatgcacatccagaagctggaggatcaggagcagcgggcccgacagctcaaggagaggctgcgcagcaagcagcagagcctgcagcggcagctggagcagctccgggggctggcaggggcggccgagcgggagcggctgcgggcggacagtctggactcctcaggcctctcctctgagcgctcagactcagaccaagaggagctggaggtggatgtggagagcctggtgtttgggggtgaggccgagctgctgcggggcttcgtcgccggccaggagcacagctactcgcacggcggcggcgcctggctatgatgttcctcacccagggcgggcctctgccctctactcgtgccaggcccacttgccaggcaggagccctccccaagccttcagggctgctcggagtcacctgttggaatggactaaaaggacccttgtgtgggaacaggtgctccccaaacaccctgctgctggctgccaggcaggccctctggaagggaaggggcaggactcatcaggacctccctggacccctgcagggcaggcagcttgggcccgagcccaagcatttggctctgctgcccccaaggggacaggaagcctcttgggcctcttcccttcctggacaaggccccctgcctttgcctcacataaactgtacagtattttcattaaaagcctctttcataaaaaaaaaaaaaaaaaaaaaaaaaaaaaaaaaaa

SEQ ID NO: 1833 - protein, 206 aa, Homo sapiens
MEPLASNIQVLLQAAEFLERREREAEHGYASLCPHRSPGPIHRRKKRPPQAPGAQDSGRSVHNELEKRRRAQLKRCLERLKQQMPLGADCARYTTLSLLRRARMHIQKLEDQEQRARQLKERLRSKQQSLQRQLEQLRGLAGAAERERLRADSLDSSGLSSERSDSDQEELEVDVESLVFGGEAELLRGFVAGQEHSYSHGGGAWL

SEQ ID NO: 1834 - DNA, 1217 bp, Homo sapiens
caactcatggcggcggcggcggcggcggcagctgcttgggcgcggtgcggtggtgactgagctacgagcctggcggcgggtgtgcgccgagccccggcccggcccggccctcgcgtgcctcccaggctccgcacccctgatgctgcgcgggtgctgagcccgcttcggccgggacgatggtgaagtatttcctgggccagagcgtgctccggagttcctgggaccaagtgttcgccgccttctggcagcggtacccgaatccctatagcaaacatgtcttgacggaagacatagtacaccgggaggtgacccctgaccagaaactgctgtcccggcgactcctgaccaagaccaacaggatgccacgctgggccgagcgactatttcctgccaatgttgctcactcggtgtacgtcctggaggactctattgtggacccacagaatcagaccatgactaccttcacctggaacatcaaccacgcccggctgatggtggtggaggaacgatgtgtttactgtgtgaactctgacaacagtggctggactgaaatccgccgggaagcctgggtctcctctagcttatttggtgtctccagagctgtccaggaatttggtcttgcccggttcaaaagcaacgtgaccaagactatgaagggttttgaatatatcttggctaagctgcaaggcgaggccccttccaaaacacttgttgagacagccaaggaagccaaggagaaggcaaaggagacggcactggcagctacagagaaggccaaggacctcgccagcaaggcggccaccaagaagcagcagcagcagcaacagtttgtgtagccagtctaccaccaccacagcaccccagacagctaggcttagcccctctgccctcccttcattgtactttatcattaaaaatcaacttccagccctgtctgctgtctacgtggtgggttgtggggatgcagtttggcatctgcagtacaccaagcacatgattcatgtctgagccaggtctgcttattctcccattgggcagctgaggaccgaggcacagaggtgcggtgacttgcccggggctccaggtagcctgcaggttaactggcggtaagtgctagactgtaagcccgacaagggcagggcttttggttttgttctctgatgtgtctcagtatctagcacataatagacactcaataaatacttgttgaattcaaa

SEQ ID NO: 1835 - protein, 219 aa, Homo sapiens
MVKYFLGQSVLRSSWDQVFAAFWQRYPNPYSKHVLTEDIVHREVTPDQKLLSRRLLTKTNRMPRWAERLFPANVAHSVYVLEDSIVDPQNQTMTTFTWNINHARLMVVEERCVYCVNSDNSGWTEIRREAWVSSSLFGVSRAVQEFGLARFKSNVTKTMKGFEYILAKLQGEAPSKTLVETAKEAKEKAKETALAATEKAKDLASKAATKKQQQQQQFV

SEQ ID NO: 1836 - DNA, 3015 bp, Homo sapiens
ccgaggagcgctcgggctgtctgcggaccctgccgcgtgcaggggtcgcggccggctggagctgggagtgaggcggcggaggagccaggtgaggaggagccaggaaggcagttggtgggaagtccagcttgggtccctgagagctgtgagaaggagatgcggctgctgctggccctgttgggggtcctgctgagtgtgcctgggcctccagtcttgtccctggaggcctctgaggaagtggagcttgagccctgcctggctcccagcctggagcagcaagagcaggagctgacagtagcccttgggcagcctgtgcggctgtgctgtgggcgggctgagcgtggtggccactggtacaaggagggcagtcgcctggcacctgctggccgtgtacggggctggaggggccgcctagagattgccagcttcctacctgaggatgctggccgctacctctgcctggcacgaggctccatgatcgtcctgcagaatctcaccttgattacaggtgactccttgacctccagcaacgatgatgaggaccccaagtcccatagggacctctcgaataggcacagttacccccagcaagcaccctactggacacacccccagcgcatggagaagaaactgcatgcagtacctgcggggaacaccgtcaagttccgctgtccagctgcaggcaaccccacgcccaccatccgctggcttaaggatggacaggcctttcatggggagaaccgcattggaggcattcggctgcgccatcagcactggagtctcgtgatggagagcgtggtgccctcggaccgcggcacatacacctgcctggtagagaacgctgtgggcagcatccgctataactacctgctagatgtgctggagcggtccccgcaccggcccatcctgcaggccgggctcccggccaacaccacagccgtggtgggcagcgacgtggagctgctgtgcaaggtgtacagcgatgcccagccccacatccagtggctgaagcacatcgtcatcaacggcagcagcttcggagccgacggtttcccctatgtgcaagtcctaaagactgcagacatcaatagctcagaggtggaggtcctgtacctgcggaacgtgtcagccgaggacgcaggcgagtacacctgcctcgcaggcaattccatcggcctctcctaccagtctgcctggctcacggtgctgccagaggaggaccccacatggaccgcagcagcgcccgaggccaggtatacggacatcatcctgtacgcgtcgggctccctggccttggctgtgctcctgctgctggccgggctgtatcgagggcaggcgctccacggccggcacccccgcccgcccgccactgtgcagaagctctcccgcttccctctggcccgacagttctccctggagtcaggctcttccggcaagtcaagctcatccctggtacgaggcgtgcgtctctcctccagcggccccgccttgctcgccggcctcgtgagtctagatctacctctcgacccactatgggagttcccccgggacaggctggtgcttgggaagcccctaggcgagggctgctttggccaggtagtacgtgcagaggcctttggcatggaccctgcccggcctgaccaagccagcactgtggccgtcaagatgctcaaagacaacgcctctgacaaggacctggccgacctggtctcggagatggaggtgatgaagctgatcggccgacacaagaacatcatcaacctgcttggtgtctgcacccaggaagggcccctgtacgtgatcgtggagtgcgccgccaagggaaacctgcgggagttcctgcgggcccggcgccccccaggccccgacctcagccccgacggtcctcggagcagtgaggggccgctctccttcccagtcctggtctcctgcgcctaccaggtggcccgaggcatgcagtatctggagtcccggaagtgtatccaccgggacctggctgcccgcaatgtgctggtgactgaggacaatgtgatgaagattgctgactttgggctggcccgcggcgtccaccacattgactactataagaaaaccagcaacggccgcctgcctgtgaagtggatggcgcccgaggccttgtttgaccgggtgtacacacaccagagtgacgtgtggtcttttgggatcctgctatgggagatcttcaccctcgggggctccccgtatcctggcatcccggtggaggagctgttctcgctgctgcgggagggacatcggatggaccgacccccacactgccccccagagctgtacgggctgatgcgtgagtgctggcacgcagcgccctcccagaggcctaccttcaagcagctggtggaggcgctggacaaggtcctgctggccgtctctgaggagtacctcgacctccgcctgaccttcggaccctattccccctctggtggggacgccagcagcacctgctcctccagcgattctgtcttcagccacgaccccctgccattgggatccagctccttccccttcgggtctggggtgcagacatgagcaaggctcaaggctgtgcaggcacataggctggtggccttgggccttggggctcagccacagcctgacacagtgctcgaccttgatagcatggggcccctggcccagagttgctgtgccgtgtccaagggccgtgcccttgcccttggagctgccgtgcctgtgtcctgatggcccaaatgtcagggttctgctcggcttcttggaccatggcgcttagtccccatcccgggtttggctgagcctggctggagagctgctatgctaaacctcctgcctcccaataccagcaggaggttctgggcctctgaaccccctttccccacacctccccctgctgctgctgccccagcgtcttgacgggagcattggcccctgagcccagagaagctggaagcctgccgaaaacaggagcaaatggcgttttataaattatttttttgaaataaa

SEQ ID NO: 1837 - protein, 802 aa, Homo sapiens
MRLLLALLGVLLSVPGPPVLSLEASEEVELEPCLAPSLEQQEQELTVALGQPVRLCCGRAERGGHWYKEGSRLAPAGRVRGWRGRLEIASFLPEDAGRYLCLARGSMIVLQNLTLITGDSLTSSNDDEDPKSHRDLSNRHSYPQQAPYWTHPQRMEKKLHAVPAGNTVKFRCPAAGNPTPTIRWLKDGQAFHGENRIGGIRLRHQHWSLVMESVVPSDRGTYTCLVENAVGSIRYNYLLDVLERSPHRPILQAGLPANTTAVVGSDVELLCKVYSDAQPHIQWLKHIVINGSSFGADGFPYVQVLKTADINSSEVEVLYLRNVSAEDAGEYTCLAGNSIGLSYQSAWLTVLPEEDPTWTAAAPEARYTDIILYASGSLALAVLLLLAGLYRGQALHGRHPRPPATVQKLSRFPLARQFSLESGSSGKSSSSLVRGVRLSSSGPALLAGLVSLDLPLDPLWEFPRDRLVLGKPLGEGCFGQVVRAEAFGMDPARPDQASTVAVKMLKDNASDKDLADLVSEMEVMKLIGRHKNIINLLGVCTQEGPLYVIVECAAKGNLREFLRARRPPGPDLSPDGPRSSEGPLSFPVLVSCAYQVARGMQYLESRKCIHRDLAARNVLVTEDNVMKIADFGLARGVHHIDYYKKTSNGRLPVKWMAPEALFDRVYTHQSDVWSFGILLWEIFTLGGSPYPGIPVEELFSLLREGHRMDRPPHCPPELYGLMRECWHAAPSQRPTFKQLVEALDKVLLAVSEEYLDLRLTFGPYSPSGGDASSTCSSSDSVFSHDPLPLGSSSFPFGSGVQT

SEQ ID NO: 1838 - DNA, 2895 bp, Homo sapiens
ccgaggagcgctcgggctgtctgcggaccctgccgcgtgcaggggtcgcggccggctggagctgggagtgaggcggcggaggagccaggtgaggaggagccaggaaggcagttggtgggaagtccagcttgggtccctgagagctgtgagaaggagatgcggctgctgctggccctgttgggggtcctgctgagtgtgcctgggcctccagtcttgtccctggaggcctctgaggaagtggagcttgagccctgcctggctcccagcctggagcagcaagagcaggagctgacagtagcccttgggcagcctgtgcggctgtgctgtgggcgggctgagcgtggtggccactggtacaaggagggcagtcgcctggcacctgctggccgtgtacggggctggaggggccgcctagagattgccagcttcctacctgaggatgctggccgctacctctgcctggcacgaggctccatgatcgtcctgcagaatctcaccttgattacaggtgactccttgacctccagcaacgatgatgaggaccccaagtcccatagggacctctcgaataggcacagttacccccagcaagcaccctactggacacacccccagcgcatggagaagaaactgcatgcagtacctgcggggaacaccgtcaagttccgctgtccagctgcaggcaaccccacgcccaccatccgctggcttaaggatggacaggcctttcatggggagaaccgcattggaggcattcggctgcgccatcagcactggagtctcgtgatggagagcgtggtgccctcggaccgcggcacatacacctgcctggtagagaacgctgtgggcagcatccgctataactacctgctagatgtgctggagcggtccccgcaccggcccatcctgcaggccgggctcccggccaacaccacagccgtggtgggcagcgacgtggagctgctgtgcaaggtgtacagcgatgcccagccccacatccagtggctgaagcacatcgtcatcaacggcagcagcttcggagccgacggtttcccctatgtgcaagtcctaaagactgcagacatcaatagctcagaggtggaggtcctgtacctgcggaacgtgtcagccgaggacgcaggcgagtacacctgcctcgcaggcaattccatcggcctctcctaccagtctgcctggctcacggtgctgccaggtactgggcgcatcccccacctcacatgtgacagcctgactccagcaggcagaaccaagtctcccactttgcagttctccctggagtcaggctcttccggcaagtcaagctcatccctggtacgaggcgtgcgtctctcctccagcggccccgccttgctcgccggcctcgtgagtctagatctacctctcgacccactatgggagttcccccgggacaggctggtgcttgggaagcccctaggcgagggctgctttggccaggtagtacgtgcagaggcctttggcatggaccctgcccggcctgaccaagccagcactgtggccgtcaagatgctcaaagacaacgcctctgacaaggacctggccgacctggtctcggagatggaggtgatgaagctgatcggccgacacaagaacatcatcaacctgcttggtgtctgcacccaggaagggcccctgtacgtgatcgtggagtgcgccgccaagggaaacctgcgggagttcctgcgggcccggcgccccccaggccccgacctcagccccgacggtcctcggagcagtgaggggccgctctccttcccagtcctggtctcctgcgcctaccaggtggcccgaggcatgcagtatctggagtcccggaagtgtatccaccgggacctggctgcccgcaatgtgctggtgactgaggacaatgtgatgaagattgctgactttgggctggcccgcggcgtccaccacattgactactataagaaaaccagcaacggccgcctgcctgtgaagtggatggcgcccgaggccttgtttgaccgggtgtacacacaccagagtgacgtgtggtcttttgggatcctgctatgggagatcttcaccctcgggggctccccgtatcctggcatcccggtggaggagctgttctcgctgctgcgggagggacatcggatggaccgacccccacactgccccccagagctgtacgggctgatgcgtgagtgctggcacgcagcgccctcccagaggcctaccttcaagcagctggtggaggcgctggacaaggtcctgctggccgtctctgaggagtacctcgacctccgcctgaccttcggaccctattccccctctggtggggacgccagcagcacctgctcctccagcgattctgtcttcagccacgaccccctgccattgggatccagctccttccccttcgggtctggggtgcagacatgagcaaggctcaaggctgtgcaggcacataggctggtggccttgggccttggggctcagccacagcctgacacagtgctcgaccttgatagcatggggcccctggcccagagttgctgtgccgtgtccaagggccgtgcccttgcccttggagctgccgtgcctgtgtcctgatggcccaaatgtcagggttctgctcggcttcttggaccatggcgcttagtccccatcccgggtttggctgagcctggctggagagctgctatgctaaacctcctgcctcccaataccagcaggaggttctgggcctctgaaccccctttccccacacctccccctgctgctgctgccccagcgtcttgacgggagcattggcccctgagcccagagaagctggaagcctgccgaaaacaggagcaaatggcgttttataaattatttttttgaaataaa

SEQ ID NO: 1839 - protein, 762 aa, Homo sapiens
MRLLLALLGVLLSVPGPPVLSLEASEEVELEPCLAPSLEQQEQELTVALGQPVRLCCGRAERGGHWYKEGSRLAPAGRVRGWRGRLEIASFLPEDAGRYLCLARGSMIVLQNLTLITGDSLTSSNDDEDPKSHRDLSNRHSYPQQAPYWTHPQRMEKKLHAVPAGNTVKFRCPAAGNPTPTIRWLKDGQAFHGENRIGGIRLRHQHWSLVMESVVPSDRGTYTCLVENAVGSIRYNYLLDVLERSPHRPILQAGLPANTTAVVGSDVELLCKVYSDAQPHIQWLKHIVINGSSFGADGFPYVQVLKTADINSSEVEVLYLRNVSAEDAGEYTCLAGNSIGLSYQSAWLTVLPGTGRIPHLTCDSLTPAGRTKSPTLQFSLESGSSGKSSSSLVRGVRLSSSGPALLAGLVSLDLPLDPLWEFPRDRLVLGKPLGEGCFGQVVRAEAFGMDPARPDQASTVAVKMLKDNASDKDLADLVSEMEVMKLIGRHKNIINLLGVCTQEGPLYVIVECAAKGNLREFLRARRPPGPDLSPDGPRSSEGPLSFPVLVSCAYQVARGMQYLESRKCIHRDLAARNVLVTEDNVMKIADFGLARGVHHIDYYKKTSNGRLPVKWMAPEALFDRVYTHQSDVWSFGILLWEIFTLGGSPYPGIPVEELFSLLREGHRMDRPPHCPPELYGLMRECWHAAPSQRPTFKQLVEALDKVLLAVSEEYLDLRLTFGPYSPSGGDASSTCSSSDSVFSHDPLPLGSSSFPFGSGVQT

SEQ ID NO: 1840 - DNA, 1639 bp, Homo sapiens
ggcaccgcgcgggacggagcttggctgttggtcggtgggttcccgtgcggcggcggccaaggaggaggagacacagttggagcagctccgtgggctgactggggcgaggcctcagcagcgcgagcttgagtgcggccgagcctgcggcgccttcccctgcgggtggggacgagcgggccccgcggcgtcatcggcggcgaggagccgccgcgcctcggcctagcatgtcggaagcgggcgaggagcagcccatggagacgacgggcgccaccgagaacggacatgaggccgtccccgaaggcgagtcgccggccggggctggcacgggcgccgcggcgggggctggaggcgcgaccgcggcgcccccgagcgggaatcagaacggcgccgagggcgaccagatcaacgccagcaagaacgaggaggacgcgggaaaaatgttcgttggtggcctgagctgggatactagcaaaaaagatttaaaagactattttactaaatttggagaggtcgttgactgtacaataaaaatggatcccaacactggacggtcaagagggtttgggtttatcctgttcaaagatgcagccagtgtggagaaggtcctagaccagaaggagcacaggctggatggccgtgtcattgaccctaaaaaggccatggctatgaagaaggacccggtgaagaaaatcttcgttgggggtctgaatcctgaagccactgaggaaaagatcagggagtactttggcgagtttggggagattgaggccattgaattgccaatggatccaaagttgaacaaaagacgaggttttgtgtttatcacctttaaagaagaagaacccgtgaagaaggttctggagaaaaagttccatactgtcagtggaagcaagtgtgagatcaaggtggcccagcccaaagaagtctatcagcagcagcagtatggctctgggggccgtggaaaccgcaaccgagggaaccgaggcagcggaggtggtggtggaggtggaggtcagggtagtacaaactacggcaagagccagcgacgtggtggccatcagaataactacaagccatactgaggcggcagcaggagcgaccaactgatcgcacacatgctttgtttggatatggagtgaacacaattatgtaccaaatttaacttggcaaactttctattgcctgtcccatgtgcatcttatttaaaatttcccccatggaaatcactctcctgttgactatttccagagctctaggtgtttaggcagcgtgtggtgtctgagaggccatagcgccatcatgggctgatttttattaccaggtcccccagaagcaggtgggaggctctgcttcctgctgccgctctgcagcctggacctgtggaccctggttgtaaagagtaaattgtatcttaggaaaccagtgtcacctttttttcaccttttaattttatattatttgcgtcatacatttcctgtaacggaagtgttaattttactgtactttttggtaccttttgggaatctaatgtattgtaaggtattttacacgtgtcctgattttgccacaacctggatattgaagctatccaagcttttgaaataaaatttaaaaacccccaagcctgggtgagtgtggg

SEQ ID NO: 1841 - DNA, 1639 bp, Homo sapiens
ggcaccgcgcgggacggagcttggctgttggtcggtgggttcccgtgcggcggcggccaaggaggaggagacacagttggagcagctccgtgggctgactggggcgaggcctcagcagcgcgagcttgagtgcggccgagcctgcggcgccttcccctgcgggtggggacgagcgggccccgcggcgtcatcggcggcgaggagccgccgcgcctcggcctagcatgtcggaagcgggcgaggagcagcccatggagacgacgggcgccaccgagaacggacatgaggccgtccccgaaggcgagtcgccggccggggctggcacgggcgccgcggcgggggctggaggcgcgaccgcggcgcccccgagcgggaatcagaacggcgccgagggcgaccagatcaacgccagcaagaacgaggaggacgcgggaaaaatgttcgttggtggcctgagctgggatactagcaaaaaagatttaaaagactattttactaaatttggagaggtcgttgactgtacaataaaaatggatcccaacactggacggtcaagagggtttgggtttatcctgttcaaagatgcagccagtgtggagaaggtcctagaccagaaggagcacaggctggatggccgtgtcattgaccctaaaaaggccatggctatgaagaaggacccggtgaagaaaatcttcgttgggggtctgaatcctgaagccactgaggaaaagatcagggagtactttggcgagtttggggagattgaggccattgaattgccaatggatccaaagttgaacaaaagacgaggttttgtgtttatcacctttaaagaagaagaacccgtgaagaaggttctggagaaaaagttccatactgtcagtggaagccagtgtgagatcaaggtggcccagcccaaagaagtctatcagcagcagcagtatggctctgggggccgtggaaaccgcaaccgagggaaccgaggcagcggaggtggtggtggaggtggaggtcagggtagtacaaactacggcaagagccagcgacgtggtggccatcagaataactacaagccatactgaggcggcagcaggagcgaccaactgatcgcacacatgctttgtttggatatggagtgaacacaattatgtaccaaatttaacttggcaaactttctattgcctgtcccatgtgcatcttatttaaaatttcccccatggaaatcactctcctgttgactatttccagagctctaggtgtttaggcagcgtgtggtgtctgagaggccatagcgccatcatgggctgatttttattaccaggtcccccagaagcaggtgggaggctctgcttcctgctgccgctctgcagcctggacctgtggaccctggttgtaaagagtaaattgtatcttaggaaaccagtgtcacctttttttcaccttttaattttatattatttgcgtcatacatttcctgtaacggaagtgttaattttactgtactttttggtaccttttgggaatctaatgtattgtaaggtattttacacgtgtcctgattttgccacaacctggatattgaagctatccaagcttttgaaataaaatttaaaaacccccaagcctgggtgagtgtggg

SEQ ID NO: 1842 - DNA, 1361 bp, Homo sapiens
gaaatgtcttacgatgatcatttagaggtttattttgaacaactggcaattccacgaatgatggaataaaacatatgaagtagaaggactggaacctccagaaaaagtactttaagttacctacaggtgatcctagtcaggtatgaattgataagaaatgcctgcaccttccctccttcctatctttcccttgcctacagaaaattaaaaggcaaaacaatggacatctacatattcttcattcagatcaaccagtggctagcatttgccaccttttgcagtttctttctctttccataagtactttcttctctgaatcatttgaaagcaaatgaaaacagtagcctaaagtgtcagtttcaaccagaaaataacagctctgatttctcatggctcacactcttctgaaacgactcgggtagaggctgaggaaggccgtgttgtttgtctacctgggactagtgggatgagagactgagaaaagaaataagacacggagacaaagtacagagaaagaacagcgggcccaggagaccggcactcagcatacggaggaccagcactggcaccggcctctgagttccctcagtttattgattaccattttcagtgtctcagcaagaggaatgcggtaggagagcagggtgtcagcaagaaaacctgtgagcctttcctttcgctgctgcggccgcagccatgagcatgctcgggcctcagaagaggctcgcctctagtgtcctccgctgtggcaagaagaaggtctggttagaccccagtgagaccaatgaaatcgccaatgccaactcccgtcagcagatccggaagctcatcaaagacgggctgatcatccgcaagcctgtgacggtccattcccgggctcgatgccggaaaaacaccttggcccgccggaagggcaggcacgtggccataggtgagcagaagggtacagccaatgcccgaatgccagagaaggtcacatggatgaggagaatgacgattttgcgccggctgctcagaagataccgtgaatctaagaagatcgatcgccacacgtatcacagcctgtacctgaaggtgaaggggaatgtgttcaaagacaagcggattctcatggaacacatccacaagctgaaggcagacaaggcccgcaagaagctcctggctgaccaggctgaggcccgcaggtctaagaccaaggaagcaggcaagtgccctgaagagcgcctccaggccaagaaggaggagttcatcaagactttatccaaggaggaagagaccaagaaataaaagctccccctttgtctgtacatactggcctctgtgattacatagatcagccatgaaaataaaacaagccttaa

SEQ ID NO: 1843 - DNA, 2794 bp, Homo sapiens
ggcacgaggcgcccatcctgggaaggggcccggagtgtgagagagagactcccccacgcccatcctggaaaggagcccggagtgtgagctgagtggtccgagctatacctgtggacattggtttctccattgaagagctggaggacctttacatggtgtttaaggccaagcacctggctagccagtactgggggtgcagccgcacaatggccggccgtcgggaccccagcctgccctacctggagcagtaccggattgatgccagccagttccgggaactctttgccagcctgacaccctgggcctgtggctcccacacacctctgctggcagggcgcatgttcaggctcctggacgaaaacaaggactcgctgatcaacttcaaggagttcgtgacagggatgagcgggatgtaccacgggtacctgacagagaagctcaaggtgctctacaagctacaccttcccccagctctgagcccagaggaagccgagtcagccctggaggcggcccattatttcacagaggacagctcctcagaagaagcactaccacaggaagagcaagaaggaagtggaagtgaggagagaggagaggagaaggggaccagctctccggactatcggcactaccttcgaatgtgggccaaggagaaagaggctcagaaggagacgattaaggatcttcccaagatgaaccaggagcagttcattgagctgtgcaagacgctttacaacatgttcagtgaagaccccatggagcaggacctgtaccacgccatcgccaccgtggccagcctcctgctccgcatcggagaggtggggaagaagttctcagcccgcacaggcaggaagcccagggactgtgccactgaggaggacgagccaccagcacccgaactgcatcaggacgcagccagggagcttcagcccccagctgcaggagacccccaagccaaagcaggcggagacacacacctcggaacagccccacaggagagccaggtggtggtggaggggggcagcggcgagggacagggctcaccctcccagctgctgtctgacgatgaaaccaaagacgacatgtccatgtcctcctactcggtggtcagcacgggctccctgcaatgtgaagaccttgcagacgacacggtgctggtgggcggggaggcctgcagccccacagcgcgcatcggcggcaccgtcgacaccgactggtgcatctcctttgagcagatcctggcctccatcctgacggagtccgtgctggtgaacttctttgagaagagagtggacattggactcaagatcaaggaccaaaagaaagtggagagacagttcagcaccgccagtgaccatgagcagcctggagtttccggctgatgcctgcagctgtgaggcctggcccaaggtgtcatcagtggggctggcctcatctcctcctgcctttcctcccttatcagtttctctttaaaggtgtgcccctcctgctctcccaggagcagtgagttgtgagtggaaagaaggctggtgcagacccagctgccttagacagattccctgggcctgcatctcctggcgccggctgcttctgggcccaggaagaggctgtggctcccaccttccttacacctggtgggagcccgcctcgcaccagctgcacctgcctagcattagaggctctcagatctgcccttgcttgcctcatacctctgtgctccacactgcggccaggccagctgagtccctccatccgtggatgctttcctgcagctatgtggtatgggggtcattcctgcctcttggcaccaggttggggggcatgtgcttgttgggcaccaaagtgatggaaccctcaggtgctctccgggagcctgaacctcctgactgaggaacatgggcagaacatgtttattgcacagagtgggcgctgcgcacaggcgtggctgtacacgtgctctcagctcatcatcctttccagtaactttaaaaaaacatccctcaggtcctgatatatttccttggattcatttcacttggctagaaattacactgtgctcaatgccttaataaatccctgaaagaaataaaaaccactgtgtgcaatgccttgctgtggcccccaaccactgcttaggcctcccaacttctccccaggccaagtatggggccctggctgtgttctggaagttcaagacacttagtcctccacagtgggtggaagagtgcaaggtctgccaggtcagatggagacgcagaacctgctggtgcaagctgggcaggtcctgaccaacctgcatcaggggatgccctgagctccacaggtcttcatgggcaggggttgtgggtcctggtgaaggaagtgcatcctcaggcctgggctgtagcaagctgtctgcccttgggttcaagaaccagactgtggagccaaaggtgaccgcagggggccccagggctggagccacaaggataccctcactttgcatgaggagctgaaactgaccagtgtccagtgttagcccccacatggggctgctcttgcttctactaaaagatacagcagttacccccttatccacaggggatacagtggatatctaaaaccagacccccagtggatgtctaaaaccacagataataacaaaccttatacatactgttttttcctatgcatacatacctgtgattaagtttatgaattaggcaccttaagagattgacaacaataactaataataaaatgtaacggttatactgtaaaaaaaaaaaaaaaaaaaaaaaaaaaaaaaaaaaaa

SEQ ID NO: 1844 - protein, 391 aa, Homo sapiens
MAGRRDPSLPYLEQYRIDASQFRELFASLTPWACGSHTPLLAGRMFRLLDENKDSLINFKEFVTGMSGMYHGYLTEKLKVLYKLHLPPALSPEEAESALEAAHYFTEDSSSEEALPQEEQEGSGSEERGEEKGTSSPDYRHYLRMWAKEKEAQKETIKDLPKMNQEQFIELCKTLYNMFSEDPMEQDLYHAIATVASLLLRIGEVGKKFSARTGRKPRDCATEEDEPPAPELHQDAARELQPPAAGDPQAKAGGDTHLGTAPQESQVVVEGGSGEGQGSPSQLLSDDETKDDMSMSSYSVVSTGSLQCEDLADDTVLVGGEACSPTARIGGTVDTDWCISFEQILASILTESVLVNFFEKRVDIGLKIKDQKKVERQFSTASDHEQPGVSG

SEQ ID NO: 1845 - DNA, 2037 bp, Homo sapiens
gcgcggcggctgcgaccgggacggcccgttttccgccagctcgccgctcgctatggcgtcgctcaccgtgaaggcctaccttctgggcaaggaggacgcggcgcgcgagattcgccgcttcagcttctgctgcagccccgagcctgaggcggaagccgaggctgcggcgggtccgggaccctgcgagcggctgctgagccgggtggccgccctgttccccgcgctgcggcctggcggcttccaggcgcactaccgcgatgaggacggggacttggttgccttttccagtgacgaggaattgacaatggccatgtcctacgtgaaggatgacatcttccgaatctacattaaagagaaaaaagagtgccggcgggaccaccgcccaccgtgtgctcaggaggcgccccgcaacatggtgcaccccaatgtgatctgcgatggctgcaatgggcctgtggtaggaacccgctacaagtgcagcgtctgcccagactacgacttgtgtagcgtctgcgagggaaagggcttgcaccgggggcacaccaagctcgcattccccagccccttcgggcacctgtctgagggcttctcgcacagccgctggctccggaaggtgaaacacggacacttcgggtggccaggatgggaaatgggtccaccaggaaactggagcccacgtcctcctcgtgcaggggaggcccgccctggccccacggcagaatcagcttctggtccatcggaggatccgagtgtgaatttcctgaagaacgttggggagagtgtggcagctgcccttagccctctgggcattgaagttgatatcgatgtggagcacggagggaaaagaagccgcctgacccccgtctctccagagagttccagcacagaggagaagagcagctcacagccaagcagctgctgctctgaccccagcaagccgggtgggaatgttgagggcgccacgcagtctctggcggagcagatgaggaagatcgccttggagtccgaggggcgccctgaggaacagatggagtcggataactgttcaggaggagatgatgactggacccatctgtcttcaaaagaagtggacccgtctacaggtgaactccagtccctacagatgccagaatccgaagggccaagctctctggacccctcccaggagggacccacagggctgaaggaagctgccttgtacccacatctcccgccagaggctgacccgcggctgattgagtccctctcccagatgctgtccatgggcttctctgatgaaggcggctggctcaccaggctcctgcagaccaagaactatgacatcggagcggctctggacaccatccagtattcaaagcatcccccgccgttgtgaccacttttgcccacctcttctgcgtgcccctcttctgtctcatagttgtgttaagcttgcgtagaattgcaggtctctgtacgggccagtttctctgccttcttccaggatcaggggttagggtgcaagaagccatttagggcagcaaaacaagtgacatgaagggagggtccctgtgtgtgtgtgtgctgatgtttcctgggtgccctggctccttgcagcagggctgggcctgcgagacccaaggctcactgcagcgcgctcctgacccctccctgcaggggctacgttagcagcccagcacatagcttgcctaatggctttcactttctcttttgttttaaatgactcataggtccctgacatttagttgattattttctgctacagacctggtacactctgattttagataaagtaagcctaggtgttgtcagcaggcaggctggggaggccagtgttgtgggcttcctgctgggactgagaaggctcacgaagggcatccgcaatgttggtttcactgagagctgcctcctggtctcttcaccactgtagttctctcatttccaaaccatcagctgcttttaaaataagatctctttgtagccatcctgttaaatttgtaaacaatctaattaaatggcatcagcactttaaccaat

SEQ ID NO: 1846 - DNA, 2124 bp, Homo sapiens
tgcagcctcggccccgcgggcgcccgccgcgcacccgaggagatgaggctccgcaatggcaccttcctgacgctgctgctcttctgcctgtgcgccttcctctcgctgtcctggtacgcggcactcagcggccagaaaggcgacgttgtggacgtttaccagcgggagttcctggcgctgcgcgatcggttgcacgcagctgagcaggagagcctcaagcgctccaaggagctcaacctggtgctggacgagatcaagagggccgtgtcagaaaggcaggcgctgcgagacggagacggcaatcgcacctggggccgcctaacagaggacccccgattgaagccgtggaacggctcacaccggcacgtgctgcacctgcccaccgtcttccatcacctgccacacctgctggccaaggagagcagtctgcagcccgcggtgcgcgtgggccagggccgcaccggagtgtcggtggtgatgggcatcccgagcgtgcggcgcgaggtgcactcgtacctgactgacactctgcactcgctcatctccgagctgagcccgcaggagaaggaggactcggtcatcgtggtgctgatcgccgagactgactcacagtacacttcggcagtgacagagaacatcaaggccttgttccccacggagatccattctgggctcctggaggtcatctcaccctccccccacttctaccctgacttctcccgcctccgagagtcctttggggaccccaaggagagagtcaggtggaggaccaaacagaacctcgattactgcttcctcatgatgtacgcgcagtccaaaggcatctactacgtgcagctggaggatgacatcgtggccaagcccaactacctgagcaccatgaagaactttgcactgcagcagccttcagaggactggatgatcctggagttctcccagctgggcttcattggtaagatgttcaagtcgctggacctgagcctgattgtagagttcattctcatgttctaccgggacaagcccatcgactggctcctggaccatattctgtgggtgaaagtctgcaaccccgagaaggatgcgaagcactgtgaccggcagaaagccaacctgcggatccgcttcaaaccgtccctcttccagcacgtgggcactcactcctcgctggctggcaagatccagaaactgaaggacaaagactttggaaagcaggcgctgcggaaggagcatgtgaacccgccagcagaggtgagcacgagcctgaagacataccagcacttcaccctggagaaagcctacctgcgcgaggacttcttctgggccttcacccctgccgcgggggacttcatccgcttccgcttcttccaacctctaagactggagcggttcttcttccgcagtgggaacatcgagcacccggaggacaagctcttcaacacgtctgtggaggtgctgcccttcgacaaccctcagtcagacaaggaggccctgcaggagggccgcaccgccaccctccggtaccctcggagccccgacggctacctccagatcggctccttctacaagggagtggcagagggagaggtggacccagccttcggccctctggaagcactgcgcctctcgatccagacggactcccctgtgtgggtgattctgagcgagatcttcctgaaaaaggccgactaagctgcgggcttctgagggtaccctgtggccagccctgaagcccacatttctgggggtgtcgtcactgccgtccccggagggccagatacggccccgcccaaagggttctgcctggcgtcgggcttgggccggcctggggtccgccgctggcccggaggccctaggagctggtgctgcccccgcccgccgggccgcggaggaggcaggcggcccccacactgtgcctgaggcccggaaccgttcgcacccggcctgccccagtcaggccgttttagaagagcttttacttgggcgcccgccgtctctggcgcgaacactggaatgcatatactactttatgtgctgtgttttttattcttggatacatttgattttttcacgtaagtccacatatacttctataagagcgtgacttgtaataaagggttaatgaag

SEQ ID NO: 1847 - protein, 548 aa, Homo sapiens
MRLRNGTFLTLLLFCLCAFLSLSWYAALSGQKGDVVDVYQREFLALRDRLHAAEQESLKRSKELNLVLDEIKRAVSERQALRDGDGNRTWGRLTEDPRLKPWNGSHRHVLHLPTVFHHLPHLLAKESSLQPAVRVGQGRTGVSVVMGIPSVRREVHSYLTDTLHSLISELSPQEKEDSVIVVLIAETDSQYTSAVTENIKALFPTEIHSGLLEVISPSPHFYPDFSRLRESFGDPKERVRWRTKQNLDYCFLMMYAQSKGIYYVQLEDDIVAKPNYLSTMKNFALQQPSEDWMILEFSQLGFIGKMFKSLDLSLIVEFILMFYRDKPIDWLLDHILWVKVCNPEKDAKHCDRQKANLRIRFKPSLFQHVGTHSSLAGKIQKLKDKDFGKQALRKEHVNPPAEVSTSLKTYQHFTLEKAYLREDFFWAFTPAAGDFIRFRFFQPLRLERFFFRSGNIEHPEDKLFNTSVEVLPFDNPQSDKEALQEGRTATLRYPRSPDGYLQIGSFYKGVAEGEVDPAFGPLEALRLSIQTDSPVWVILSEIFLKKAD

SEQ ID NO: 1848 - DNA, 2891 bp, Homo sapiens
ttttcagagactcgcctggcagaggcctggagcgtcctgctgcgtggactgtgggcaccgagccaccaggaggttgttgatctcattcttgctcactggtccctgccagactggtggtgcctctctactgtcgggcagccccacctctgtgctgccccatccacctacagccctcatgcctgggcccagctggaggttctgacaggggccccctggggtggcatgcggacccttcagggtgccccaggcgcagcacaggtctccagagacacaggcaccagggcgttcagagctagtcccctcgctgctgttgactgtccttgagcagccccagggccggtttctcaacctcatttgctcacctgagcaatgaagtgaggtgggctcctggaactgcagcagccaccccccggggccatcgtgaggctaagaatccagtgcagggtgagcaaccagcgaccgctacaaggacagtgaagagctagcaccaggaccttgggtagcccacccgctggagggagcgtgtgctgcaaaaagcaagagtgggctttggaggccaacggatggagcggattcagtctgaggctgttccagcccttgcttaggatccacctacctaggtctggaaatcgtatttccacttcagatgccttctcagaggataaaataacccccggtgggggagagtactggaagagggctaattcccctggttttctccccatgagcattagtgtcagtgtaattttagagtgaccccagctatgtcacgtgtggcaggcacaagaacagatgtcaatgagctattgcagaggtggacacccagatgtgtgcgctggcacactggaggggcccgtagggtggctctagaccgccccctcgtgacggcttgcctaccacctgcaggcgacgttgtggacgtttaccagcgggagttcctggcgctgcgcgatcggttgcacgcagctgagcaggagagcctcaagcgctccaaggagctcaacctggtgctggacgagatcaagagggccgtgtcagaaaggcaggcgctgcgagacggagacggcaatcgcacctggggccgcctaacagaggacccccgattgaagccgtggaacggctcacaccggcacgtgctgcacctgcccaccgtcttccatcacctgccacacctgctggccaaggagagcagtctgcagcccgcggtgcgcgtgggccagggccgcaccggagtgtcggtggtgatgggcatcccgagcgtgcggcgcgaggtgcactcgtacctgactgacactctgcactcgctcatctccgagctgagcccgcaggagaaggaggactcggtcatcgtggtgctgatcgccgagactgactcacagtacacttcggcagtgacagagaacatcaaggccttgttccccacggagatccattctgggctcctggaggtcatctcaccctccccccacttctaccctgacttctcccgcctccgagagtcctttggggaccccaaggagagagtcaggtggaggaccaaacagaacctcgattactgcttcctcatgatgtacgcgcagtccaaaggcatctactacgtgcagctggaggatgacatcgtggccaagcccaactacctgagcaccatgaagaactttgcactgcagcagccttcagaggactggatgatcctggagttctcccagctgggcttcattggtaagatgttcaagtcgctggacctgagcctgattgtagagttcattctcatgttctaccgggacaagcccatcgactggctcctggaccatattctgtgggtgaaagtctgcaaccccgagaaggatgcgaagcactgtgaccggcagaaagccaacctgcggatccgcttcaaaccgtccctcttccagcacgtgggcactcactcctcgctggctggcaagatccagaaactgaaggacaaagactttggaaagcaggcgctgcggaaggagcatgtgaacccgccagcagaggtgagcacgagcctgaagacataccagcacttcaccctggagaaagcctacctgcgcgaggacttcttctgggccttcacccctgccgcgggggacttcatccgcttccgcttcttccaacctctaagactggagcggttcttcttccgcagtgggaacatcgagcacccggaggacaagctcttcaacacgtctgtggaggtgctgcccttcgacaaccctcagtcagacaaggaggccctgcaggagggccgcaccgccaccctccggtaccctcggagccccgacggctacctccagatcggctccttctacaagggagtggcagagggagaggtggacccagccttcggccctctggaagcactgcgcctctcgatccagacggactcccctgtgtgggtgattctgagcgagatcttcctgaaaaaggccgactaagctgcgggcttctgagggtaccctgtggccagccctgaagcccacatttctgggggtgtcgtcactgccgtccccggagggccagatacggccccgcccaaagggttctgcctggcgtcgggcttgggccggcctggggtccgccgctggcccggaggccctaggagctggtgctgcccccgcccgccgggccgcggaggaggcaggcggcccccacactgtgcctgaggcccggaaccgttcgcacccggcctgccccagtcaggccgttttagaagagcttttacttgggcgcccgccgtctctggcgcgaacactggaatgcatatactactttatgtgctgtgttttttattcttggatacatttgattttttcacgtaagtccacatatacttctataagagcgtgacttgtaataaagggttaatgaag

SEQ ID NO: 1849 - protein, 563 aa, Homo sapiens
MSRVAGTRTDVNELLQRWTPRCVRWHTGGARRVALDRPLVTACLPPAGDVVDVYQREFLALRDRLHAAEQESLKRSKELNLVLDEIKRAVSERQALRDGDGNRTWGRLTEDPRLKPWNGSHRHVLHLPTVFHHLPHLLAKESSLQPAVRVGQGRTGVSVVMGIPSVRREVHSYLTDTLHSLISELSPQEKEDSVIVVLIAETDSQYTSAVTENIKALFPTEIHSGLLEVISPSPHFYPDFSRLRESFGDPKERVRWRTKQNLDYCFLMMYAQSKGIYYVQLEDDIVAKPNYLSTMKNFALQQPSEDWMILEFSQLGFIGKMFKSLDLSLIVEFILMFYRDKPIDWLLDHILWVKVCNPEKDAKHCDRQKANLRIRFKPSLFQHVGTHSSLAGKIQKLKDKDFGKQALRKEHVNPPAEVSTSLKTYQHFTLEKAYLREDFFWAFTPAAGDFIRFRFFQPLRLERFFFRSGNIEHPEDKLFNTSVEVLPFDNPQSDKEALQEGRTATLRYPRSPDGYLQIGSFYKGVAEGEVDPAFGPLEALRLSIQTDSPVWVILSEIFLKKAD

SEQ ID NO: 1850 - DNA, 2201 bp, Homo sapiens
ttttttttttcgtcttagccacgcagaagtcgcgtgtctagtttgtttcgacgccggaccgcgtaagagacgatgatgttgggcacggaaggtggagagggattcgtggtgaaggtccggggcttgccctggtcttgctcggccgatgaagtgcagaggtttttttctgactgcaaaattcaaaatggggctcaaggtattcgtttcatctacaccagagaaggcagaccaagtggcgaggcttttgttgaacttgaatcagaagatgaagtcaaattggccctgaaaaaagacagagaaactatgggacacagatatgttgaagtattcaagtcaaacaacgttgaaatggattgggtgttgaagcatactggtccaaatagtcctgacacggccaatgatggctttgtacggcttagaggacttccctttggatgtagcaaggaagaaattgttcagttcttctcagggttggaaatcgtgccaaatgggataacattgccggtggacttccaggggaggagtacgggggaggccttcgtgcagtttgcttcacaggaaatagctgaaaaggctctaaagaaacacaaggaaagaatagggcacaggtatattgaaatctttaagagcagtagagctgaagttagaactcattatgatccaccacgaaagcttatggccatgcagcggccaggtccttatgacagacctggggctggtagagggtataacagcattggcagaggagctggctttgagaggatgaggcgtggtgcttatggtggaggctatggaggctatgatgattacaatggctataatgatggctatggatttgggtcagatagatttggaagagacctcaattactgtttttcaggaatgtctgatcacagatacggggatggtggctctactttccagagcacaacaggacactgtgtacacatgcggggattaccttacagagctactgagaatgacatttataattttttttcaccgctcaaccctgtgagagtacacattgaaattggtcctgatggcagagtaactggtgaagcagatgtcgagttcgcaactcatgaagatgctgtggcagctatgtcaaaagacaaagcaaatatgcaacacagatatgtagaactcttcttgaattctacagcaggagcaagcggtggtgcttacgaacacagatatgtagaactcttcttgaattctacagcaggagcaagcggtggtgcttatggtagccaaatgatgggaggcatgggcttgtcaaaccagtccagctacgggggcccagccagccagcagctgagtgggggttacggaggcggctacggtggccagagcagcatgagtggatacgaccaagttttacaggaaaactccagtgattttcaatcaaacattgcataggtaaccaaggagcagtgaacagcagctactacagtagtggaagccgtgcatctatgggcgtgaacggaatgggagggttgtctagcatgtccagtatgagtggtggatggggaatgtaattgatcgatcctgatcactgactcttggtcaacctttttttttttttttttttctttaagaaaacttcagtttaacagtttctgcaatacaagcttgtgatttatgcttactctaagtggaaatcaggattgttatgaagacttaaggcccagtatttttgaatacaatactcatctaggatgtaacagtgaagctgagtaaactataactgttaaacttaagttccagcttttctcaagttagttataggatgtacttaagcagtaagcgtatttaggtaaaagcagttgaattatgttaaatgttgccctttgccacgttaaattgaacactgttttggatgcatgttgaaagacatgcttttattttttttgtaaaacaatataggagctgtgtctactattaaaagtgaaacattttggcatgtttgttaattctagtttcatttaataacctgtaaggcacgtaagtttaagctttttttttttttaagttaatgggaaaaatttgagacgcaataccaatacttaggattttggtcttggtgtttgtatgaaattctgaggccttgatttaaatctttcattgtattgtgatttccttttaggtatattgcgctaagtgaaacttgtcaaataaatcctccttttaaaaactgc

SEQ ID NO: 1851 - protein, 449 aa, Homo sapiens
MMLGTEGGEGFVVKVRGLPWSCSADEVQRFFSDCKIQNGAQGIRFIYTREGRPSGEAFVELESEDEVKLALKKDRETMGHRYVEVFKSNNVEMDWVLKHTGPNSPDTANDGFVRLRGLPFGCSKEEIVQFFSGLEIVPNGITLPVDFQGRSTGEAFVQFASQEIAEKALKKHKERIGHRYIEIFKSSRAEVRTHYDPPRKLMAMQRPGPYDRPGAGRGYNSIGRGAGFERMRRGAYGGGYGGYDDYNGYNDGYGFGSDRFGRDLNYCFSGMSDHRYGDGGSTFQSTTGHCVHMRGLPYRATENDIYNFFSPLNPVRVHIEIGPDGRVTGEADVEFATHEDAVAAMSKDKANMQHRYVELFLNSTAGASGGAYEHRYVELFLNSTAGASGGAYGSQMMGGMGLSNQSSYGGPASQQLSGGYGGGYGGQSSMSGYDQVLQENSSDFQSNIA

SEQ ID NO: 1852 - DNA, 1075 bp, Mus musculus
ctgcaaggcggcggcaggagaggttgtggtgctagtttctctaagccatccagtgccatcctcgtcgctgcagcgacaccgctctcgccgccgccatgactgagcagatgacccttcgtggcaccctcaagggccacaacggctgggtaacccagatcgctactaccccgcagttcccggacatgatcctctccgcctctcgagataagaccatcatcatgtggaaactgaccagggatgagaccaactatggaattccacagcgtgctctgcggggtcactcccactttgttagtgatgtggttatctcctcagatggccagtttgccctctcaggctcctgggatggaaccctgcgcctctgggatctcacaacgggcaccaccacgaggcgatttgtgggccataccaaggatgtgctgagtgtggccttctcctctgacaaccggcagattgtctctggatctcgagataaaaccatcaagctatggaataccctgggtgtgtgcaaatacactgtccaggatgagagccactcagagtgggtgtcttgtgtccgcttctcgcccaacagcagcaaccctatcatcgtctcctgtggctgggacaagctggtcaaggtatggaacctggctaactgcaagctgaagaccaaccacattggccacacaggctatctgaacacggtgactgtctctccagatggatccctctgtgcttctggaggcaaggatggccaggccatgttatgggatctcaacgaaggcaaacacctttacacgctagatggtggggacatcatcaacgccctgtgcttcagccctaaccgctactggctgtgtgctgccacaggccccagcatcaagatctgggatttagagggaaagatcattgtagatgaactgaagcaagaagttatcagtaccagcagcaaggcagaaccaccccagtgcacttccctggcctggtctgctgatggccagactctgtttgctggctacacggacaacctggtgcgagtgtggcaggtgaccattggcacacgctagaagtttatggcagagctttacaaata

SEQ ID NO: 1853 - protein, 317 aa, Mus musculus [sequence omitted]

SEQ ID NO: 1854 - DNA, 3014 bp, Homo sapiens
gcggagcccacggagcccacggaggagcccacggaggagccccagcgtccgaacgggcagaccccctcgagccgcgaaggagcccgagaagcagccacgatgtgcggaatctttgcctacatgaactacagagtcccccggacgaggaaggagatcttcgaaaccctcatcaagggcctgcagcggctggagtacagaggctacgactcggcaggtgtggcgatcgatgggaataatcacgaagtcaaagaaagacacattcagctggtcaagaaaagggggaaagtcaaggctctcgatgaagaactttacaaacaagacagcatggacttaaaagtggagtttgagacacacttcggcattgcccacacgcgctgggccacccacggggtccccagtgctgtcaacagccaccctcagcgctcagacaaaggcaacgaatttgttgtcatccacaatgggatcatcacaaattacaaagatctgaggaaatttctggaaagcaaaggctacgagtttgagtcagaaacagatacagagaccatcgccaagctgattaaatatgtgttcgacaacagagaaactgaggacattacgttttcaacgttggtcgagagagtcattcagcagttggaaggtgcattcgcgctggttttcaagagtgtccactacccaggagaagccgttgccacacggagaggcagccccctgctcatcggagtccggagcaaatacaagctctccacagaacagatccctatcttatacaggacgtgcactctggagaatgtgaagaatatctgtaagacacggatgaagaggctggacagctccgcctgcctgcatgctgtgggcgacaaggccgtggaattcttctttgcttctgatgcaagcgctatcatagagcacaccaaccgggtcatcttcctggaggacgatgacatcgccgcagtggctgatgggaaactctccattcaccgggtcaagcgctcggccagtgatgacccatctcgagccatccagaccttgcagatggaactgcagcaaatcatgaaaggtaacttcagtgcgtttatgcagaaggagatcttcgaacagccagaatcagttttcaatactatgagaggtcgggtgaattttgaaaccaacacagtgctcctgggtggcttgaaggaccacttgaaggagattcgacgatgccgacggctcatcgtgattggctgtggaaccagctaccacgctgccgtggctacgcggcaagttttggaggaactgactgagcttcctgtgatggttgaacttgctagtgattttctggacaggaacacacctgtgttcagggatgacgtttgctttttcatcagccagtcaggcgagaccgcggacaccctcctggcgctgcgctactgtaaggaccgcggcgctctcaccgtgggcgtcaccaacaccgtgggcagctccatctctcgcgagaccgactgcggcgtccacatcaacgcagggccggagatcggcgtggccagcaccaaggcttataccagtcagttcatctctctggtgatgtttggtttgatgatgtctgaagaccgaatttcactacaaaacaggaggcaagagatcatccgtggcttgagatctttacctgagctgatcaaggaagtgctgtctctggaggagaagatccacgacttggccctggagctctacacgcagagatcgctgctggtgatggggcggggctacaactatgccacctgcctggaaggagccctgaaaattaaagagataacctacatgcactcagaaggcatcctggctggggagctgaagcacgggcccctggcactgattgacaagcagatgcccgtcatcatggtcattatgaaggatccttgcttcgccaaatgccagaacgccctgcagcaagtcacggcccgccagggtcgccccattatactgtgctccaaggacgatactgaaagttccaagtttgcgtataagacaattgagctgccccacactgtggactgcctccagggcatcctgagcgtgattccgctgcagctgctgtccttccacctggctgttctccgaggatatgacgttgacttccccagaaatctggccaagtctgtaactgtggaatgaggctgagaccgtgacaagaccatcaccacctttcatctgattccagacctgtcccaacagcagggatgctacatgggaagagaagtggacatcccacatgttctgcgtgctcctgtagagcttgacagcttccacgtgccttctacccaagtgcttttgcttacagcagatactgtttctctgtgtcctgaagtcgccagaggagaagggaatcattgtttacacatggggatcagagcagacttctccactactgtgcaatagagatacagctctcttcagagtaactgtgaaccttttataaccaacactagagttagttttaaaagacaagatatttataatgacgactgtatagcttttaagttatttttctagtatgtggctttctgtagccgtggtaacggccaaactgttcatcctagctacccatgctctgtgtccaggcttgctcctggcaggtggcattcatctcagatgtgagcacaaggcattggccctctggactcctttctccttttctttcctctctaggctgctcctgaatcctgttctctgacatccgtggagcccctcctgcatccacctatgcctcctataagtccagttgaaatctcagcctccttcaacattttcttctcgtgtgtggcccacatccctccacttctccaacttctgtttaatctgatcacggctctttttaagccctggcagcattttggtccctgctccttgcccatagtaaaacagcttgaaatatcccatgcaagagagtagtttcaagtgggcgactctgctctctatttaaaagcgtgcacaatcaaaagtactatgcaattttaggacaataaagaacatacagttcc

SEQ ID NO: 1855 - protein, 682 aa, Homo sapiens
MCGIFAYMNYRVPRTRKEIFETLIKGLQRLEYRGYDSAGVAIDGNNHEVKERHIQLVKKRGKVKALDEELYKQDSMDLKVEFETHFGIAHTRWATHGVPSAVNSHPQRSDKGNEFVVIHNGIITNYKDLRKFLESKGYEFESETDTETIAKLIKYVFDNRETEDITFSTLVERVIQQLEGAFALVFKSVHYPGEAVATRRGSPLLIGVRSKYKLSTEQIPILYRTCTLENVKNICKTRMKRLDSSACLHAVGDKAVEFFFASDASAIIEHTNRVIFLEDDDIAAVADGKLSIHRVKRSASDDPSRAIQTLQMELQQIMKGNFSAFMQKEIFEQPESVFNTMRGRVNFETNTVLLGGLKDHLKEIRRCRRLIVIGCGTSYHAAVATRQVLEELTELPVMVELASDFLDRNTPVFRDDVCFFISQSGETADTLLALRYCKDRGALTVGVTNTVGSSISRETDCGVHINAGPEIGVASTKAYTSQFISLVMFGLMMSEDRISLQNRRQEIIRGLRSLPELIKEVLSLEEKIHDLALELYTQRSLLVMGRGYNYATCLEGALKIKEITYMHSEGILAGELKHGPLALIDKQMPVIMVIMKDPCFAKCQNALQQVTARQGRPIILCSKDDTESSKFAYKTIELPHTVDCLQGILSVIPLQLLSFHLAVLRGYDVDFPRNLAKSVTVE

SEQ ID NO: 1856 - DNA, 618 bp, Homo sapiens
atggagaaccgaggaagagaaacaggttttgtggaagacaagcacaagtccacgcctaggtgtatgggaagtgaggtcctcatggggcatagctacagagatcccttttttggagggatgactcgagatgaagatgatgatgaggaagaagaggaagaagggggctcatggggctgtgggaacccaagcttcagcccaggaggagggatacgtttccacgataacttcggctttgatgacctagtacaagatttcaatagcatcttcagcaatatgggggcctggaccttgccttcccatcctcctgaacttccaggttctgagtcagagacacctggtgagagactgcgggagggacaggcacttcgagaatcaatgcttaagtatccagatagtcaccagcccaggatctttgagggggtcttggagagtgatgcaagaagagcgtcttggcccggttctacagccccagcccagatctacttcaagagcatctctgtgaccaaaatcactaagccagatgggatagtggaggagcgctggactgtggtggacaccctggatgatgccttctccatcctggacttattcctaggatgctggttccggtcccggtag

SEQ ID NO: 1857 - DNA, 471 bp, Homo sapiens
atggcccccacagtgtggagagtggacggacagacagaagcagtgtgtgcagccttgcctctcatcagagtcactgggagcaggatttcctttgacctcgctgagtacactgcggacgttgacggagttggcactctacgacttctagatgcagttaagacttgtggccttatcaactctgtgaagttctaccaagcctcaacaagtgaactttatgggaaagtgcaggaaataccccagaaggagaccacccctttctatccccggtcaccctatggtgagaacatgcgtgcacaccggagcacatgtgtggcgttatctgtgggtgtggggggggcagcaaaactctatgcctattggattgtggtgaacttccgtgaggcgtataatctctttgcagtgaacggcattctcttcaatcatgagagtcccagaagaggagatcagttgaagatttccgtctttcgatga

SEQ ID NO: 1858 - DNA, 362 bp, Homo sapiens
ctgatggcatcttctaagctgaaatgaatgagtttcttactcaggagctggctgaagatggctactctggagttgagatgcgagttacaccaaccaggacagaaatcattgtcttagccaccagaacacagaatgttcttggtgagaagggccggcggattcgggaactgactgctgtagttcagaagaggtttggctctccaggcagagtctctgccttacaaactcctaggagggcttgctgtgcggagggcctgctatggtgtgtcgcggttcatcatggaaactggggccaaaggctgtgaggtcgtggtgtctgggaaactctgaggacagagagctaaatccatgaagtttgtgga

SEQ ID NO: 1859 - DNA, 9587 bp, Homo sapiens
ccgaccaacaccaacacccagctccgacgcagctcctctgcgcccttgccgccctccgagccacagctttcctcccgctcctgcccccggcccgtcgccgtctccgcgctcgcagcggcctcgggagggcccaggtagcgagcagcgacctcgcgagccttccgcactcccgcccggttccccggccgtccgcctatccttggccccctccgctttctccgcgccggcccgcctcgcttatgcctcggcgctgagccgctctcccgattgcccgccgacatgagctgcaacggaggctcccacccgcggatcaacactctgggccgcatgatccgcgccgagtctggcccggacctgcgctacgaggtgaccagcggcggcgggggcaccagcaggatgtactattctcggcgcggcgtgatcaccgaccagaactcggacggctactgtcaaaccggcacgatgtccaggcaccagaaccagaacaccatccaggagctgctgcagaactgctccgactgcttgatgcgagcagagctcatcgtgcagcctgaattgaagtatggagatggaatacaactgactcggagtcgagaattggatgagtgttttgcccaggccaatgaccaaatggaaatcctcgacagcttgatcagagagatgcggcagatgggccagccctgtgatgcttaccagaaaaggcttcttcagctccaagagcaaatgcgagccctttataaagccatcagtgtccctcgagtccgcagggccagctccaagggtggtggaggctacacttgtcagagtggctctggctgggatgagttcaccaaacatgtcaccagtgaatgtttggggtggatgaggcagcaaagggcggagatggacatggtggcctggggtgtggacctggcctcagtggagcagcacattaacagccaccggggcatccacaactccatcggcgactatcgctggcagctggacaaaatcaaagccgacctgcgcgagaaatctgcgatctaccagttggaggaggagtatgaaaacctgctgaaagcgtcctttgagaggatggatcacctgcgacagctgcagaacatcattcaggccacgtccagggagatcatgtggatcaatgactgcgaggaggaggagctgctgtacgactggagcgacaagaacaccaacatcgctcagaaacaggaggccttctccatacgcatgagtcaactggaagttaaagaaaaagagctcaataagctgaaacaagaaagtgaccaacttgtcctcaatcagcatccagcttcagacaaaattgaggcctatatggacactctgcagacgcagtggagttggattcttcagatcaccaagtgcattgatgttcatctgaaaaaaatgctgcctactttcagttttttgaagaggcgcagtctactgaagcatacctgaaggggctccaggactccatcaggaagaagtacccctgcgacaagaacatgcccctgcagcacctgctggaacagatcaaggagctggagaaagaacgagagaaaatccttgaatacaagcgtcaggtgcagaacttggtaaacaagtctaagaagattgtacagctgaagcctcgtaacccagactacagaagcaataaacccattattctcagagctctctgtgactacaaacaagatcagaaaatcgtgcataagggggatgagtgtatcctgaaggacaacaacgagcgcagcaagtggtacgtgacgggcccgggaggcgttgacatgcttgttccctctgtggggctgatcatccctcctccgaacccactggccgtggacctctcttgcaagattgagcagtactacgaagccatcttggctctgtggaaccagctctacatcaacatgaagagcctggtgtcctggcactactgcatgattgacatagagaagatcagggccatgacaatcgccaagctgaaaacaatgcggcaggaagattacatgaagacgatagccgaccttgagttacattaccaagagttcatcagaaatagccaaggctcagagatgtttggagatgatgacaagcggaaaatacagtctcagttcaccgatgcccagaagcattaccagaccctggtcattcagctccctggctatccccagcaccagacagtgaccacaactgaaatcactcatcatggaacctgccaagatgtcaaccataataaagtaattgaaaccaacagagaaaatgacaagcaagaaacatggatgctgatggagctgcagaagattcgcaggcagatagagcactgcgagggcaggatgactctcaaaaacctccctctagcagaccagggatcttctcaccacatcacagtgaaaattaacgagcttaagagtgtgcagaatgattcacaagcaattgctgaggttctcaaccagcttaaagatatgcttgccaacttcagaggttctgaaaagtactgctatttacagaatgaagtatttggactatttcagaaactggaaaatatcaatggtgttacagatggctacttaaatagcttatgcacagtaagggcactgctccaggctattctccaaacagaagacatgttaaaggtttatgaagccaggctcactgaggaggaaactgtctgcctggacctggataaagtggaagcttaccgctgtggactgaagaaaataaaaaatgacttgaacttgaagaagtcgttgttggccactatgaagacagaactacagaaagcccagcagatccactctcagacttcacagcagtatccactttatgatctggacttgggcaagttcggtgaaaaagtcacacagctgacagaccgctggcaaaggatagataaacagatcgactttaggttatgggacctggagaaacaaatcaagcaattgaggaattatcgtgataactatcaggctttctgcaagtggctctatgatgctaaacgccgccaggattccttagaatccatgaaatttggagattccaacacagtcatgcggtttttgaatgagcagaagaacttgcacagtgaaatatctggcaaacgagacaaatcagaggaagtacaaaaaattgctgaactttgcgccaattcaattaaggattatgagctccagctggcctcatacacctcaggactggaaactctgctgaacatacctatcaagaggaccatgattcagtccccttctggggtgattctgcaagaggctgcagatgttcatgctcggtacattgaactacttacaagatctggagactattacaggttcttaagtgagatgctgaagagtttggaagatctgaagctgaaaaataccaagatcgaagttttggaagaggagctcagactggcccgagatgccaactcggaaaactgtaataagaacaaattcctggatcagaacctgcagaaataccaggcagagtgttcccagttcaaagcgaagcttgcgagcctggaggagctgaagagacaggctgagctggatgggaagtcggctaagcaaaatctagacaagtgctacggccaaataaaagaactcaatgagaagatcacccgactgacttatgagattgaagatgaaaagagaagaagaaaatctgtggaagacagatttgaccaacagaagaatgactatgaccaactgcagaaagcaaggcaatgtgaaaaggagaaccttggttggcagaaattagagtctgagaaagccatcaaggagaaggagtacgagattgaaaggttgagggttctactgcaggaagaaggcacccggaagagagaatatgaaaatgagctggcaaaggtaagaaaccactataatgaggagatgagtaatttaaggaacaagtatgaaacagagattaacattacgaagaccaccatcaaggagatatccatgcaaaaagaggatgattccaaaaatcttagaaaccagcttgatagactttcaagggaaaatcgagatctgaaggatgaaattgtcaggctcaatgacagcatcttgcaggccactgagcagcgaaggcgagctgaagaaaacgcccttcagcaaaaggcctgtggctctgagataatgcagaagaagcagcatctggagatagaactgaagcaggtcatgcagcagcgctctgaggacaatgcccggcacaagcagtccctggaggaggctgccaagaccattcaggacaaaaataaggagatcgagagactcaaagctgagtttcaggaggaggccaagcgccgctgggaatatgaaaatgaactgagtaaggtaagaaacaattatgatgaggagatcattagcttaaaaaatcagtttgagaccgagatcaacatcaccaagaccaccatccaccagctcaccatgcagaaggaagaggataccagtggctaccgggctcagatagacaatctcacccgagaaaacaggagcttatctgaagaaataaagaggctgaagaacactctaacccagaccacagagaatctcaggagggtggaagaagacatccaacagcaaaaggccactggctctgaggtgtctcagaggaaacagcagctggaggttgagctgagacaagtcactcagatgcgaacagaggagagcgtaagatataagcaatctcttgatgatgctgccaaaaccatccaggataaaaacaaggagatagaaaggttaaaacaactgatcgacaaagaaacaaatgaccggaaatgcctggaagatgaaaacgcgagattacaaagggtccagtatgacctgcagaaagcaaacagtagtgcgacggagacaataaacaaactgaaggttcaggagcaagaactgacacgcctgaggatcgactatgaaagggtttcccaggagaggactgtgaaggaccaggatatcacgcggttccagaactctctgaaagagctgcagctgcagaagcagaaggtggaagaggagctgaatcggctgaagaggaccgcgtcagaagactcctgcaagaggaagaagctggaggaagagctggaaggcatgaggaggtcgctgaaggagcaagccatcaaaatcaccaacctgacccagcagctggagcaggcatccattgttaagaagaggagtgaggatgacctccggcagcagagggacgtgctggatggccacctgagggaaaagcagaggacccaggaagagctgaggaggctctcttctgaggtcgaggccctgaggcggcagttactccaggaacaggaaagtgtcaaacaagctcacttgaggaatgagcatttccagaaggcgatagaagataaaagcagaagcttaaatgaaagcaaaatagaaattgagaggctgcagtctctcacagagaacctgaccaaggagcacttgatgttagaagaagaactgcggaacctgaggctggagtacgatgacctgaggagaggacgaagcgaagcggacagtgataaaaatgcaaccatcttggaactaaggagccagctgcagatcagcaacaaccggaccctggaactgcaggggctgattaatgatttacagagagagagggaaaatttgagacaggaaattgagaaattccaaaagcaggctttagaggcatctaataggattcaggaatcaaagaatcagtgtactcaggtggtacaggaaagagagagccttctggtgaaaatcaaagtcctggagcaagacaaggcaaggctgcagaggctggaggatgagctgaatcgtgcaaaatcaactctagaggcagaaaccagggtgaaacagcgcctggagtgtgagaaacagcaaattcagaatgacctgaatcagtggaagactcaatattcccgcaaggaggaggctattaggaagatagaatcggaaagagaaaagagtgagagagagaagaacagtcttaggagtgagatcgaaagactccaagcagagatcaagagaattgaagagaggtgcaggcgtaagctggaggattctaccagggagacacagtcacagttagaaacagaacgctcccgatatcagagggagattgataaactcagacagcgcccatatgggtcccatcgagagacccagactgagtgtgagtggaccgttgacacctccaagctggtgtttgatgggctgaggaagaaggtgacagcaatgcagctctatgagtgtcagctgatcgacaaaacaaccttggacaaactattgaaggggaagaagtcagtggaagaagttgcttctgaaatccagccattccttcggggtgcaggatctatcgctggagcatctgcttctcctaaggaaaaatactctttggtagaggccaagagaaagaaattaatcagcccagaatccacagtcatgcttctggaggcccaggcagctacaggtggtataattgatccccatcggaatgagaagctgactgtcgacagtgccatagctcgggacctcattgacttcgatgaccgtcagcagatatatgcagcagaaaaagctatcactggttttgatgatccattttcaggcaagacagtatctgtttcagaagccatcaagaaaaatttgattgatagagaaaccggaatgcgcctgctggaagcccagattgcttcagggggtgtagtagaccctgtgaacagtgtctttttgccaaaagatgtcgccttggcccgggggctgattgatagagatttgtatcgatccctgaatgatccccgagatagtcagaaaaactttgtggatccagtcaccaaaaagaaggtcagttacgtgcagctgaaggaacggtgcagaatcgaaccacatactggtctgctcttgctttcagtacagaagagaagcatgtccttccaaggaatcagacaacctgtgaccgtcactgagctagtagattctggtatattgagaccgtccactgtcaatgaactggaatctggtcagatttcttatgacgaggttggtgagagaattaaggacttcctccagggttcaagctgcatagcaggcatatacaatgagaccacaaaacagaagcttggcatttatgaggccatgaaaattggcttagtccgacctggtactgctctggagttgctggaagcccaagcagctactggctttatagtggatcctgttagcaacttgaggttaccagtggaggaagcctacaagagaggtctggtgggcattgagttcaaagagaagctcctgtctgcagaacgagctgtcactgggtataatgatcctgaaacaggaaacatcatctctttgttccaagccatgaataaggaactcatcgaaaagggccacggtattcgcttattagaagcacagatcgcaaccggggggatcattgacccaaaggagagccatcgtttaccagttgacatagcatataagaggggctatttcaatgaggaactcagtgagattctctcagatccaagtgatgataccaaaggattttttgaccccaacactgaagaaaatcttacctatctgcaactaaaagaaagatgcattaaggatgaggaaacagggctctgtcttctgcctctgaaagaaaagaagaaacaggtgcagacatcacaaaagaataccctcaggaagcgtagagtggtcatagttgacccagaaaccaataaagaaatgtctgttcaggaggcctacaagaagggcctaattgattatgaaaccttcaaagaactgtgtgagcaggaatgtgaatgggaagaaataaccatcacgggatcagatggctccaccagggtggtcctggtagatagaaagacaggcagtcagtatgatattcaagatgctattgacaagggccttgttgacaggaagttctttgatcagtaccgatccggcagcctcagcctcactcaatttgctgacatgatctccttgaaaaatggtgtcggcaccagcagcagcatgggcagtggtgtcagcgatgatgtttttagcagctcccgacatgaatcagtaagtaagatttccaccatatccagcgtcaggaatttaaccataaggagcagctctttttcagacaccctggaagaatcgagccccattgcagccatctttgacacagaaaacctggagaaaatctccattacagaaggtatagagcggggcatcgttgacagcatcacgggtcagaggcttctggaggctcaggcctgcacaggtggcatcatccacccaaccacgggccagaagctgtcacttcaggacgcagtctcccagggtgtgattgaccaagacatggccaccaggctgaagcctgctcagaaagccttcataggcttcgagggtgtgaagggaaagaagaagatgtcagcagcagaggcagtgaaagaaaaatggctcccgtatgaggctggccagcgcttcctggagttccagtacctcacgggaggtcttgttgacccggaagtgcatgggaggataagcaccgaagaagccatccggaaggggttcatagatggccgcgccgcacagaggctgcaagacaccagcagctatgccaaaatcctgacctgccccaaaaccaaattaaaaatatcctataaggatgccataaatcgctccatggtagaagatatcactgggctgcgccttctggaagccgcctccgtgtcgtccaagggcttacccagcccttacaacatgtcttcggctccggggtcccgctccggctcccgctcgggatctcgctccggatctcgctccgggtcccgcagtgggtcccggagaggaagctttgacgccacagggaattcttcctactcttattcctactcatttagcagtagttctattgggcactagtagtcagttgggagtggttgctataccttgacttcatttatatgaatttccactttattaaataatagaaaagaaaatcccggtgcttgcagtagagtgataggacattctatgcttacagaaaatatagccatgattgaaatcaaatagtaaaggctgttctggctttttatcttcttagctcatcttaaataagcagtacacttggatgcagtgcgtctgaagtgctaatcagttgtaacaatagcacaaatcgaacttaggatttgtttcttctcttctgtgtttcgatttttgatcaattctttaattttggaagcctataatacagttttctattcttggagataaaaattaaatggatcactgatattttagtcattctgcttctcatctaaatatttccatattctgtattaggagaaaattaccctcccagcaccagcccccctctcaaacccccaacccaaaaccaagcattttggaatgagtctcctttagtttcagagtgtggattgtataacccatatactcttcgatgtacttgtttggtttggtattaatttgactgtgcatgacagcggcaatcttttctttggtcaaagttttctgtttattttgcttgtcatattcgatgtactttaaggtgtctttatgaagtttgctattctggcaataaacttttagactttt

SEQ ID NO: 1860 - DNA, 2680 bp, Homo sapiens
gtcatgttcttcgcgccctggtgtggacactgccagcggctgcagccgacttggaatgacctgggagacaaatacaacagcatggaagatgccaaagtctatgtggctaaagtggactgcacggcccactccgacgtgtgctccgcccagggggtgcgaggataccccaccttaaagcttttcaagccaggccaagaagctgtgaagtaccagggtcctcgggacttccagacactggaaaactggatgctgcagacactgaacgaggagccagtgacaccagagccggaagtggaaccgcccagtgcccccgagctcaagcaagggctgtatgagctctcagcaagcaactttgagctgcacgttgcacaaggcgaccactttatcaagttcttcgctccgtggtgtggtcactgcaaagccctggctccaacctgggagcagctggctctgggccttgaacattccgaaactgtcaagattggcaaggttgattgtacacagcactatgaactctgctccggaaaccaggttcgtggctatcccactcttctctggttccgagatgggaaaaaggtggatcagtacaagggaaagcgggatttggagtcactgagggagtacgtggagtcgcagctgcagcgcacagagactggagcgacggagaccgtcacgccctcagaggccccggtgctggcagctgagcccgaggctgacaagggcactgtgttggcactcactgaaaataacttcgatgacaccattgcagaaggaataaccttcatcaagttttatgctccatggtgtggtcattgtaagactctggctcctacttgggaggaactctctaaaaaggaattccctggtctggcgggggtcaagatcgccgaagtagactgcactgctgaacggaatatctgcagcaagtattcggtacgaggctaccccacgttattgcttttccgaggagggaagaaagtcagtgagcacagtggaggcagagaccttgactcgttacaccgctttgtcctgagccaagcgaaagacgaactttaggaacacagttggaggtcacctctcctgcccagctcccgcaccctgcgtttaggagttcagtcccacagaggccactgggttcccagtggtggctgttcagaaagcagaacatactaagcgtgaggtatcttctttgtgtgtgtgttttccaagccaacacactctacagattctttattaagttaagtttctctaagtaaatgtgtaactcatggtcactgtgtaaacattttcagtggcgatatatcccctttgaccttctcttgatgaaatttacatggtttcctttgagactaaaatagcgttgagggaaatgaaattgctggactatttgtggctcctgagttgagtgattttggtgaaagaaagcacatccaaagcatagtttacctgcccacgagttctggaaaggtggccttgtggcagtattgacgttcctctgatcttaaggtcacagttgactcaatactgtgttggtccgtagcatggagcagattgaaatgcaaaaacccacacctctggaagataccttcacggccgctgctggagcttctgttgctgtgaatacttctctcagtgtgagaggttagccgtgatgaaagcagcgttacttctgaccgtgcctgagtaagagaatgctgatgccataactttatgtgtcgatacttgtcaaatcagttactgttcaggggatccttctgtttctcacggggtgaaacatgtctttagttcctcatgttaacacgaagcccagagcccacatgaactgttggatgtcttccttagaaagggtaggcatggaaaattccacgaggctcattctcagtatctcattaactcattgaaagattccagttgtatttgtcacctggggtgacaagaccagacaggctttcccaggcctgggtatccagggaggctctgcagccctgctgaagggccctaactagagttctagagtttctgattctgtttctcagtagtccttttagaggcttgctatacttggtctgcttcaaggaggtcgaccttctaatgtatgaagaatgggatgcatttgatctcaagaccaaagacagatgtcagtgggctgctctggccctggtgtgcacggctgtggcagctgttgatgccagtgtcctctaactcatgctgtccttgtgattaaacacctctatctcccttgggaataagcacatacaggcttaagctctaagatagataggtgtttgtccttttaccatcgagctacttcccataataaccactttgcatccaacactcttcacccacctcccatacgcaaggggatgtggatacttggcccaaagtaactggtggtaggaatcttagaaacaagaccacttatactgtctgtctgaggcagaagataacagcagcatctcgaccagcctctgccttaaaggaaatctttattaatcacgtatggttcacagataattctttttttaaaaaaacccaacctcctagagaagcacaactgtcaagagtcttgtacacacaacttcagctttgcatcacgagtcttgtattccaagaaaatcaaagtggtacaatttgtttgtttacactatgatactttctaaataaactcttttttttt

SEQ ID NO: 1861 - DNA, 279 bp, Homo sapiens
atggacaggactgtcattcagaaataccacactgtgaatggccacagctgtgaagttaggaaagccctgtcaaagcaagagatggttagtgcttcatccagccaaagaggtcgaagtggttctggaaactttgctggtggtcttagaagtggtttcagtgggaataacaactttggtcgtggaggaaacttccgtggtcgtggggcctttggtggcagccgtggtggtggtggatatgatggcagtggggatggctataatggatatggtaacgattga

SEQ ID NO: 1862 - DNA, 948 bp, Homo sapiens
atgaaggccaactacagcgcagaggagcgctttctcctgctgggtttctccgactggccttccctgcagccggtcctcttcgcccttgtcctcctgtgctacctcctgaccttgacgggcaactcggcgctggtgctgctggcggtgcgcgacccgcgcctgcacacgcccatgtactacttcctctgccacctggccttggtagacgcgggcttcactactagcgtggtgccgccgctgctggccaacctgcgcggaccagcgctctggctgccgcgcagccactgcacggcccagctgtgcgcatcgctggctctgggttcggccgaatgcgtcctcctggcggtgatggctctggaccgcgcggccgcagtgtgccgcccgctgcgctatgcggggctcgtctccccgcgcctatgtcgcacgctggccagcgcctcctggctaagcggcctcaccaactcggttgcgcaaaccgcgctcctggctgagcggccgctgtgcgcgccccgcctgctggaccacttcatctgtgagctgccggcgttgctcaagctggcctgcggaggcgacggagacactaccgagaaccagatgttcgccgcccgcgtggtcatcctgctgctgccgtttgccgtcatcctggcctcctacggtgccgtggcccgagctgtctgttgcatgcggttcagcggaggccggaggagggcggtgggcacgtgtgggtcccacctgacagccgtctgcctgttctacggctcggccatctacacctacctgcagcccgcgcagcgctacaaccaggcacggggcaagttcgtatcgctcttctacaccgtggtcacacctgctctcaacccgctcatctacaccctcaggaataagaaagtgaagggggcagcgaggaggctgctgcggagtctggggagaggccaggctgggcagtga

SEQ ID NO: 1863 - DNA, 2527 bp, Homo sapiens
acttctggggcagccgtgagcagcgggcacacgggcagccacgaaagcagcagcgagggtggtgcaaacacctcataactacaccgaatccagtagcgcctggcgcccccggcgcgcaaggccgcctctactccgcctcatctttgtcccaagtcctttcacagcctgccttcctcaaacggcccgatgcgcccccgtctttgccggagtaagcagaccgccagcagccggcccgcaggtcagtcgaccctctctggatgcaggtcgccgggaaaacccggagcggagcatccctcgggccgggaaacgccctcggcgcgcacccactggcgcgcatgctcagtccgcgcggcggctgcgagtaggaagctccgcgcggcggcgggggcggcgacggcgactggcgggtgggagtggaggcaccggctggcgggcgggggtacagggacggggcaggggctcccgctccaggttccttgaagcacttccgaccgcgaagcccggcgcgagaagcgagctaacccaagagccaacaacgagcgcggagagggcagcggactgagcggagccgccggccagagcgggctcggagcccgggtctccgccgctcgggacccggctaggcggcggcgggggcggcgatgttccactgcatccccctgtggcggtgcaaccgtcatgtggagagcatcgacaagcgccactgctcgctggtctacgtccccgaggagatctaccgctatgcccggagcctggaggagctgctgctggacgccaaccagctccgcgagctgcccgagcaatttttccagctagtcaaattacgaaagcttggacttagtgataatgaaattcagcggctccctccagaaatagcaaacttcatgcagctggtggaactagatgtgtctcgaaatgagattcctgaaattccagaaagcatttcattctgtaaagcactgcaggtagctgacttcagcggaaacccactgactaggttgccagaaagctttcctgaattacagaatttaacatgtctttctgtaaatgacatctcactacagtctctacctgaaaatattggcaatctttataacctggcttcactggaactgagagagaatcttcttacatatcttcctgactctcttacccagctgcgaagactagaagaacttgatttaggaaacaatgaaatatataatttgaatcaattggagccctcttacatctaaaagatctctggttggatggaaatcaactgtcagaattacctcaggaaataggaaatctgaagaacctgctgtgtttagatgtctctgaaaacaggttggaaagacttcctgaagaaatcagtggcctgacttcattaacggatttagtcatttcccagaacttattagaaacgattccggatggcattggaaaactaaagaaactgtcaatcttgaaggtggatcagaatagactcacacagttgcctgaagcagttggggaatgtgaaagtctcactgagttagttcttacagaaaatcagctcctgaccctgcctaaaagcattggaaaactaaagaagttgagcaacttgaatgcagacagaaataaattagtgtccttaccaaaagaggtatgtgcttttagagaaatcacatgataataattatgaagaaataataataatacataagggatcaaaaatgtcaaatgctttgaaaagacgcatgtgttgttttttaaaggtgtgaactctaaatctgtgagtatagagccaactggaggaattatgtcaaagaatgatcatcagtaacattaaggagagttggaaaaggtgaatttataggattttaaatgggagaaagaaagagattgacattttgggtttgatatacagagaatggtgacaccattggcagaaattgataatttgggagtttgacagaggaagtggatgcctttgggtttgatttttgaatttaatgtgaaattaagctccatcccataagcaattggaattataaaaattgatcttgatgcaaccatatttctgggcagagatttacattgggccatgctcatgtcttggatgaggttgaacaaactgttcacaaaggcatacacatagaggaaggtgaatgggaagctaaagccagcttcctaggactttttttttggttagtagtctaagcacgagaaaatgagacatcaccatctgttgtggagagtagctgtatggactgagaggcatttaaattctggcaagggaggtggaaatgctgacaatgaggaggaagcttatagtgggtcaaacaaggaggtgtctagtgtgttgtttaaaaagaaggcttacaattagccaggcgtggtggcgggcgcctgtagtcccagctactcgggaggctgaggcaagagaattgcctgaacccgggaggctaaggttgcagtgagccgagaccacgccactgcactccagcccgggtgacagagcgagactctatctcaaaaaaaaaaaaaaaaaaaaaaaaaaatg

SEQ ID NO: 1864 - protein, 197 aa, Homo sapiens
MFHCIPLWRCNRHVESIDKRHCSLVYVPEEIYRYARSLEELLLDANQLRELPEQFFQLVKLRKLGLSDNEIQRLPPEIANFMQLVELDVSRNEIPEIPESISFCKALQVADFSGNPLTRLPESFPELQNLTCLSVNDISLQSLPENIGNLYNLASLELRENLLTYLPDSLTQLRRLEELDLGNNEIYNLNQLEPSYI

SEQ ID NO: 1865 - DNA, 6976 bp, Homo sapiens
cggtgctggagaagtttgcgctgcggttcgtgagcgcagggtgcgggccccgccggccgctgcgcgcccgctgccatggctttccgcaggaggacgaaaagttacccgctcttcagccaggagttcgtcatccacaaccatgcggacatcggcttctgcctggtgctctgcgtcctcatcgggcttatgttcgaggtcacagccaagactgcctttctatttattttacctcagtataacattagcgtgcctacagcagacagtgagaccgtgcactaccactatggccctaaggacctggtcacaatcttgttctacatcttcatcaccatcatcttgcatgctgtggttcaggagtacattttagataaaatcagcaaacggcttcatctctccaaagtcaaacacagcaagttcaatgaatctggacagctggtcgtctttcatttcacctcggtgatttggtgcttctacgtggtggtgacggaaggatacttaacaaacccaagaagcctctgggaagactacccgcatgtgcacctccccttccaggtgaagtttttctacctatgccagctggcctactggctgcacgcacttcctgagctatacttccagaaggtacggaaggaggaaattccccgccagctccagtatatttgcctgtacctggtgcatatagctggagcatacctcttaaacctgagccgcctgggcctgatcttgctgctgctgcagtactcaactgagttcctcttccacacggctagactcttctactttgcagatgaaaacaacgagaaactgttcagtgcctgggctgctgtttttggggttacccgcctcttcatcctcacccttgccgtgctggccattggctttggactggctcgcatggaaaaccaggcatttgatcccgagaaagggaacttcaacactttgttttgcaggctctgcgtgctgctgctggtgtgtgccgcccaggcctggctcatgtggcgcttcatccactcccagctgcggcactggcgggaatactggaatgagcagagtgcaaagcggagagtcccagccacacccagactaccagccaggctcatcaagagggaatctggttaccatgaaaatggagtggtgaaggcagagaacggaacctccccacggactaagaaactcaagtctccctaaggccaaagtgctaagaacaggaatcctcttggtgggggccgagcagggggcaaggagcccaggccccctccctgcctcctccttcctgcctgtgatgctccgtctcaaacagccgaaacctgtcttgcaatggggggagggggcgtttcgctttccttcttcttggcttcctcttattcttccacaaaccattctcaataaagccaaaaatctttctctttctccccctcaggccacctcctgtcctcactcctgtcctgtgctggcttttctggaacgccaggcgcccatggctggcacctttctgcttgctctgtctcttgccttatggctgctgcttttcctttttacttcctattttcaccttatcttgcaatttttctgtctgatttttacaatgggaggggagctaagattgcagtcctgtccttcggtcccccagggcctgccggtcagaagcctggggctggtaggcccttggtggtcctcatgtggatgggcaagaagagagcggccatctcggatcataatctccttggtgctgattaactgacgagatatatgattccagttctgcatgtaccatcttgaggcacagcagccactgctcgttgtaaatgccaaggcatttggctttgggacgtgacaactcaatccagaaggatggtgtgaactcggttgggtcccgtgactcgagctcctaccagtggctggccgcggattggaagccagcctgctgtcgctctgtggggggggacacgtcttcccactgcttagagcgagagcagagcaaactgcgcagcaggcacctccagaaaggtaatggtggcagaacccacagtggagtcgacctaggcctttctccagcagtcccagtcgccattgctttttcagccattcacaagcattcaaaaccaaaccaaacagcagttcatatacctgcctgagataggctggtcctcacctccagagccagccagccccgtcaggggccaaacttactaccttgacttcatctctagctgcagaaacactaagtctcaagggcttcagccccatgctggtcccttggtgttcagggagggtcacttggaccgctgttcatctggccgcccttgttgagtgttctttggaattgtcgttttttgagcacaactacagcattttagactgcatgaaaccatgactgactgagagtcactctctgggtagatgataggcgcctttctggccccttccctcacagattctttcccctcccctccacctgaagagaaggcctccaagtccttttggtgccttgtgaggacttttagaaggggcgttcagctttaaaaagccggtcctaattacggccggacgcagtagcttacgcctgttatcccagcactttgggaggtcgaggtgggcagatcacctgaggttaggagttcaagaccagcctggccaacatggtgaaaccccatctctactaaaaatacaaaaaattaggtgtagtggcaggcacctgtaatcccagctactcgggaggctgaggcaggagaatcgcttgaacctagaaggcggaggttgcagtgagcggagattgtaccatggcactccagcctggacaacaagagcgaaattctgtctaaaaaaacaaaagtcccaattaagaacctccgaactctgttttgaggcaaaggggagtagttcttggtaggtgcaggaatagtagtgtcatttggaatactggtcatctttctgacatcacagtagaaaccaaaccttggatttagattcaaaaggggggaaatgggtcttttcatcaaggcaactccccttctccaagtcacttacatcatagataaattttagcttcccagtaactgagggatttgtttcctaacgccattggaggccttcatccctctctacgataaggttgcagaaatgggaagagctacccgtggttgcttttgattacccttaggaagtgagacagtgtttttgaaaatatgtatttcccccatttctccctctccttccctgacacttctctgggctgcacagcagaaacgttggtaaaagggcagtttggtttcaacacagcagacctgatatgggatcccttagccactttagtcaaacagccctgacagagtctataattgagttcaggccccccaccttgcctaataactgcaaatcgcatgttcagccagcagcctcctaagcccaccttcctcccccattagagaacacccatcctaggtgctctccaggctgtgtcattggcagggcttcacatgcaggaggcctctctcaggtgagtccaggttaaactgttgagttgtggcttcaacagatatgtatggcatgctgggatgtgccaggtgcctgcgttgtgccagttgctggagaggtagtgtgagcagagcagctgaaatcttgccatcaagcaaccctcattctcatgcctgtaggtttccattgctctgtcccaggacacttgcgtgccagagacgccacaacttcatgtccctgtctcttgcaagctccccgtgctgccagtacttcatgccttggatgtggtcccaccagcccagtggccggggtcagcttaggctctgcttcccagtggacgggtgtgctaagggtttattttatgtaaaaaaaaaaaaaaaaacaaaaaaaaaccctgagaccatgagtggggctggcatcttgccagcctgggcttcagggatgtttggggggggtggttagagggtagttgtagggtactttgtcacccccctccccctgccaccctccctggcacgtttatttcacagcagagccaagtctgtggcaggttgacacagactgtgttgccagagctgaaataattccacttcatcctatgagcgtgttgggctagcttgttctaattttggccactttggctgttttcttcagttttatgcattctctcctgccccaaagtgccaagccatttgtgaaggctctgccagacacctccaagcttgagagctcagcaccatgcaccaagagcaggagaaaagacgtaaacctaccccagcaactgtggcctctcgacagccctggctaactaacttacatttgtggggaagccaacagacacagcaggaggagagggaggtggcgctggtggaccaaggatctgtgctacccgctcccctccttggaggtgcagtgatgatgggagttatttttaccatccgggcgctgatagctgcactattaataaattgcatgtgttccttttgaaggtaggggatggttctgggtgagaggggagcaggctgagccggcgggggatctgctgtcctcccttttgagtcagttctaatcccatgtgtgtctgggccaccagaccgaaatggttgctgagaaacttgtctgttcatgtcccaaggcataacttcccaacatttaagaaaccccaatagacacctctgccctggccacgttcacagatccttctcttgaccggaaaccctgggaccctaagaacccctgaagcttggggtgggtgtgtgcttctggggtctcttttgggacctcctttgtcagtaccccttcttttttctaagcagctaataagaggttgggtgaaagagtgcatctcctcccaggattccacaacaaaattcttatcttccatggatgctttaattggaagtgggttgccgacccccttgtgcctagaaaaggccttcgcttgggtttcctttgtatgcttcagccttcctagttggtttttctaggcctggtgtgagaggtagggaagtctgcacataactaattcttttgcttaagggcctatggcacaagtgcacaaacttcaattcttgatgttctaagctctctcctctaacagagggagtgctgaaagcttttgagtcaagacaatggagtgctcttcctccctcactctgccttccgagcttatggttccttttctcaggagaggattttcaggattattggaggattaggtcattgtcagatgactggaaaacctaaataggatctctctccagctcaaggttgtcccagtgaggaagactttaccaacttctcactctaccccactactcacatgagtgttagctccaccttgcaaaggctgaagaccagttctccccagtgaaagctgcctcattcttttatggagttccctggagtggcagagctataaagacgagcattgggatttgcagtctccatgtagcctttcgtgcttggcaacccctgtagactttttgtcccaagcagattgcgtgcgtgcgcctgtgtgtgagaataagtgccttactttgctgtgtggttttcaacttgtactccgtggccagcccccagttgccagggctcgacggcagccaaggacaccatacctcagtatagttatatataaaagggacacggattgtgacagtttcaccccatttgtttctaaccccgctgcccaggattagggtctgtggtgtgttctgttttgtttttggtttctcccttgtgtcagttctcttctggcccagctgggtggctgtggaagtctgtgaggtggcccaaccacaagcatacctattaagagaagcccagagcttccagcccccacttcgaaaactctcctctggccccacatagcaaactccttctccgttattttccccacccccagattttttttaaaaggcccacttgccgtaacctcttttggtctattttgcttcccattcagcccaaagtttatatgataaaggtgtttacttttacttcccagtctccaagtgctaacacataaacacatacatgtctgactgttgcagaactgttcgagctcctaattcagtgttaccttgttttagtcgcagcaaccctctcccctaccccttgcccgcccacgtttttctcactcttccgggttgtgcaataactctcccagccagtggtcctttccacagcctttctgtcccttaaaacacctgcaactgggggagaaatgggacccatgggagggggagtcgtcatcccttacacaagaaatagccactttccttttgttgtcattcttgtgatcctgggtgggtttctgtggcactcttttagaacatgtagcatcatcttagaggtctatttttaaaaaatgtgttgaagaggaaaaaaccattctcacgatggggcttaagtcattgtccaggaataagattggcgtggtgcccatgacatcaccgtcactctgcctaaaagcactctagagctacttgttcacgtggagaggaaggatattttgcgaagcaacagccgcaggtggagagccctgttcacctgatagggtctagctgtgacagtaaatataataccgctgtttccttgggtacagatttgagtgttcatgtgatgagactgtaaacctcatttttcggttcctctgtttaaaaaaacatctgaaggatgaactaaggctgctggtgccctgagcaactgataatgcaaatgtggacaaagtgtctgttttctactctagcctgttcatatggaccaaatttcaacaaggaactcaaggaaaatttgtacctgccgtatttatgctttcatgtaaaaaagggttggggggaggggtgtctttttgcttttggtgaactttttttcaaaatcatttttccactgtttctgtctggttttaaaacaaattacagttttgtatggattttttaaatgtacattttggaacaaatgatcaaatattttctgaaataacaataaaaggcagaaaatt

SEQ ID NO: 1866 - DNA, 3061 bp, Homo sapiens
cggcacgaggcgactttggtggaggtagttctttggcagcgggcatggcgggtaccgtggtgctggacgatgtggagctgcgggaggctcagagagattacctggacttcctggacgacgaggaagaccagggaatttatcagagcaaagttcgggagctgatcagtgacaaccaataccggctgattgtcaatgtgaatgacctgcgcaggaaaaacgagaagagggctaaccggcttctgaacaatgcctttgaggagctggttgccttccagcgggccttaaaggattttgtggcctccattgatgctacctatgccaagcagtatgaggagttctacgtaggactggaaggcagctttggctccaagcacgtctccccgcggactcttacctcctgcttcctcagctgtgtggtctgtgtggagggcattgtcactaaatgttctctagttcgtcccaaagtcgtccgcagtgtccactactgtcctgctactaagaagaccatagagcgacgttattctgatctcaccaccctggtggcctttccctccagctctgtctatcctaccaaggatgaggagaacaatccccttgagacagaatatggcctttctgtctacaaggatcaccagaccatcaccatccaggagatgccggagaaggccccagccggccagctcccccgctctgtggacgtcattctggatgatgacttggtggataaagcgaagcctggtgaccgggttcaggtggtgggaacctaccgttgccttcctggaaagaagggaggctacacctctgggaccttcaggactgtcctgattgcctgtaatgttaagcagatgagcaaggatgctcagccctctttctctgctgaggatatagccaagatcaagaagttcagtaaaacccgatccaaggatatctttgaccagctggccaagtcattggccccaagtatccatgggcatgactatgtcaagaaagcaatcctctgcttgctcttgggaggggtggaacgagacctagaaaatggcagccacatccgtggggacatcaatattcttctaataggagacccatccgttgccaagtctcagcttctgcggtatgtgctttgcactgcaccccgagctatccccaccactggccggggctcctctggagtgggtctgacggctgctgtcaccacagaccaggaaacaggagagcgccgtctggaagcaggggccatggtcctggctgaccgaggcgtggtttgcattgatgaatttgacaaaatgtctgacatggatcgcacagccatccatgaagtgatggagcagggtcgagtgaccattgccaaggctggcatccatgctcggctgaatgcccgctgcagtgttttggcagctgccaaccctgtctacggcaggtatgaccagtataagactccaatggagaacattgggctacaggactcactgctgtcacgatttgacttgctcttcatcatgctggatcagatggatcctgagcaggatcgggagatctcagaccatgtccttcggatgcaccgttacagagcacctggggagcaggatggcgatgctatgcccttgggtagtgctgtggatatcctggccacagatgatcccaactttagccaggaagatcagcaggacacccagatttatgagaagcatgacaaccttctacatgggaccaagaagaaaaaggagaagatggtgagtgcagcattcatgaagaagtacatccatgtggccaaaatcatcaagcctgtcctgacacaggagtcggccacctacattgcagaagagtattcacgcctgcgcagccaggatagcatgagctcagacaccgccaggacatctccagttacagcccgaacactggaaactctgattcgactggccacagcccatgcgaaggcccgcatgagcaagactgtggacctgcaggatgcagaggaagctgtggagttggtccagtatgcttactttaagaaggttctggagaaggagaagaaacgtaagaagcgaagtgaggatgaatcagagacagaagatgaagaggagaaaagccaagaggaccaggagcagaagaggaagagaaggaagactcgccagccagatgccaaagatggggattcatacgacccctatgacttcagtgacacagaggaggaaatgcctcaagtacacactccaaagacggcagactcacaggagaccaaggaatcccagaaagtggagttgagtgaatccaggttgaaggcattcaaggtggccctcttggatgtgttccgggaagctcatgcgcagtcaatcggcatgaatcgcctcacagaatccatcaaccgggacagcgaagagcccttctcttcagttgagatccaggctgctctgagcaagatgcaggatgacaatcaggtcatggtgtctgagggcatcatcttcctcatctgaggaggcctcgtctctgaacttgggttgtgccgagagagtttgttctgtgtttcccaccctctccctgacccaagtctttgcctctactcccttaacagtgttgaattcaactgaaggcgaggaatgttggtgatgaagctgagttcaggactcggtggaccctttgggaatgggtcatgaaagctgccatggggtgaggaaagaggagacagtgggagaggacaatgactattgcatcttcattgcaaaagcactggctcatccgccctacttcccatcccacacaaacccaattgtaaataacatatgacttctgagtacttttgggggcacaactgttttctgtttgctgtttttttgttttgttttttttctccagagcactttggtctagactaggctttgggtggttccaattggtggagagaagctctgaggcacgtcatgcaggtcaagaaagctttctttgcagtagcaccagttaaggtgaatatgtattgtatcacaaaacaaacccaatatccagatgaatatccgagatgttgaataaacttagccatttcgtacaaaaaaaggggggcccggtaaac

SEQ ID NO: 1867 - protein, 808 aa, Homo sapiens
MAGTVVLDDVELREAQRDYLDFLDDEEDQGIYQSKVRELISDNQYRLIVNVNDLRRKNEKRANRLLNNAFEELVAFQRALKDFVASIDATYAKQYEEFYVGLEGSFGSKHVSPRTLTSCFLSCVVCVEGIVTKCSLVRPKVVRSVHYCPATKKTIERRYSDLTTLVAFPSSSVYPTKDEENNPLETEYGLSVYKDHQTITIQEMPEKAPAGQLPRSVDVILDDDLVDKAKPGDRVQVVGTYRCLPGKKGGYTSGTFRTVLIACNVKQMSKDAQPSFSAEDIAKIKKFSKTRSKDIFDQLAKSLAPSIHGHDYVKKAILCLLLGGVERDLENGSHIRGDINILLIGDPSVAKSQLLRYVLCTAPRAIPTTGRGSSGVGLTAAVTTDQETGERRLEAGAMVLADRGVVCIDEFDKMSDMDRTAIHEVMEQGRVTIAKAGIHARLNARCSVLAAANPVYGRYDQYKTPMENIGLQDSLLSRFDLLFIMLDQMDPEQDREISDHVLRMHRYRAPGEQDGDAMPLGSAVDILATDDPNFSQEDQQDTQIYEKHDNLLHGTKKKKEKMVSAAFMKKYIHVAKIIKPVLTQESATYIAEEYSRLRSQDSMSSDTARTSPVTARTLETLIRLATAHAKARMSKTVDLQDAEEAVELVQYAYFKKVLEKEKKRKKRSEDESETEDEEEKSQEDQEQKRKRRKTRQPDAKDGDSYDPYDFSDTEEEMPQVHTPKTADSQETKESQKVELSESRLKAFKVALLDVFREAHAQSIGMNRLTESINRDSEEPFSSVEIQAALSKMQDDNQVMVSEGIIFLI

SEQ ID NO: 1868 - DNA, 1122 bp, Homo sapiens
atgactgcatccaactcgcaggtgcgccagaactaccaccaggactcagaggccgccatcaaccgccagatcaacctggagctctacgcctcctactttaacctctccatgtcttactactttgaccgtgatgatgcggctttgaagaactttgccaaatactttcttcaccaatctcatgaggagagggagcatgctgagaaactgatgaaactgcagaaccaacaagagtgtgcattacatttggaaaaaaatgtgaatcagtcactactggaactgcacaaactggccactgacaaaaatgacccccatttgtgtgacttcattgagacacattacctgaatgagcagaattgggtgaacgtgaccaacttgcacaagatgggagcacccgaatctggcttggcagaatatctctttgacaagcacaccctgggagaaagagggagcactggaatgtttaattcggacaatgccaatacaagtttacagagaagagagaactttccattgggttttgaaggttctgctgattttcaatgggcagaggtggaggaacagtctgagcagagagaacatcataaacaaaggagtgaatgtgagaaaggcttcaggtcccatcagagtactggcttcactttgactgtagaagatttagttgaagcagtattcaaaagtgtagaacttgtcaagctacctatccagtcctcttgtcttctgaaacagtggttacctgctctggaaaaccttctctctccatcctccaaagctcctggggtacagctttatcagcgcacctatcacactgattctggtctccaaaaactcttcttgctgaaaacagcatacaaaatactttccctcttcaaagcccaatacaacactggaaaagcaatggagaagaaagtactcagtatcttttccccactaaaagttgtactgcaatgcttgaacacaactggaggagccctaggtttatcaaaagtatctgccatttctaaaagaatgtgtttccaaggcatccagaaagagctctttccaactgcaccaaattccatttgctttccacaccctgtcccgacaaggggtgctgcagaagcacaaagccagccagatgcatga

SEQ ID NO: 1869 - protein, 373 aa, Homo sapiens [sequence omitted]

SEQ ID NO: 1870 - DNA, 3250 bp, Homo sapiens
cggacgcgtgggccggttcagccatggggacctctccgagcagcagcaccgccctcgcctcctgcagccgcatcgcccgccgagccacagccacgatgatcgcgggctcccttctcctgcttggattccttagcaccaccacagctcagccagaacagaaggcctcgaatctcattggcacataccgccatgttgaccgtgccaccggccaggtgctaacctgtgacaagtgtccagcaggaacctatgtctctgagcattgtaccaacacaagcctgcgcgtctgcagcagttgccctgtggggacctttaccaggcatgagaatggcatagagaaatgccatgactgtagtcagccatgcccatggccaatgattgagaaattaccttgtgctgccttgactgaccgagaatgcacttgcccacctggcatgttccagtctaacgctacctgtgccccccatacggtgtgtcctgtgggttggggtgtgcggaagaaagggacagagactgaggatgtgcggtgtaagcagtgtgctcggggtaccttctcagatgtgccttctagtgtgatgaaatgcaaagcatacacagactgtctgagtcagaacctggtggtgatcaagccggggaccaaggagacagacaacgtctgtggcacactcccgtccttctccagctccacctcaccttcccctggcacagccatctttccacgccctgagcacatggaaacccatgaagtcccttcctccacttatgttcccaaaggcatgaactcaacagaatccaactcttctgcctctgttagaccaaaggtactgagtagcatccaggaagggacagtccctgacaacacaagctcagcaagggggaaggaagacgtgaacaagaccctcccaaaccttcaggtagtcaaccaccagcaaggcccccaccacagacacatcctgaagctgctgccgtccatggaggccactgggggcgagaagtccagcacgcccatcaagggccccaagaggggacatcctagacagaacctacacaagcattttgacatcaatgagcatttgccctggatgattgtgcttttcctgctgctggtgcttgtggtgattgtggtgtgcagtatccggaaaagctcgaggactctgaaaaaggggccccggcaggatcccagtgccattgtggaaaaggcagggctgaagaaatccatgactccaacccagaaccgggagaaatggatctactactgcaatggccatggtatcgatatcctgaagcttgtagcagcccaagtgggaagccagtggaaagatatctatcagtttctttgcaatgccagtgagagggaggttgctgctttctccaatgggtacacagccgaccacgagcgggcctacgcagctctgcagcactggaccatccggggccccgaggccagcctcgcccagctaattagcgccctgcgccagcaccggagaaacgatgttgtggagaagattcgtgggctgatggaagacaccacccagctggaaactgacaaactagctctcccgatgagccccagcccgcttagcccgagccccatccccagccccaacgcgaaacttgagaattccgctctcctgacggtggagccttccccacaggacaagaacaagggcttcttcgtggatgagtcggagccccttctccgctgtgactctacatccagcggctcctccgcgctgagcaggaacggttcctttattaccaaagaaaagaaggacacagtgttgcggcaggtacgcctggacccctgtgacttgcagcctatctttgatgacatgctccactttctaaatcctgaggagctgcgggtgattgaagagattccccaggctgaggacaaactagaccggctattcgaaattattggagtcaagagccaggaagccagccagaccctcctggactctgtttatagccatcttcctgacctgctgtagaacatagggatactgcattctggaaattactcaatttagtggcagggtggttttttaattttcttctgtttctgatttttgttgtttggggtgtgtgtgtgtgtttgtgtgtgtgtgtgtgtgtgtgtgtgtgtgtgtttaacagagaatatggccagtgcttgagttctttctccttctctctctctcttttttttttaaataactcttctgggaagttggtttataagcctttgccaggtgtaactgttgtgaaatacccaccactaaagttttttaagttccatattttctccattttgccttcttatgtattttcaagattattctgtgcactttaaatttacttaacttaccataaatgcagtgtgacttttcccacacactggattgtgaggctcttaacttcttaaaagtataatggcatcttgtgaatcctataagcagtctttatgtctcttaacattcacacctactttttaaaaacaaatattattactatttttattattgtttgtcctttataaattttcttaaagattaagaaaatttaagaccccattgagttactgtaatgcaattcaactttgagttatcttttaaatatgtcttgtatagttcatattcatggctgaaacttgaccacactattgctgattgtatggttttcacctggacaccgtgtagaatgcttgattacttgtactcttcttatgctaatatgctctgggctggagaaatgaaatcctcaagccatcaggatttgctatttaagtggcttgacaactgggccaccaaagaacttgaacttcaccttttaggatttgagctgttctggaacacattgctgcactttggaaagtcaaaatcaagtgccagtggcgccctttccatagagaatttgcccagctttgctttaaaagatgtcttgttttttatatacacataatcaataggtccaatctgctctcaaggccttggtcctggtgggattccttcaccaattactttaattaaaaatggctgcaactgtaagaacccttgtctgatatatttgcaactatgctcccatttacaaatgtaccttctaatgctcagttgccaggttccaatgcaaaggtggcgtggactccctttgtgtgggtggggtttgtgggtagtggtgaaggaccgatatcagaaaaatgccttcaagtgtactaatttattaataaacattaggtgtttgttaaaaaaaaaaaaaaaaaaaaaaaaaaaaa

SEQ ID NO: 1871 - protein, 655 aa, Homo sapiens
MGTSPSSSTALASCSRIARRATATMIAGSLLLLGFLSTTTAQPEQKASNLIGTYRHVDRATGQVLTCDKCPAGTYVSEHCTNTSLRVCSSCPVGTFTRHENGIEKCHDCSQPCPWPMIEKLPCAALTDRECTCPPGMFQSNATCAPHTVCPVGWGVRKKGTETEDVRCKQCARGTFSDVPSSVMKCKAYTDCLSQNLVVIKPGTKETDNVCGTLPSFSSSTSPSPGTAIFPRPEHMETHEVPSSTYVPKGMNSTESNSSASVRPKVLSSIQEGTVPDNTSSARGKEDVNKTLPNLQVVNHQQGPHHRHILKLLPSMEATGGEKSSTPIKGPKRGHPRQNLHKHFDINEHLPWMIVLFLLLVLVVIVVCSIRKSSRTLKKGPRQDPSAIVEKAGLKKSMTPTQNREKWIYYCNGHGIDILKLVAAQVGSQWKDIYQFLCNASEREVAAFSNGYTADHERAYAALQHWTIRGPEASLAQLISALRQHRRNDVVEKIRGLMEDTTQLETDKLALPMSPSPLSPSPIPSPNAKLENSALLTVEPSPQDKNKGFFVDESEPLLRCDSTSSGSSALSRNGSFITKEKKDTVLRQVRLDPCDLQPIFDDMLHFLNPEELRVIEEIPQAEDKLDRLFEIIGVKSQEASQTLLDSVYSHLPDLL

SEQ ID NO: 1872 - DNA, 2024 bp, Homo sapiens
gcgcggcacttccgctggccgctggctcgctggccgctcctggaggcggcggcgggagcgcagggggcgcgcggcccggggactcgcattccccggttccccctccaccccacgcggcctggaccatggacgccagatggtgggcagtggtggtgctggctgcgttcccctccctaggggcaggtggggagactcccgaagcccctccggagtcatggacccagctatggttcttccgatttgtggtgaatgctgctggctatgccagctttatggtacctggctacctcctggtgcagtacttcaggcggaagaactacctggagaccggtaggggcctctgctttcccctggtgaaagcttgtgtgtttggcaatgagcccaaggcctctgatgaggttcccctggcgccccgaacagaggcggcagagaccaccccgatgtggcaggccctgaagctgctcttctgtgccacagggctccaggtgtcttatctgacttggggtgtgctgcaggaaagagtgatgacccgcagctatggggccacagccacatcaccgggtgagcgctttacggactcgcagttcctggtgctaatgaaccgagtgctggcactgattgtggctggcctctcctgtgttctctgcaagcagccccggcatggggcacccatgtaccggtactcctttgccagcctgtccaatgtgcttagcagctggtgccaatacgaagctcttaagttcgtcagcttccccacccaggtgctggccaaggcctctaaggtgatccctgtcatgctgatgggaaagcttgtgtctcggcgcagctacgaacactgggagtacctgacagccaccctcatctccattggggtcagcatgtttctgctatccagcggaccagagccccgcagctccccagccaccacactctcaggcctcatcttactggcaggttatattgcttttgacagcttcacctcaaactggcaggatgccctgtttgcctataagatgtcatcggtgcagatgatgtttggggtcaatttcttctcctgcctcttcacagtgggctcactgctagaacagggggccctactggagggaacccgcttcatggggcgacacagtgagtttgctgcccatgccctgctactctccatctgctccgcatgtggccagctcttcatcttttacaccattgggcagtttggggctgccgtcttcaccatcatcatgaccctccgccaggcctttgccatccttctttcctgccttctctatggccacactgtcactgtggtgggagggctgggggtggctgtggtctttgctgccctcctgctcagagtctacgcgcggggccgtctaaagcaacggggaaagaaggctgtgcctgttgagtctcctgtgcagaaggtttgagggtggaaagggcctgaggggtgaagtgaaataggaccctcccaccatccccttctgctgtaacctctgagggagctggctgaaagggcaaaatgcaggtgttttctcagtatcacagaccagctctgcagcaggggattggggagcccaggaggcagccttcccttttgccttaagtcacccatcttccagtaagcagtttattctgagccccgggggtagacagtcctcagtgaggggttttggggagtttggggtcaagagagcataggtaggttccagttactcttcccacaagttcccttaagtcttgccctagctgtgctctgccaccttccagactcactcccctctgcaaatacctgcatttcttaccctggtgagaaaagcacaagcggtgtaggctccaatgctgctttcccaggagggtgaagatggtgctgtgctgaggaaaggggatgcagagccctgcccagcaccaccacctcctatgctcctggatccctaggctctgttccatgagcctgttgcaggttttggtactttagaaatgtaactttttgctcttataattttattttattaaattaaattactgca

SEQ ID NO: 1873 - protein, 432 aa, Homo sapiens
MDARWWAVVVLAAFPSLGAGGETPEAPPESWTQLWFFRFVVNAAGYASFMVPGYLLVQYFRRKNYLETGRGLCFPLVKACVFGNEPKASDEVPLAPRTEAAETTPMWQALKLLFCATGLQVSYLTWGVLQERVMTRSYGATATSPGERFTDSQFLVLMNRVLALIVAGLSCVLCKQPRHGAPMYRYSFASLSNVLSSWCQYEALKFVSFPTQVLAKASKVIPVMLMGKLVSRRSYEHWEYLTATLISIGVSMFLLSSGPEPRSSPATTLSGLILLAGYIAFDSFTSNWQDALFAYKMSSVQMMFGVNFFSCLFTVGSLLEQGALLEGTRFMGRHSEFAAHALLLSICSACGQLFIFYTIGQFGAAVFTIIMTLRQAFAILLSCLLYGHTVTVVGGLGVAVVFAALLLRVYARGRLKQRGKKAVPVESPVQKV

SEQ ID NO: 1874 - DNA, 2567 bp, Homo sapiens
ctccggcgcagtgttgggactgtctgggtatcggaaagcaagcctacgttgctcactattacgtataatccttttcttttcaagatgcctgaggaagtgcaccatggagaggaggaggtggagacttttgcctttcaggcagaaattgcccaactcatgtccctcatcatcaataccttctattccaacaaggagattttccttcgggagttgatctctaatgcttctgatgccttggacaagattcgctatgagagcctgacagacccttcgaagttggacagtggtaaagagctgaaaattgacatcatccccaaccctcaggaacgtaccctgactttggtagacacaggcattggcatgaccaaagctgatctcataaataatttgggaaccattgccaagtctggtactaaagcattcatggaggctcttcaggctggtgcagacatctccatgattgggcagtttggtgttggcttttattctgcctacttggtggcagagaaagtggttgtgatcacaaagcacaacgatgatgaacagtatgcttgggagtcttctgctggaggttccttcactgtgcgtgctgaccatggtgagcccattggcaggggtaccaaagtgatcctccatcttaaagaagatcagacagagtacctagaagagaggcgggtcaaagaagtagtgaagaagcattctcagttcataggctatcccatcaccctttatttggagaaggaacgagagaaggaaattagtgatgatgaggcagaggaagagaaaggtgagaaagaagaggaagataaagatgatgaagaaaaacccaagatcgaagatgtgggttcagatgaggaggatgacagcggtaaggataagaagaagaaaactaagaagatcaaagagaaatacattgatcaggaagaactaaacaagaccaagcctatttggaccagaaaccctgatgacatcacccaagaggagtatggagaattctacaagagcctcactaatgactgggaagaccacttggcagtcaagcacttttctgtagaaggtcagttggaattcagggcattgctatttattcctcgtcgggctccctttgacctttttgagaacaagaagaaaaagaacaacatcaaactctatgtccgccgtgtgttcatcatggacagctgtgatgagttgataccagagtatctcaattttatccgtggtgtggttgactctgaggatctgcccctgaacatctcccgagaaatgctccagcagagcaaaatcttgaaagtcattcgcaaaaacattgttaagaagtgccttgagctcttctctgagctggcagaagacaaggagaattacaagaaattctatgaggcattctctaaaaatctcaagcttggaatccacgaagactccactaaccgccgccgcctgtctgagctgctgcgctatcatacctcccagtctggagatgagatgacatctctgtcagagtatgtttctcgcatgaaggagacacagaagtccatctattacatcactggtgagagcaaagagcaggtggccaactcagcttttgtggagcgagtgcggaaacggggcttcgaggtggtatatatgaccgagcccattgacgagtactgtgtgcagcagctcaaggaatttgatgggaagagcctggtctcagttaccaaggagggtctggagctgcctgaggatgaggaggagaagaagaagatggaagagagcaaggcaaagtttgagaacctctgcaagctcatgaaagaaatcttagataagaaggttgagaaggtgacaatctccaatagacttgtgtcttcaccttgctgcattgtgaccagcacctacggctggacagccaatatggagcggatcatgaaagcccaggcacttcgggacaactccaccatgggctatatgatggccaaaaagcacctggagatcaaccctgaccaccccattgtggagacgctgcggcagaaggctgaggccgacaagaatgataaggcagttaaggacctggtggtgctgctgtttgaaaccgccctgctatcttctggcttttcccttgaggatccccagacccactccaaccgcatctatcgcatgatcaagctaggtctaggtattgatgaagatgaagtggcagcagaggaacccaatgctgcagttcctgatgagatcccccctctcgagggcgatgaggatgcgtctcgcatggaagaagtcgattaggttaggagttcatagttggaaaacttgtgcccttgtatagtgtccccatgggctcccactgcagcctcgagtgcccctgtcccacctggctccccctgctggtgtctagtgtttttttccctctcctgtccttgtgttgaaggcagtaaactaagggtgtcaagccccattccctctctactcttgacagcaggattggatgttgtgtattgtggtttattttattttcttcattttgttctgaaattaaagtatgcaaaataaagaatatgccgttttaaaaaaaaaaaaaaaaaaaaaaaaaaaaa

SEQ ID NO: 1875 - protein, 724 aa, Homo sapiens
MPEEVHHGEEEVETFAFQAEIAQLMSLIINTFYSNKEIFLRELISNASDALDKIRYESLTDPSKLDSGKELKIDIIPNPQERTLTLVDTGIGMTKADLINNLGTIAKSGTKAFMEALQAGADISMIGQFGVGFYSAYLVAEKVVVITKHNDDEQYAWESSAGGSFTVRADHGEPIGRGTKVILHLKEDQTEYLEERRVKEVVKKHSQFIGYPITLYLEKEREKEISDDEAEEEKGEKEEEDKDDEEKPKIEDVGSDEEDDSGKDKKKKTKKIKEKYIDQEELNKTKPIWTRNPDDITQEEYGEFYKSLTNDWEDHLAVKHFSVEGQLEFRALLFIPRRAPFDLFENKKKKNNIKLYVRRVFIMDSCDELIPEYLNFIRGVVDSEDLPLNISREMLQQSKILKVIRKNIVKKCLELFSELAEDKENYKKFYEAFSKNLKLGIHEDSTNRRRLSELLRYHTSQSGDEMTSLSEYVSRMKETQKSIYYITGESKEQVANSAFVERVRKRGFEVVYMTEPIDEYCVQQLKEFDGKSLVSVTKEGLELPEDEEEKKKMEESKAKFENLCKLMKEILDKKVEKVTISNRLVSSPCCIVTSTYGWTANMERIMKAQALRDNSTMGYMMAKKHLEINPDHPIVETLRQKAEADKNDKAVKDLVVLLFETALLSSGFSLEDPQTHSNRIYRMIKLGLGIDEDEVAAEEPNAAVPDEIPPLEGDEDASRMEEVD

SEQ ID NO: 1876 - DNA, 2162 bp, Homo sapiens
gggctgcgctctccagctgtggctatggccccagccccgagatgaggagggagagaactaggggcccgcaggcctgggaatttccgtcccccaccaagtccggatgctcactccaaagtctcagcaggcccctgagggagggagctgtcagccagggaaaaccgagaacaccatcaccatgacaaccagtcaccagcctcaggacagatacaaagctgtctggcttatcttcttcatgctgggtctgggaacgctgctcccgtggaattttttcatgacggccactcagtatttcacaaaccgcctggacatgtcccagaatgtgtccttggtcactgctgaactgagcaaggacgcccaggcgtcagccgcccctgcagcacccttgcctgagcggaactctctcagtgccatcttcaacaatgtcatgaccctatgtgccatgctgcccctgctgttattcacctacctcaactccttcctgcatcagaggatcccccagtccgtacggatcctgggcagcctggtggccatcctgctggtgtttctgatcactgccatcctggtgaaggtgcagctggatgctctgcccttctttgtcatcaccatgatcaagatcgtgctcattaattcatttggtgccatcctgcagggcagcctgtttggtctggctggccttctgcctgccagctacacggcccccatcatgagtggccagggcctagcaggcttctttgcctccgtggccatgatctgcgctattgccagtggctcggagctatcagaaagtgccttcggctactttatcacagcctgtgctgttatcattttgaccatcatctgttacctgggcctgccccgcctggaattctaccgctactaccagcagctcaagcttgaaggacccggggagcaggagaccaagttggacctcattagcaaaggagaggagccaagagcaggcaaagaggaatctggagtttcagtctccaactctcagcccaccaatgaaagccactctatcaaagccatcctgaaaaatatctcagtcctggctttctctgtctgcttcatcttcactatcaccattgggatgtttccagccgtgactgttgaggtcaagtccagcatcgcaggcagcagcacctgggaacgttacttcattcctgtgtcctgtttcttgactttcaatatctttgactggttgggccggagcctcacagctgtattcatgtggcctgggaaggacagccgctggctgccaagcctggtgctggcccggctggtgtttgtgccactgctgctgctgtgcaacattaagccccgccgctacctgactgtggtcttcgagcacgatgcctggttcatcttcttcatggctgcctttgccttctccaacggctacctcgccagcctctgcatgtgcttcgggcccaagaaagtgaagccagctgaggcagagaccgcaggagccatcatggccttcttcctgtgtctgggtctggcactgggggctgttttctccttcctgttccgggcaattgtgtgacaaaggatggacagaaggactgcctgcctccctccctgtctgcctcctgccccttccttctgccaggggtgatcctgagtggtctggcggttttttcttctaactgacttctgctttccacggcgtgtgctgggcccggatctccaggccctggggagggagcctctggacggacagtggggacattgtgggtttggggctcagagtcgagggacggggtgtagcctcggcatttgcttgagtttctccactcttggctctgactgatccctgcttgtgcaggccagtggaggctcttgggcttggagaacacgtgtgtctctgtgtatgtgtctgtgtgtctgcgtccgtgtctgtcagactgtctgcctgtcctggggtggctaggagctgggtctgaccgttgtatggtttgacctgatatactccattctcccctgcgcctcctcctctgtgttctctccatgtccccctcccaactccccatgcccagttcttacccatcatgcaccctgtacagttgccacgttactgccttttttaaaaatatatttgacagaaaccaggtgccttcagaggctctctgatttaaataaacctttcttgttttttt

SEQ ID NO: 1877 - DNA, 732 bp, Homo sapiens
cacatgctgcacgcgcatctcgcccccaggggcactgcctggaagattcaggagcctgggcggccttcgcttactctcacctgcttctgagttgcccaggagaccactggcagatgtcccggcgaagagaagagacacattgttggaagaagcagcccatgacagctccccttcctgggactcgccctcatcctcttcctgctccccttcctggggtgcagcctaaaaggacctatgtcctcacaccattgaaaccactagttctgtccccccaggagacctggttgtgtgtgtgtgagtggttgaccttcctccatcccctggtccttcccttcccttcccgaggcacagagagacagggcaggatccacgtgcccattgtggaggcagagaaaagagaaagtgttttatatacggtacttatttaatatccctttttaattagaaattaaaacagttaatttaattaaagagtagggttttttttcagtattcttggttaatatttaatttcaactatttatgagatgtatcttttgctctctcttgctctcttatttgtaccggtttttgtatatttgaacagatatttaattttgctaacactcagctctgccctccccgatcccctggctccccagcacacattcctttgaaataaggtttcaatatacatctacatactatatatatatttggcaacttgtatttgtgtgtatatatatatatata

SEQ ID NO: 1878 - DNA, 785 bp, Homo sapiens
gcgcgagccgcgccggccccggtcgggcctccgaaaccatgaactttctgctgtcttgggtgcattggagccttgccttgctgctctacctccaccatgccaagtggtcccaggctgcacccatggcagaaggaggagggcagaatcatcacgaagtggtgaagttcatggatgtctatcagcgcagctactgccatccaatcgagaccctggtggacatcttccaggagtaccctgatgagatcgagtacatcttcaagccatcctgtgtgcccctgatgcgatgcgggggctgctgcaatgacgagggcctggagtgtgtgcccactgaggagtccaacatcaccatgcagattatgcggatcaaacctcaccaaggccagcacataggagagatgagcttcctacagcacaacaaatgtgaatgcagaccaaagaaagatagagcaagacaagaaaaaaaatcagttcgaggaaagggaaaggggcaaaaacgaaagcgcaagaaatcccggtataagtcctggagcgtgtacgttggtgcccgctgctgtctaatgccctggagcctccctggcccccatccctgtgggccttgctcagagcggagaaagcatttgtttgtacaagatccgcagacgtgtaaatgttcctgcaaaaacacagactcgcgttgcaaggcgaggcagcttgagttaaacgaacgtacttgcagatgtgacaagccgaggcggtgagccgggcaggaggaaggagcctccctcagggtttcgggaaccagatct

SEQ ID NO: 1879 - DNA, 2322 bp, Homo sapiens
taccccttcatgctccagtgcaccccaggcttcgtggccagcctgggaaactgtctctaccctggtctcccttcagatcagcttctagaaatgtttcgtggctacagtggcagcactgttttttccatgatgcaagcagtttgccctcttgggcggggttatcagtggctggcagggctggcacagcgtgtccgcccactgccacctgtgggttccaggagggcccagcccctgtgctgatgcccaccaccttctcagctcatgtctggggaagaggactggcagggggaaaggtgcctcctcctgaaaggtgcctcctctgtttttgcctaatataggcttgggaacactttgatgtcagctaattctgactcctttacttactagctgtgcggccttggggcaacttacttagcctctttgagcctcctgttccccatctgtaaaatggaatctcaatagtgtctaatagtaccatgtggagaaacttgtgtgaaatgatagctgtggactactgtacacagtactcaggatgtagtaagtgctcaataaacagctgttggtatggttgacgttatggtagtggttgtggggaggacgtaggaaactggagactagcttggcaaagctggctcttcctccttttagggaaagcttagagcatccccatggggtatacccatactcagactgtcctctggcatcgaggttggcccaggattcagttcagctgtcacagtgaggtggcgggatcagatgtggcaggccatgtcccttggaacttgagtacatcgtgtgatctctggaatgaaaacaggccttcaccagtgttgatggtggaaagcttagggaagtgcttcaaacacagtaggagggacttacgttagattttggaaggacttgcctgattcggaagctccaaagagtggcattacagagctgggtggagagaggggctagccatcttttgtgtcgcccaccgggctcatgtgtcatcgcctctcatgcagtggtgaagttcatggatgtctatcagcgcagctactgccatccaatcgagaccctggtggacatcttccaggagtaccctgatgagatcgagtacatcttcaagccatcctgtgtgcccctgatgcgatgcgggggctgctgcaatgacgagggcctggagtgtgtgcccactgaggagtccaacatcaccatgcaggtgggcatctttgggaagtggggcaagggggggatagggaggggggtaacactttgggaacaggtggtcccaggtcgtttcctggctagatttgccttgtctggctcctgcccctgagttgcacaggggaggtatggtggggtcttgccttctgtggagaagatgcttcattcccagcccaggttcccagcaagccccaaccatctccttctccctgatggttgcccatgggctcaggaggggacagatggatgcctgtgtcaggagcccctctctccctctcttggagagagtcctgagtgcccccccttcttgggggctttgtttgggaagctggatgagcctggtccatggagagtttaaaaagtcttttggtgttacctggtaatggggcacatctcagcccagatagggtgggagggagctgtgaaacacagggagggggttgctttcgggtatctactaggagtcagggtgaagcctagagaggatgaaagaaggggaggggatggggagtggtaagaacctaggatttgaattcccagcctggccaacccttgcagccatgtcttggcctcaagtggaacaagggctccttgaggccagcagggttgggggagttggggtgggcctgagcctctttcctgctagagctcttggtcctccctgcctccaccacccatccctgctctgcagaacccctgggtgctgagtggcaggagccccagggttgtcccatctgggtatggctggctgggtcactaacctctgtgatctgcttccttcctttccagattatgcggatcaaacctcaccaaggccagcacataggagagatgagcttcctacagcacaacaaatgtgaatgcaggtgaggatgtagtcacggattcattatcagcaagtggctgcagggtgcctgatctgtgccagggttaagcatgctgtactttttggcccccgtccagcttcccgctatgtgacctttggcattttacttcaatgtgcctcagtttctacatctgtaaaatgggcacaatagtagtatacttcatagcattgttataatgattaaacaagttatatatgaaaagattaaaacagtgttgctccat

SEQ ID NO: 1880 - DNA, 1060 bp, Homo sapiens
aggtttttgaagatggcggccctcaaggctctggtgtccggctgtgggcggcttctccgtgggctactagcgggcccggcagcgaccagctggtctcggcttccagctcgcgggttcagggaagtggtggagacccaagaagggaagacaactataattgaaggccgtatcacagcgactcccaaggagagtccaaatcctcctaacccctctggccagtgccccatctgccgttggaacctgaagcacaagtataactatgacgatgttctgctgcttagccagttcatccggcctcatggaggcatgctgccccgaaagatcacaggcctatgccaggaagaacaccgcaagatcgaggagtgtgtgaagatggcccaccgagcaggtctattaccaaatcacaggcctcggcttcctgaaggagttgttccgaagagcaaaccccaactcaaccggtacctgacgcgctgggctcctggctccgtcaagcccatctacaaaaaaggcccccgctggaacagggtgcgcatgcccgtggggtcaccccttctgagggacaatgtctgctactcaagaacaccttggaagctgtatcactgacagagagcagtgcttccagagttcctcctgcacctgtgctggggagtaggaggcccactcacaagcccttggccacaactatactcctgtcccaccccaccacgatggcctggtccctccaacatgcatggacaggggacagtgggactaacttcagtacccttggcctgcacagtagcaatgctgggagctagaggcaggcagggcagttgggtcccttgccagctgctatggggcttaggccatgctcagtgctggggacaggagttttgcccaacgcagtgtcataaactgggttcatgggcttacccattgggtgtgcgctcactgcttgggaagtgcagggggtcctgggcacattgccagctgggtgctgagcattgagtcactgatctcttgtgatggggccaatgagtcaattgaattcatgggccaaacaggtcccatcctcttcatg

SEQ ID NO: 1881 - protein, 196 aa, Homo sapiens
MAALKALVSGCGRLLRGLLAGPAATSWSRLPARGFREVVETQEGKTTIIEGRITATPKESPNPPNPSGQCPICRWNLKHKYNYDDVLLLSQFIRPHGGMLPRKITGLCQEEHRKIEECVKMAHRAGLLPNHRPRLPEGVVPKSKPQLNRYLTRWAPGSVKPIYKKGPRWNRVRMPVGSPLLRDNVCYSRTPWKLYH

SEQ ID NO: 1882 - DNA, 5209 bp, Homo sapiens
agctgtcgtgcctcgtggtcccgggactgcagtggtgtgcgctctcggcgcgtggcgctaggcatggcgatggatcaagtaaacgcgctgtgcgagcagctggtgaaagcggtgacggtcatgatggaccccaactccacccagcgctaccggctggaagccctcaagttttgtgaggagtttaaagaaaagtgtcctatctgtgtcccctgtggcttgaggttggctgagaaaacacaagttgccatcgtcagacattttggccttcagatcctggaacacgttgtcaagtttcggtggaacggcatgtctcgattggagaaggtgtatctgaagaacagtgtcatggagctgattgcaaatggaacattgaacattttggaagaggagaaccatattaaagatgctctgtctcgaattgtagtggaaatgatcaagcgagagtggccacagcattggcctgacatgctaatagaattggacactctttccaaacaaggggaaacacagacagaattggtgatgtttatccttttgcgactggcagaggatgtagtgacttttcagacacttccccctcaaagaagaagggacatccagcaaacattaacccagaacatggaaaggatcttcagttttctgcttaacacacttcaagaaaatgtaaacaagtatcagcaagtgaagacagatacttctcaggagtcaaaggcgcaagcaaactgtcgagtaggagttgcagcactgaatactctagcaggctatattgactgggtgtctatgagtcacatcactgctgaaaactgtaaactcctggagatactgtgtttgctgttgaatgaacaggaacttcagttgggagccgctgagtgtcttctcattgcagtcagcagaaaaggcaagttggaagaccggaagcccttgatggtcttatttggagatgttgccatgcattatatactctccgccgcacagactgctgatggaggaggtttggtagaaaaacactacgtctttctgaagaggctctgtcaggtgttgtgtgcgctgggcaatcagctgtgtgcattgctgggtgcagattctgatgtagaaacaccatcaaactttggaaaatacctggaatcttttcttgctttcacaacccatccaagtcagtttctacgctcttcaactcagatgacttggggagccctcttcaggcatgaaatcctgtcccgtgatcctttgctattagcaataataccaaaatatcttcgtgcttccatgactaacttggtcaagatgggctttccttctaaaacagacagccctagctgtgaatattctcggtttgattttgatagcgatgaggacttcaatgctttcttcaactcctcccgagcacaacaaggagaggtgatgaggttggcatgtcgtttggatcccaaaactagcttccagatggctggggagtggctaaagtatcaactatcaacttttcttgatgctggttctgtgaattcttgttctgcagttggaactggagaaggaagcctctgttccgtcttctcaccttcattcgtgcagtgggaagccatgactctttttttggaaagtgttatcacccagatgtttcgaacactaaatagagaagaaattcctgttaatgatggaatagagctattgcagatggttctgaactttgataccaaggatcccctcatcctgtcctgcgtccttactaatgtctctgcactctttccatttgtcacctacagaccagagttcctgccccaggtcttctctaagctattttcatctgtcacttttgaaactgttgaagaaagtaaggcccccagaacccgggcagtgaggaatgtgaggaggcatgcttgttcctccatcatcaagatgtgtcgtgactacccccagcttgtgctgcccaattttgacatgctttataaccatgtgaagcaactcctctccaatgagctactcctgacacaaatggagaagtgtgccctcatggaagccctggttctcattagcaaccaatttaagaactacgagcgtcagaaggtgttcctagaggagctgatggcaccagtggccagcatctggctttctcaagacatgcacagagtgctgtcagatgttgatgctttcattgcgtatgtgggtacagatcagaagagctgtgacccaggcctggaggatccgtgtggcttaaaccgtgcacgaatgagcttttgtgtatacagcattctgggtgtggtgaaacgaacttgctggcccactgacctagaagaggccaaagctgggggatttgtggtgggttatacatccagtggaaatccaatcttccgtaacccctgcacagagcagattctgaaacttcttgacaatttgcttgcgcttataagaacccacaatacattatatgcaccagaaatgctagccaaaatggcagagcctttcaccaaggctctggatatgcttgacgcggaaaaatctgctatattaggattacctcaacctctcttggaactcaatgactctcctgtcttcaaaaccgtcttggaaagaatgcagcgtttcttctctaccctctatgaaaactgttttcatatcctagggaaggcaggcccttccatgcagcaagacttctatactgtggaggaccttgctacccagcttctcagctcagcctttgtcaacttgaacaatattcctgactaccgactcagacccatgcttcatgtctttgtaaagcctctggtgctcttctgtcccccagagcactatgaagccctggtatcccccatcctcggacctcttttcacctacctccatatgaggctttctcagaaatggcaagttatcaaccaaaggagcctgctgtgtggagaagatgaggctgcagatgaaaacccagagtctcaagagatgctggaggagcaactggtgaggatgttaacccgagaagtcatggacctaatcacggtttgctgtgtttcaaagaagggtgctgaccacagtagtgctcccccagcagatggagacgatgaagaaatgatggccacagaggtcaccccctcagctatggcagagcttacagacctgggcaaatgtctgatgaagcatgaggatgtttgtacagcgctattaattacagccttcaattccctggcctggaaagatactctgtcctgccagaggacaacctcacagctctgctggcctctcctcaaacaagtgctgtcagggacactgctcgcagatgcagttacgtggcttttcaccagtgtgctgaaaggcttacagatgcacgggcagcacgacgggtgcatggcttccctggtccatctggccttccagatatacgaggcactgcgccccaggtacctggagataagagctgtaatggagcaaatccctgaaatacagaaggactcactggaccagtttgactgcaagcttttaaacccctccctgcagaaagtggctgacaagcgccgaaaggaccaattcaaacgcctcattgctggttgcattgggaaacccttgggagagcagttccgaaaagaagttcacattaagaatcttccctcacttttcaaaaaaacaaagccaatgctggagacggaggtgctggacaatgatgggggtggcctggccaccatctttgaaccctgaatcaagcttttgggcatccttcctcggcctttcttgtcatctcttctttccctttgtagccgatctctaggcccttcttgcactgccacctcactttccaccactgtcagcctggaaagagatccaggtctggagctggagagaacaggccctgtgcaggaccagaagtaattatactaaagtatcaagaaagggagttagggcttaaactattctgtctagatgtcccagatagttcccattctacttggagatttggcttttccaagaaaagctagagcagagcagcccttctcccacaagccctcccacccccgtgcagccacatacctgtacagaatggtaactaagggtgctgtgcccaaccctgcgactagcaaggctcgcagcaagagcacagccctcaactacttgtgccagagtttctcttggaccactccaactcccactgagcccttttgctgctgggctggcaggaaactttccccactccctaaggggcatgtctgggttaggtgctaagtgctgaagagaacttggtcagttctctcaactttgctttgggcaagaatctggtcacctgatgggatccatggtacaggctactgctaaacttggcacagtatcaagtatagtacctccaaggaccagggctgggaagtctttagtgctaacatcccctttagagttcacacatcttgcccttccatgaatgacccctcagtctggcctccccagcctcaaggtccactcaggcacaagagccacagtaccctagatagtgtcacatgacaccgttgtcatccaaggataatacagaccaactaggctacatctgtgatgagcagctagcaaagccgctggtcttctcctaggactaagtccaggtgccttccacaatctcatggtctttcaggtccctggttacttttctcaaaggccatttccaaaagaatacatgccttcacatcacaacctgtactgtgagtccattctagaggtcactgaaaggccctgtaaagagaggacatggatacgggacctggccctgaggttattactggccgtaaggcagagttaatccatacagaaaccagtgtgtccatgtgctctgcacaaaaacagacctgttgtccatccagtccactgacaagagggtttccccgagagccgaagtggactgaagctacagtttttagctggtgcgggccacaggcagggtcagattgagaagaagcaaagctggggaagcagaagttgggagtcttgtgttgctccctcttcctgtgtggtgctctgggtttctgtggatcgtgaaggcgatctcaagagtgtttccctccaaacctgatagctgcctattcctgtctggttggggctgtggaggatgtagttgtatttattgcattgtaatatttttaacatcctgtgacttcatgctagaaattttctattgtttatagaaactttttgtagaaacattaactctaaagcacatctgcatgtcagtaaaaatctcagtttcgtacag

SEQ ID NO: 1883 - DNA, 751 bp, Homo sapiens
caccaaatggcggatgacgccggtgcagtgggggggcctggaggccctggtggccctgggatggggaaccgcggtggcttccgcagaggtttcgccagtggcatccggggccggggtcgcagccgtggaccgggccggggctgaggccgcggagctcgcggaggcaaggccaaagataaggagtggatgcccgtcaccaagctgggccgcttggtcaaggacatgaagatcaagtccctggaggagatctatctcttctccctgcccattaaggaatcagagatcattgactttttcctgggggcctctctcaaggatgaggttttgaagattatgccagtgcagaagcagacccgtgctggccagcgcaccaggttcaaggtgacaggccgccgtggctctgtgctggtgcgcctcatccctgcacccaggggcactggcattgtctccgcacctgtgcccaagaagctgctcatgatggctggtatcgatgactgctacacctcagcccagggctgcactgccaccctgggcaacttcgccaaggccacctttgatgccatttctaagacctacagctacctgacccccgacctctggaaggagactgtatttaccaagtctccctatcaggaattcactgaccacctcgtcaagacccacaccagagtctctgtgcagcagacccaggctccagctgtggctacaacatagggtttttatacaagaaaaataaagtgaattaagcgtg

SEQ ID NO: 1884 - DNA, 583 bp, Homo sapiens
cgcggagctcgcggaggcaaggccaaagataaggagtggatgcccgtcaccaagctgggccgcttggtcaaggacatgaagatcaagtccctggaggagatctatctcttctccctgcccattaaggaatcagagatcattgactttttcctgggggcctctctcaaggatgaggttttgaagattatgccagtgcagaagcagacccgtgctggccagcgcaccagggctctccattgtccccgtgcacagaggctactaggggaacaagatcggcaagccccacaccgtcccctgcaaggtgacaggccgccgtggctctgtgctggtgcgcctcatccctgcacccaggggcactggcattgtctccgcacctgtgcccaagaagctgccatttctaagacctacagctacctgacccccgacctctggaaggagactgtatttaccaagtctccctatcaggaattcactgaccacctcgtcaagacccacaccagagtctctgtgcagcagacccaggctccagctgtggctacaacatagggtttttatacaagaaaaataaagtgaattaagcgtg

SEQ ID NO: 1885 - protein, 125 aa, Homo sapiens
MPVTKLGRLVKDMKIKSLEEIYLFSLPIKESEIIDFFLGDSLKDEVLKIMPVQKQTRAGQRTRLHCPRAQRLLGEQDRQAPHRPLQGDRPLRLCAGAPHPCTQGHWHRLRTCAQELMPSLRPTAT

SEQ ID NO: 1886 - DNA, 1505 bp, Homo sapiens
gtgttccggccgatcccacctcttctcgaccctggacgtctaccttccggaggcccacatcttgcccactccgcgcgcggggctagcgcgggtttcagcgacgggagccctcaagggacatggcaactacagcggcgccggcgggcggcgcccgaaatggagctggcccggaatggggagggttcgaagaaaacatccagggcggaggctcagctgtgattgacatggagaacatggatgatacctcaggctctagcttcgaggatatgggtgagctgcatcagcgcctgcgcgaggaagaagtagacgctgatgcagctgatgcagctgctgctgaagaggaggatggagagttcctgggcatgaagggctttaagggacagctgagccggcaggtggcagatcagatgtggcaggctgggaaaagacaagcctccagggccttcagcttgtacgccaacatcgacatcctcagaccctactttgatgtggagcctgctcaggtgcgaagcaggctcctggagtccatgatccctatcaaggtggtcaacttcccccagaaaattgcaggtgaactctatggacctctcatgctggtcttcactctggttgctatcctactccatgggatgaagacgtctgacactattatccgggagggcaccctgatgggcacagccattggcacctgcttcggctactggctgggagtctcatccttcatttacttccttgcctacctgtgcaacgcccagatcaccatgctgcagatgttggcactgctgggctatggcctctttgggcattgcattgtcctgttcatcacctataatatccacctccacgccctcttctacctcttctggctgttggtgggtggactgtccacactgcgcatggtagcagtgttggtgtctcggaccgtgggccccacacagcggctgctcctctgtggcaccctggctgccctacacatgctcttcctgctctatctgcattttgcctaccacaaagtggtagaggggatcctggacacactggagggccccaacatcccgcccatccagagggtccccagagacatccctgccatgctccctgctgctcggcttcccaccaccgtcctcaacgccacagccaaagctgttgcggtgaccctgcagtcacactgaccccacctgaaattcttggccagtcctctttcccgcagctgcagagaggaggaagactattaaaggacagtcctgatgacatgtttcgtagatggggtttgcagctgccactgagctgtagctgcgtgagtacctccttgatgcctgtcggcacttctgaaaggcacaaggccaagaactcctggccaggactgcaaggctctgcagccaatgcagaaaatgggtcagctcctttgagaacccctccccacctaccccttccttcctctttatctctcccacattgtcttgctaaatatagacttggtaattaaaatgttgattgaagtctgg

SEQ ID NO: 1887 - protein, 350 aa, Homo sapiens
MATTAAPAGGARNGAGPEWGGFEENIQGGGSAVIDMENMDDTSGSSFEDMGELHQRLREEEVDADAADAAAAEEEDGEFLGMKGFKGQLSRQVADQMWQAGKRQASRAFSLYANIDILRPYFDVEPAQVRSRLLESMIPIKVVNFPQKIAGELYGPLMLVFTLVAILLHGMKTSDTIIREGTLMGTAIGTCFGYWLGVSSFIYFLAYLCNAQITMLQMLALLGYGLFGHCIVLFITYNIHLHALFYLFWLLVGGLSTLRMVAVLVSRTVGPTQRLLLCGTLAALHMLFLLYLHFAYHKVVEGILDTLEGPNIPPIQRVPRDIPAMLPAARLPTTVLNATAKAVAVTLQSH

SEQ ID NO: 1888 - DNA, 1365 bp, Homo sapiens
gcggaagcggcgccattcgtcttccgagcgctactgccagctgatgccgggagctaactaccgcgccggggccggggccggggccggggcccgacgtccccgcggggcccgggaccgcgaggaggacggcgggggcctggagcccgcggccgtggcccgcgacctattgaggggcacatctaacatgtcatttgaggagctgttggaattgcagagccaagtggggactaagacgtacaaacaattggtagctggaaatagtcctaagaaacaagcttctagaccacctatccaaaatgcatgtgttgcagataagcacaggcctctggaaatgtcagccaagatccgagtaccatttttacgtcaggttgttcccattagtaaaaaggtagcccgggaccctcgctttgatgatctgtcaggggaatataatcctgaggtgtttgacaaaacataccaattcttgaatgacatccgagcgaaagagaaagagttgaagaagcacctttcaggagaggagcatgagaaactgcagcaactgcttcagcgaatggagcagcaagaaatggcacagcaggaacgaaagcaacagcaggagctgcacctggccctgaagcaagaacgtcgggctcaggcccagcagggccatcggccatacttcctgaaaaaatctgagcagcgccagttggcactagctgagaagttcaaggagctgaaacgcagcaagaaattggagaacttcttgagtcgaaagaggcgacgaaatgcaggcaaggacaggagacatctccctttgagcaaagagtaataaggaactatcctctgctctgccactgccccagggagacatggatctgtgaggacagatttggccacggctggtttccgttcaagggcaaggatcacagctgcccttgaatctcattgcctcagagaagactagagggctcttggactatccctagggctacacaagaatagttcagccttctgccatgccacacagcctcagcttgaatctggttcattgcgtcctcgtgttcttctctcatccttgccttaaaccagggattctgataccgaagaagaggggccaatgaaaaccatggagtctgttcgtgactcccagggctgggacattatgtaggagccacttcataaacattctctttactcatctttttattctgttttttgtggccttctttttgtgtttcccccccgaaacagagtctcgctctgtcacccaggctagagtacagtggtgcaatctcgcctcactgcaacctccacctcccaggttcaagtgattcttgtgcctcagcctcccgagtagctgacatccgccaccaagcccagctaatt

SEQ ID NO: 1889 - protein, 254 aa, Homo sapiens
MPGANYRAGAGAGAGARRPRGARDREEDGGGLEPAAVARDLLRGTSNMSFEELLELQSQVGTKTYKQLVAGNSPKKQASRPPIQNACVADKHRPLEMSAKIRVPFLRQVVPISKKVARDPRFDDLSGEYNPEVFDKTYQFLNDIRAKEKELKKHLSGEEHEKLQQLLQRMEQQEMAQQERKQQQELHLALKQERRAQAQQGHRPYFLKKSEQRQLALAEKFKELKRSKKLENFLSRKRRRNAGKDRRHLPLSKE

SEQ ID NO: 1890 - DNA, 1879 bp, Homo sapiens
gcttggctgtgtttatctcgttggggactaaggcgtcggttggcgcgcaacgggttctaggctgcaggcagctcgaggacccgcggccccgccccggctcggcctggcagatagcagaggcagcaggccgtgccgggggggcatgttgctgtaaccagtggcccaggggatgttacggtggacagtgcacctggagggcgggccccgcagggtgaaccatgctgcagtggctgtcgggcatcgggtatactccttcgggggttactgctctggtgaagactatgagacactgcgtcagatagatgtgcacattttcaatgcagtgtccttgcgttggacaaagctgcccccggtgaagtctgccatccgtgggcaagctcctgtggtaccctacatgcgctatggacactcaaccgtcctcatcgacgacacagtcctcctttggggcgggcggaatgacaccgaaggggcctgcaatgtgctctatgcctttgacgtcaatacgcacaagtggttcacaccccgagtgtcagggacagttcctggggcccgggatggacattcagcctgtgtcctaggcaagatcatgtacatttttgggggctacgagcagcaggcggactgtttttccaatgacattcacaagctagataccagcaccatgacatggactcttatctgtacaaagggcagccctgcacgctggagggacttccactcagccacaatgctgggaagtcacatgtatgtctttgggggccgtgccgaccgctttgggccattccattccaacaatgagatttactgcaaccgcattcgagtctttgacaccagaactgaggcttggctggactgtcccccgactccagtgctgcctgaggggcgccggagccactcggcctttggctacaatggggagctgtacatctttggtggttataatgcaaggctgaaccggcacttccatgacctctggaagtttaatcctgtgtcctttacctggaaaaagattgaaccgaaggggaaggggccatgtccccgccggcgccagtgctgctgtattgttggtgacaagattgtcctctttgggggtaccagtccatctcctgaggaaggcctgggagatgaatttgaccttatagatcattctgacttacacattttggactttagccctagtctgaagactctgtgcaaactggccgtgattcagtataacctagaccagtcctgtttgcctcatgatatcaggtgggagctgaatgccatgaccaccaacagcaatatcagtcgccccatcgtctcctcccatgggtaggaggaagtttctgccacctcccctcctgagcctgctgtcatcttcactgcccctgcccatctgtcacccacctgctcctttgacccctggacttggtatacctccatgtggagttgttgggcgagaggtgttctctgtgctgtgaattcagtggggagctgtagcggggtgggggctaggttcctccccccttgggccgagggccccttccccttggtgctctgtccccatccacctcctttcagctgctcctgggcctcagctctgcccagggccagccaggttctgctgggaagggaagggaatggggagaagggagaagcaagcagtgtctgagcctcaggagcttccccctccccctttgcctatcccctcccctctgcttgagccttgagccttgactgggagctgaaaggagttgcagctgttggcatgagacctccttctccccgtcttggggaggtggggaccagcagataaatcccacccttccttgagctgtcgctgtactctgaagttcagccagctcagattttataaaaattaattaaaatctccaaa

SEQ ID NO: 1891 - protein, 382 aa, Homo sapiens
MLRWTVHLEGGPRRVNHAAVAVGHRVYSFGGYCSGEDYETLRQIDVHIFNAVSLRWTKLPPVKSAIRGQAPVVPYMRYGHSTVLIDDTVLLWGGRNDTEGACNVLYAFDVNTHKWFTPRVSGTVPGARDGHSACVLGKIMYIFGGYEQQADCFSNDIHKLDTSTMTWTLICTKGSPARWRDFHSATMLGSHMYVFGGRADRFGPFHSNNEIYCNRIRVFDTRTEAWLDCPPTPVLPEGRRSHSAFGYNGELYIFGGYNARLNRHFHDLWKFNPVSFTWKKIEPKGKGPCPRRRQCCCIVGDKIVLFGGTSPSPEEGLGDEFDLIDHSDLHILDFSPSLKTLCKLAVIQYNLDQSCLPHDIRWELNAMTTNSNISRPIVSSHG

SEQ ID NO: 1892 - DNA, 3048 bp, Homo sapiens
ccttcaatgtgaagctaatatctcctatagcatagttaatgtttattcaacaaatattcatgcagcggagtcaagaacacaccacgatggcggagaaaggaagagacgccgagcggccgagtgcggccgagcaaagccggagccggagcggggccgcaggagacgggccgggtccggacgggccgagatgccctataaactgaaaaaggagaaggagccccccaaggttgccaaatgcacagccaagcctagcagctcgggcaaggatggtggaggcgagaacactgaggaggcccagccgcagccccagccccagccccagccccaagcccagtctcagccaccgtcatccaacaagcgtcccagcaatagcacgccgccccccacgcagctcagcaaaatcaagtactcaggggggccccagattgtcaagaaggagcgacggcaaagctcctcccgcttcaacctcagcaagaatcgggagctgcagaagcttcctgccctgaaagattcgccaacccaggagcgggaggagctgtttatccagaagctacgccagtgctgtgtcctctttgacttcgtgtcagacccactcagtgacctcaaattcaaggaggtgaagcgggcaggactcaacgagatggtggagtacatcacccatagccgtgatgttgtcactgaggccatttaccctgaggctgtcaccatgttttcagtgaacctcttccggacgctgccaccttcatcgaatcccacaggggctgagtttgacccagaggaagatgagcccaccctggaagctgcttggccacatctccagctcgtgtatgagttcttcttacgtttccttgagtctcctgatttccagccaaacatagccaagaagtacatcgaccagaagtttgtacttgctctcctagacctatttgacagtgaggatcctcgagagcgggacttcctcaagaccattttgcatcgcatctatggcaagtttttggggctccgggcttatatccgtaggcagatcaaccacatcttctacaggttcatctacgagacggagcatcacaacgggattgctgagctcctggagatcctgggcagcatcatcaatggctttgctctgccccttaaagaagagcacaagatgttcctcatccgtgtcctacttccccttcacaaggtcaagtccctgagtgtctaccaccctcagctggcatactgtgtggtacaattcctggagaaggagagcagtctgactgagccggtaattgtgggacttctcaagttttggcccaagacccacagccccaaggaggtgatgttcttgaatgagctggaggagattctggacgtcattgaaccttctgagttcagcaaagtgatggaacccctcttccgccagctggccaagtgtgtctctagcccccatttccaggtggcagagcgtgctctctattactggaacaatgagtacatcatgagcctgataagtgacaatgctgcccgagtcctccccatcatgttccctgcactctacaggaactccaagagccactggaacaagacaatccatggactgatctataatgccctgaagttgtttatggaaatgaatcagaagctgtttgatgactgcacacaacaatacaaggcagagaagcagaagggccggttccgaatgaaggaaagggaagagatgtggcaaaaaatcgaggagctggcccggcttaatccccagtatcccatgttccgagcccctccaccactgccccctgtgtactcgatggagacagagacccccacagctgaggacatccagcttctgaagaggactgtggagactgaggctgttcagatgctaaaagacatcaagaaggagaaagtgctgctgcggaggaagtcggagctgccccaggacgtgtacaccatcaaggcactggaggcgcacaagcgggcggaagagttcctaactgccagccaggaggctctctgacccctcacgttcctaccacagggccacagcccacacagccctgggacactgccctggccctccatactctgctccctactggctgtcttgggggaaggcagcgcctctctagctactcaagggagggggatgtgggcacttgaagcagggacacccacagaatggtccctcttctccccaaaaggtgttcatgcctccctgtggctagtacaggctgagcactaagatgcttagtgctcagacaacctggggatgcctgtcccctacctgctcctcacccacagctacctgaggctgctctgagaagtacacacaggaatacatacgctcctctattcttcccttcatcctcatttgaacgccaggtatctcccctcctctctctcccctgcagaggcatgtagggaacagcaggagattattctcaccaaagttatgtcaagccccattggtcccagagtagctgaagggaagccaacccccctgcagcacaaataggccccccagtcccagccgtgtgctggcagatagggttgtattatttcttcttaccccatgcctgaccaagggaggtcaaaaggagaaaagtataggctgtggacaataactgatgaatatagggcccagatggaccaagtggggccggggagggatgaataaacaccctaccccgtgccctgtctttggtgagcagcagccctggggtcacagacatggaagggaccaccctggggctgactgcttttctgtgctgttggttcccaaaactagaaagaaggaagcagggagcggtgccccaagcatggctcctgccaacacctatttatttccttgtttgtgctatgctgggcaggccttctcttgtcccttataggtaccttggaggggccaggggctgaggaaggccggacccaggttccaggggcgcaggcagtgcggcttttggctgtgtacatagggtgctttattctccacagagtgatacatgctaaggtgggttgggcttggaccgatgtccccatatgtacagaactgaataaagtgggtctctg

SEQ ID NO: 1893 - protein, 602 aa, Homo sapiens
MPYKLKKEKEPPKVAKCTAKPSSSGKDGGGENTEEAQPQPQPQPQPQAQSQPPSSNKRPSNSTPPPTQLSKIKYSGGPQIVKKERRQSSSRFNLSKNRELQKLPALKDSPTQEREELFIQKLRQCCVLFDFVSDPLSDLKFKEVKRAGLNEMVEYITHSRDVVTEAIYPEAVTMFSVNLFRTLPPSSNPTGAEFDPEEDEPTLEAAWPHLQLVYEFFLRFLESPDFQPNIAKKYIDQKFVLALLDLFDSEDPRERDFLKTILHRIYGKFLGLRAYIRRQINHIFYRFIYETEHHNGIAELLEILGSIINGFALPLKEEHKMFLIRVLLPLHKVKSLSVYHPQLAYCVVQFLEKESSLTEPVIVGLLKFWPKTHSPKEVMFLNELEEILDVIEPSEFSKVMEPLFRQLAKCVSSPHFQVAERALYYWNNEYIMSLISDNAARVLPIMFPALYRNSKSHWNKTIHGLIYNALKLFMEMNQKLFDDCTQQYKAEKQKGRFRMKEREEMWQKIEELARLNPQYPMFRAPPPLPPVYSMETETPTAEDIQLLKRTVETEAVQMLKDIKKEKVLLRRKSELPQDVYTIKALEAHKRAEEFLTASQEAL

SEQ ID NO: 1894 - DNA, 962 bp, Homo sapiens
  unsure 878: unknown base
gaattccgcccagacgcaggcttcttctcgggtcttggtcctgcatcctctctctcccagagcctccgttagggggtgggaaaggactttgccataggtcgctgaggccaccatctgctctcttactggccaagggcgtaaaaagatagtcttcccattagctagagagcaaaccccagaaagcctattggttgcgccgtccgcgggccttggtccgctttgaaggcgggctgcggctgcgagaggagggcgggcgggaggctagctgttgtcgtggttgctcggaggcacgtgtgcagtcccggaagcggcgaggggaaactgctccgcgcgcgcccgcgggaggaggaaccgcccggtcctttagggtccgggcccggccgggccatggattcaatgcctgagcccgcgtcccgctgtcttctgcttcttcccttgctgctgctgctgctgctgctgctgccggccccggagctgggcccgagccaggccggagctgaggagaacgactgggttcgcctgcccagcaaatgcgaagtgtgtaaatatgttgctgtggagctgaagtcagcctttgaggaaaccggcaagaccaaggaggtgattggcacgggctatggcatcctggaccagaaggcctctggagtcaaatacaccaagtcggacttgcggttaatcgaagtcactgagaccatttgcaagaggctcctgattatagcctgcacaaggagaggaccggcagcaatcgatttgccaagggcatgtcagagacctttgagacattacacaacctggtacacaaaggggtcaaggtggtgatggacatcccctatgagctgtggaacgagacttctgcagaggtggctgacctcaagaancagtgtgatgtgctggtggaagagtttgaggaggtgatcgaggactggtacaggaaccaccaggaggaagacctgactgaattc

SEQ ID NO: 1895 - protein, 143 aa, Homo sapiens
MDSMPEPASRCLLLLPLLLLLLLLLPAPELGPSQAGAEENDWVRLPSKCEVCKYVAVELKSAFEETGKTKEVIGTGYGILDQKASGVKYTKSDLRLIEVTETICKRLLIIACTRRGPAAIDLPRACQRPLRHYTTWYTKGSRW

SEQ ID NO: 1896 - DNA, 1765 bp, Homo sapiens
tgatgaaactgtaacttacaagaaaagggctgggttttgaaaataacacaggctctaaaaaccctaagaagcggtgcaacttttggcaggaatcggggttagcgggacctcaagggctcactgcggctaagtgaacgctgactggtcctccagcgtgagctagaacagacgtctctatggtcaagtaaacagagcgtgtgctgtcttccccatgtggtggggttgcgcatgatcagtagctgcaccactagaaagatggcggagcaagagcaaagaaaaatccctttggttccagaaaatctcctgaaaaagaggaaggcttatcaagccctcaaagccacccaggcaaagcaggcacttttggcaaagaaggagcagaagaaaggaaaagggctcaggtttaagcgactggaatcattcctacatgattcctggcggcagaaacgtgacaaggtgcgtctcagacgactagaagtgaaacctcatgccttggaattgccagataaacattccttggcctttgttgtacgcatcgaaaggattgacggcgtgagtttactggtgcagagaaccattgcaagacttcgcctaaagaaaatttttagtggtgtctttgtaaaagtcaccccccagaatctaaaaatgctgcgtatagtggaaccttatgtgacctggggatttccaaatctgaagtctgtccgagaactcattttgaaacgtggacaagccaaggtcaagaataagaccatccctctgacagacaatacagtgattgaggagcacctggggaagtttggcgtcatttgcttggaagacctcattcatgaaattgccttcccagggaagcatttccaggagatctcatggttcttgtgccctttccacctctcagtggcccgtcatgctaccaaaaatagagtgggcttcctcaaggagatgggcacacctggctatcggggtgaacgcatcaatcagctcatccgtcagctgaactagacccaggtgccaaactgcggtaaattttttatcagtgaagtggaagcatgtgttttgttttggaaatttttatcaagtatcttcagagaagattatttcctgctttatcttcagaaactggaaagggtcaaagaaaagacagtagctggccggtcgtggtggctcatgcctgtaatcccaacacttagggaggctgaggtgggcagatcacctgaggttgggagttcgagaccagcctgaccaacatggagaaatgccatctctactaaaaatacaaaaattagccgggcatggtggcacgtgcctgtaatcccagctactcaggaggctgaggcaggagaatcgcttgaacctgggaggtggaagttgcagtgagctgagatcacgccattgcactccagcctgggcaacaagcgaaactctgtctcaaaaaaaaagaaaagacagtagcatatgttcatgtcaagcacctctcatcacagtcgagttccaaggaaaaattccagtgttttctgcattgggtgctgtgtcatctgaaatcggcacattccatggaggaaggagtcctgctttgttgcatgtatcctagggtttaatgttggtaaatgagtcactctagcatttgtagaaggctccctgagactcctgcagcagtcgaccaagcccaaggacataattgaatctggagagtcctggggccttgttttgaaaaagacttgaaatacacataggaagaaaggcataaaaataaatgttcacttgtctctgc

SEQ ID NO: 1897 - protein, 255 aa, Homo sapiens
MISSCTTRKMAEQEQRKIPLVPENLLKKRKAYQALKATQAKQALLAKKEQKKGKGLRFKRLESFLHDSWRQKRDKVRLRRLEVKPHALELPDKHSLAFVVRIERIDGVSLLVQRTIARLRLKKIFSGVFVKVTPQNLKMLRIVEPYVTWGFPNLKSVRELILKRGQAKVKNKTIPLTDNTVIEEHLGKFGVICLEDLIHEIAFPGKHFQEISWFLCPFHLSVARHATKNRVGFLKEMGTPGYRGERINQLIRQLN

SEQ ID NO: 1898 - DNA, 2095 bp, Homo sapiens
gcgcctgtcagggaagcggcgcgcgcgcgcgggcggcgggcgggctggggatccgccgcgcagtgccagcgccagcgccagacccgcgccccgcgctctccggcccgtcgcctgccttgggactcgcgagcccgcactcccgccctgcctgttcgctgcccgagtatggagctgctgtgttgcgaaggcacccggcacgcgccccgggccgggccggacccgcggctgctgggggaccagcgtgtcctgcagagcctgctccgcctggaggagcgctacgtaccccgcgcctcctacttccagtgcgtgcagcgggagatcaagccgcacatgcggaagatgctggcttactggatgctggaggtatgtgaggagcagcgctgtgaggaggaagtcttccccctggccatgaactacctggatcgctacctgtcttgcgtccccacccgaaaggcgcagttgcagctcctgggtgcggtctgcatgctgctggcctccaagctgcgcgagaccacgcccctgaccatcgaaaaactgtgcatctacaccgaccacgctgtctctccccgccagttgcgggactgggaggtgctggtcctagggaagctcaagtgggacctggctgctgtgattgcacatgatttcctggccttcattctgcaccggctctctctgccccgtgaccgacaggccttggtcaaaaagcatgcccagacctttttggccctctgtgctacagattatacctttgccatgtacccgccatccatgatcgccacgggcagcattggggctgcagtgcaaggcctgggtgcctgctccatgtccggggatgagctcacagagctgctggcagggatcactggcactgaagtggactgcctgcgggcctgtcaggagcagatcgaagctgcactcagggagagcctcagggaagcctctcagaccagctccagcccagcgcccaaagccccccggggctccagcagccaagggcccagccagaccagcactcctacagatgtcacagccatacacctgtagccctggagaggccctctggagtggccactaagcagaggaggggccgctgccacccacctccctgcctccaggaaccacaccacatctaagcctgaaggggcgtctgttcccccttcacaaagcccaagggatctggtcctacccatccccgcagtgtgcactaaggggcccggccagccatgtctgcatttcggtggctagtcaagctcctcctccctgcatctgaccagcagcgcctttcccaactctagctgggggtgggccaggctgatgggacagaattggatacatacaccagcattccttttgaacgcccccccccacccctgggggctctcatgttttcaactgccaaaatgctctagtgccttctaaaggtgttgtcccttctagggttattgcatttggattggggtccctctaaaatttaatgcatgatagacacatatgagggggaatagtctagatggctcctctcagtactttggaggcccctatgtagtccgtgctgacagctgctcctagagggaggggcctaggcctcagccagagaagctataaattcctctttgctttgctttctgctcagcttctcctgtgtgattgacagctttgctgctgaaggctcattttaatttattaattgctttgagcacaactttaagaggacataatgggggcctggccatcccacaagtggtggtaaccctggtggttgctgttttcctcccttctgctactggcaaaaggatctttgtggccaaggagctgctatagcctggggtggggtcatgccctcctctcccattgtccctctgccccatcctccagcagggaaaatgcagcagggatgccctggaggtggctgagcccctgtctagagagggaggcaagccctgttgacacaggtctttcctaaggctgcaaggtttaggctggtggcccaggaccatcatcctactgtaataaagatgattgtgaaataaaactggctttggcttcttggaaaaaaaaaaaaaaaaaaaaaaaaaaaaaaaaaaaaaaaaaaaaa

SEQ ID NO: 1899 - protein, 292 aa, Homo sapiens
MELLCCEGTRHAPRAGPDPRLLGDQRVLQSLLRLEERYVPRASYFQCVQREIKPHMRKMLAYWMLEVCEEQRCEEEVFPLAMNYLDRYLSCVPTRKAQLQLLGAVCMLLASKLRETTPLTIEKLCIYTDHAVSPRQLRDWEVLVLGKLKWDLAAVIAHDFLAFILHRLSLPRDRQALVKKHAQTFLALCATDYTFAMYPPSMIATGSIGAAVQGLGACSMSGDELTELLAGITGTEVDCLRACQEQIEAALRESLREASQTSSSPAPKAPRGSSSQGPSQTSTPTDVTAIHL

SEQ ID NO: 1900 - DNA, 1750 bp, Homo sapiens
caccgcgcaagcgcatcctggcctttcttcagtccccacgtgcgatccttcccggcaactttttcgagaaaaatgcccaaattcaaggcggcccgtggggtggggggtcaggaaaaacatgcgcccctggccgatcagatcctggctgggaatgcggtgcgggcgggggtccgggagaagcggcggggtcgcgggacaggagaagcggaggaagagtatgtggggccccggctgagccgacggattttgcagcaagcacggcagcaacaggaggaactcgaggccgagcatgggactggggacaagcccgcggcgccgcgggaacgcaccacgcggctgggtccaagaatgcctcaggatggatcagatgacgaggacgaggagtggcccaccctggagaaggctgccacaatgacagcagcgggccatcatgcagaggtggttgtggaccctgaggatgagcgtgccatagagatgttcatgaacaagaaccctcctgccaggcgcaccctggctgacatcatcatggagaagctgactgagaagcagacagaggttgagacagtcatgtcagaggtgtcgggcttccctatgccccagctggacccccgggtcctagaagtgtacaggggggtccgggaggtattatctaagtaccgcagtggaaaactgcccaaggcatttaagatcatccctgcactctccaactgggagcaaatcctctacgtcacagagccggaggcctggactgcagctgccatgtaccaggccaccaggatttttgcctctaacctgaaggaacgcatggcccagcgcttctacaaccttgtcctgctccctcgagtacgagatgacgttgctgaatacaaacgactcaacttccatctctacatggctctcaagaaggcccttttcaaacctggagcctggttcaaagggatcctgattccactgtgcgagtctggcacttgtaccctccgggaagccatcattgtgggtagcatcatcaccaagtgctccatccctgtgttgcactccagtgcggccatgctgaaaattgctgagatggaatacagcggtgccaacagcatcttcctgcgactgctgctggataagaagtatgcactgccttaccgggtgctggatgccctagtcttccacttcctggggttccggacagagaagcgtgaactgcctgtgctgtggcaccagtgcctcctgactttggtccagcgctacaaggccgacttggccacagaccagaaagaggccctcttagaactgctccggctgcagccccatccacagctatcgcccgaaatcaggcgtgagcttcagagtgcagtcccccgcgatgtggaagatgttcccatcaccgtggagtgaggaaaacagtcagctgtcctggccaaaggggtttggaaggacaccaagacccccgttggtgactgaagatgacactgagctttaatggctgaagacccagatcagggcagtgacagatcacagggacatctgtggctcccagtccaggacaggaaggactgagggtctggctggttccctcttccattctaggcccttatccctgtttagttctgagagccaacttgagataccatatgctagcattcccagtccccagctggggcttggtgtgagtactttttctatggctattgtgtcaggtcactgtggataaaggcaaagacagatatttattgaaaaaaaaaaaaaaaaaaaaaaaaaa

SEQ ID NO: 1901 - protein, 301 aa, Homo sapiens
MNKNPPARRTLADIIMEKLTEKQTEVETVMSEVSGFPMPQLDPRVLEVYRGVREVLSKYRSGKLPKAFKIIPALSNWEQILYVTEPEAWTAAAMYQATRIFASNLKERMAQRFYNLVLLPRVRDDVAEYKRLNFHLYMALKKALFKPGAWFKGILIPLCESGTCTLREAIIVGSIITKCSIPVLHSSAAMLKIAEMEYSGANSIFLRLLLDKKYALPYRVLDALVFHFLGFRTEKRELPVLWHQCLLTLVQRYKADLATDQKEALLELLRLQPHPQLSPEIRRELQSAVPRDVEDVPITVE

SEQ ID NO: 1902 - DNA, 3316 bp, Homo sapiens
cttggggtggggaccgggtgaggggcctgacggcagagtcggtccagaactgcccggacagcgacgcacagcgaggagccaaaatggaagagggtgcaagtcccctcctggggccccagacgccccctcctttcttgctgcctggagcaggggcagtgctgttagtggctactcctggtgtgaacagcccatcctggccaccttccacaggaaacctgacctgaaggacagaagaggaaggaagcaggctttgccacaaatgtcagtgcagaactctggctggccccaccaagaagacagccccaagccccaggatccaggtccaccagccaactcagacagtgactcaggccacctgccgggggaggaccctgaggatacccatgctcaggaattcctgtctctgcacctgcttagaacatggggttttgactttaaactcattcacatgagtattcattatctctcctagggggtctgtattgtcaaaccagactctaggggctttggccccaaggcgtgaagggggttaagaagggaaagcataagaagggaagctgttttggggtgtggggcctccccagcctccctcaaggaagaccacacatgcaggcatcagtcagctatccttgcactcagtgaggatctgcaaggaggaccctcccaaatggagggcatgcttagaagctgctctagattggagaagaggtggcaatgatgagggggaaagaaggagaaaggaaagaaaaacctagtttcactcctccccttcttccatgtctcctcagggtcctgcagttctgagcttgggttccctttgcctggacaccaaccaagcccccaactggactggacttcagaccctcctgcagcaactccctccgcaggacattgatgagcgctactgcctggcccttggggaggaggagcgggccgagctgcagctcttctgtgccaggcggaagcaggaagccctgggacagggggtagcccgcctggtacttcccaagcttgaaggacacacctgtgagaagtgtagggagttgctgaagccaggggagtacggagtgtttgcagcccgggcaggggaacagcgctgctggcaccagccttgctttgcctgccaggcctgtggccaggccctgataaacctcatctacttctaccatgatggacaactctactgcggccgtcatcatgcagagttgctgcgcccgcgctgcccggcttgtgaccagctgatcttctcctggcgctgcaccgaggcggagggacagcgctggcatgagaaccacttctgttgccaggactgcgccgggcctctgggcgggggacgttatgccctgcctgggggaagcccctgctgccccagctgcttcgagaaccgctactcggatgcaggctcgagctgggccggggcactggaagggcaggcattccttggagcgcccccaccgcaccccccagacccaagcctcggggcccgcagctctcaccgcgcatccctggccggagcgttccaagggccgcccgaacccaccccgcgccgcggtcggggttgcggcgccagactccctcccaggcgcgggaggcggacgccctctggtggaggcgggggaccctggcgaggactctcggcggcggcggcggcgcgcacggcccaggggctgggcggggcgggaggctgggcctcacccccactagctgcggtgtaggtccagctccgcggctctgagaccagcgtttccgacccggcccggaacaggggagactggactcgaccgaactgaaggaagggaccaaacctcggtgaactctgcaaccctctcccgaacactccttgctgctgccggcggttccagcctgcaaactcagagggggctgcctggatccagtccccagcaggagaaccgacctggggacaaagcggaggcacccaaagggcaggagcaatgccgcctggagactattcgtgatcccaaggacacccctttctccacctgctcctcctcctctgactcggaacctgaaggatttttcttaggcgagcgccttccccagtcctggaagacccccggaagcctccaagcagaggacagcaacgcctctaagacgcactgcaccatgtgctagtggcgcagctcagagaggggatgtgagtgggaggaaaggggtctgtaaagcgggagaacaaggctagcctccccctaacaatcctagactgagacgcagtcaggcgcacgcccgcaagaggcggcgaggtgacaagtttggagtgcgcccccttcagtactgcgcgttctaagacttttggcggagactttcttggcaaaacccattccccaaagctacgcttcccctgctgagatagcccctacccccacctccacaggctgggacagccccgtccccaccatcctcctcccaagccaattaaatgatcacagcacgcgtgacagttaccggctggagagccggaggtgggaccgggagcaggggaccgtagaaccgggccgcgctcctcccctcctagagttcgtggaggcgcagcagagggccgtccctcttccggatgtcggactaagcgaacagcgcccccactgccggccggtagcagccggaagtgccagaccggaggtgcgtcattcaccggcgacgccgatacggttcctccagcgaggcccatgcgaagctttccactatggcttccagcactgtcccggtgagcgctgctggctcggctaatgaaactcccgaaataccggacaacgtgggagattggcttcggggcgtctaccgctttgccactgataggaatgacttccggaggaacttgatactaaatttgggactctttgctgcgggagtttggctggccaggaacttgagtgacattgacctcatggcacctcagccaggggtgtagccaagtagttctaatgccacctgtcgtcttatcatctgattgcagacaaatggaatcctgtgctgaacccgaatcttccaaaaaacagcctacaatctgtgaccaccacaagatgtgccctgatggcagctgaagtttgattcagatgggcacttttcttccccttccctgcctagtttccttttgttccttgagtccacgcagaattccattctctggtcagcagacaggcttaagctaaagtattgcctctattctgtaaagttctgtacatagttcccaagcttctgcagggggtgatttttgctcttgtcctgagaaataacagtgctgttttaaaaaacatttgaaataaataccgcacacaaaggaaaaaaaaaaaaaaaaaaa

SEQ ID NO: 1903 - protein, 312 aa, Homo sapiens
MSPQGPAVLSLGSLCLDTNQAPNWTGLQTLLQQLPPQDIDERYCLALGEEERAELQLFCARRKQEALGQGVARLVLPKLEGHTCEKCRELLKPGEYGVFAARAGEQRCWHQPCFACQACGQALINLIYFYHDGQLYCGRHHAELLRPRCPACDQLIFSWRCTEAEGQRWHENHFCCQDCAGPLGGGRYALPGGSPCCPSCFENRYSDAGSSWAGALEGQAFLGAPPPHPPDPSLGARSSHRASLAGAFQGPPEPTPRRGRGCGARLPPRRGRRTPSGGGGGPWRGLSAAAAARTAQGLGGAGGWASPPLAAV

SEQ ID NO: 1904 - DNA, 1993 bp, Homo sapiens
ctagttaaggcggcacagggccgaggcgtagtgtgggtgactcctccgttccttgggtcccgtcgtctgtgatactgcagttcagccatggcagaaccgcagcccccgtccggcggcctcacggacgaggccgccctcagttgctgctccgacgcggaccccagtaccaaggattttctattgcagcagaccatgctacgagtgaaggatcctaagaagtcactggatttttatactagagttcttggaatgacgctaatccaaaaatgtgattttcccattatgaagttttcactctacttcttggcttatgaggataaaaatgacatccctaaagaaaaagatgaaaaaatagcctgggcgctctccagaaaagctacacttgagctgacacacaattggggcactgaagatgatgcgacccagagttaccacaatggcaattcagaccctcgaggattcggtcatattggaattgctgttcctgatgtatacagtgcttgtaaaaggtttgaagaactgggagtcaaatttgtgaagaaacctgatgatggtaaaatgaaaggcctggcatttattcaagatcctgatggctactggattgaaattttgaatcctaacaaaatggcaaccttaatgtagtgctgtgagaattctcctttgagatttcagaagaaaggaaacaatgtgattcaagatatttacataccagaagcatctaggactgatggatcactgtcccgattcaaattattcttcagtccatttccccttcctatttcagctgttccttttcacctaactgttcagtcattctggttttcaagcagtgctttatctcatgtccttgaatatagttgtgtaactttattttttaggtaataattagaacagttcccttcagaggctgcatttgccttcttctgccacctaaatattacttcccttcaaatctgcctttgaatcatcatttttaaaaaaaaattaacatgtttttgttgtagttatcttctggggtttcaattcctcagaaacaacttttttcacaacggaaaggaaagaacactagtgttctttcagtaaagtacaaagtgtttattttacaaaagagtaggtactcttgagagcaattcaaatcatgctgacaaggatactgatagaaaaagtgatttcttcttattataaagtacatttaaagttcaaggactaaccttatttatttgggaaaggggaggaggaaggaaatgatatggtacccagacactgggctaggctgcaactttatctcatttaatactcccagctgtcatgtgagaaagaaagcaggctaggcatgtgaaatcactttcatggattattaatggatttaagagggcatcaatcagctcaactcaagatttcataatcatttttagtatttagattgtgcctcaaagttgtagtacctcacaatacctccactggtttcctgttgtaaaaaccttcagtgagtttgaccattgtgctcttggctcttgggctggagtaccgtggtgagggagtaaacactagaagtctttagtacaaaactgctctagggacacctggtgattcctacacaagtgatgtttatatttctcataaagagtcttccctatcccaaggtcttcatgatgccagtagccatatatgataaattatgttcagtgataacttagttatcagaaatcagctcagtggtcttccccgccatgattcacatttgatgagtttttaaaaatcaaagtgattttgaaaatctctaatggctcagaaaataaaaacatccagtttgtggatgactatatttagatttctctagactctagtggaagacctttggaaaggccatgccaaccgtgcttgtactgctagaagcactttatgtttcctttttgggtgaaatggatttatgtgagtgctttaaacaaatagcaatacttatagactgaaataaaatgaaacttcaaataag

SEQ ID NO: 1905 - protein, 184 aa, Homo sapiens
MAEPQPPSGGLTDEAALSCCSDADPSTKDFLLQQTMLRVKDPKKSLDFYTRVLGMTLIQKCDFPIMKFSLYFLAYEDKNDIPKEKDEKIAWALSRKATLELTHNWGTEDDATQSYHNGNSDPRGFGHIGIAVPDVYSACKRFEELGVKFVKKPDDGKMKGLAFIQDPDGYWIEILNPNKMATLM

SEQ ID NO: 1906 - DNA, 1890 bp, Homo sapiens
atgggagcttcggacccggaagtggcgccctgggctcgcggcggtgccgcggggatggcgggagccggagctggagccggagctcgcggcggagcggcggcgggggtcgaggctcgagctcgcgatccaccgcccgcgcaccgcgcacatcctcgccaccctcggcctgcggctcagccctcggcccgcaggatggatggcgggtcagggggcctggggtctggggacaacgccccgaccactgaggctcttttcgtggcactgggcgcgggcgtgacggcgctcagccatcccctgctctacgtgaagctgctcatccaggtgggtcatgagccgatgccccccacccttgggaccaatgtgctggggaggaaggtcctctatctgccgagcttcttcacctacgccaagtacatcgtgcaagtggatggtaagatagggctgttccgaggcctgagtccccggctgatgtccaacgccctctctactgtgactcggggtagcatgaagaaggttttccctccagatgagattgagcaggtttccaacaaggatgatatgaagacttccctgaagaaagttgtgaaggagacctcctacgagatgatgatgcagtgtgtgtcccgcatgttggcccaccccctgcatgtcatctcaatgcgctgcatggtccagtttgtgggacgggaggccaagtacagtggtgtgctgagctccattgggaagattttcaaagaggaagggctgctgggattcttcgttggattaatccctcacctcctgggcgatgtggttttcttgtggggctgtaacctgctggcccacttcatcaatgcctacctggtggatgacagcttcagccaggccctggccatccggagctataccaagttcgtgatggggattgcagtgagcatgctgacctaccccttcctgctagttggcgacctcatggctgtgaacaactgcgggctgcaagctgggctccccccttactccccagtgttcaaatcctggattcactgctggaagtacctgagtgtgcagggccagctcttccgaggctccagcctgcttttccgccgggtgtcatcaggatcatgctttgccctggagtaacctgaatcatctaaaaaacacggtctcaacctggccaccgtgggtgaggcctgaccaccttgggacacctgcaagacgactccaacccaacaacaaccagatgtgctccagcccagccgggcttcagttccatatttgccatgtgtctgtccagatgtggggttgagcgggggtggggctgcacccagtggattgggtcacccggcagacctagggaaggtgaggcgaggtggggagttggcagaatccccatacctcgcagatttgctgagtctgtcttgtgcagagggccagagaatggcttatgggggcccaggttggatggggaaaggctaatggggtcagaccccaccccgtctacccctccagtcagcccagcgcccatcctgcagctcagctgggagcatcattctcctgctttgtacatagggtgtggtcccctggcacgtggccaccatcatgtctaggcctatgctaggaggcaaatggcccagctctgcctgtgtttttctcaacactacttttctgatatgagggcagcacctgcctctgaatgggaaatcatgcaactactcagaatgtgtcctcctcatctaatgctcatctgtttaatggtgatgcctcgcgtacaggatctggttacctgtgcagttgtgaatacccagaggttgggcagatcagtgtctctagtcctacccagttttaaagttcatggtaagatttgacctcatctcccgcaaataaatgtattggtgatttggaaaaaaaaaa

SEQ ID NO: 1907 - protein, 372 aa, Homo sapiens
MGASDPEVAPWARGGAAGMAGAGAGAGARGGAAAGVEARARDPPPAHRAHPRHPRPAAQPSARRMDGGSGGLGSGDNAPTTEALFVALGAGVTALSHPLLYVKLLIQVGHEPMPPTLGTNVLGRKVLYLPSFFTYAKYIVQVDGKIGLFRGLSPRLMSNALSTVTRGSMKKVFPPDEIEQVSNKDDMKTSLKKVVKETSYEMMMQCVSRMLAHPLHVISMRCMVQFVGREAKYSGVLSSIGKIFKEEGLLGFFVGLIPHLLGDVVFLWGCNLLAHFINAYLVDDSFSQALAIRSYTKFVMGIAVSMLTYPFLLVGDLMAVNNCGLQAGLPPYSPVFKSWIHCWKYLSVQGQLFRGSSLLFRRVSSGSCFALE

SEQ ID NO: 1908 - DNA, 1706 bp, Homo sapiens
tgttcttgagcccagcttcttctcgtctcccaccccagcttcccggcattggaagaagggaccgtcctcttccttgtcttggccacccaaatcctggtatcgaaagggttgaacggaccggaagtgtgcagcagcgacgggtccccagctaatcgacgccggaagtagcaattactagacaagcattccgccgccggcttcgctatggcggcaattcccccagattcctggcagccacccaacgtttacttggagaccagcatgggaatcattgtgctggagctgtactggaagcatgctccaaagacctgtaagaactttgctgagttggctcgtcgaggttactacaatggcacaaaattccacagaattatcaaagacttcatgatccaaggaggtgacccaacagggacaggtcgaggtggtgcatctatctatggcaaacagtttgaagatgaacttcatccagacttgaaattcacgggggctggaattctcgcaatggccaatgcggggccagataccaatggcagccagttctttgtgaccctcgcccccacccagtggcttgacggcaaacacaccatttttggccgagtgtgtcagggcataggaatggtgaatcgcgtgggaatggtagaaacaaactcccaggaccgccctgtggacgacgtgaagatcattaaggcatacccttctgggtagacttgctaccctcttgagcagctcttctgagatggccccagtgaaccagcttctagatgacatagaatgacatgtaatgctaaatttcattttggctttgcaagtcatgaagcttaggaggcctggcatcttgggtgagttagagatggaagtacattttaataggatgcttcttttctcttcccccagtgcctaggttgccagagcatttgcacaaatgcccctgtttatcaataggtgactacttactacacatgaaccataatgctgcttcttgtgcatgtctgctctgatatacgtcgaacaatgtagcagccactgtcatttctcagtggttttgcctaaccaaacttcttcctaaggagatttatattctggcctacacagcagtccttgatggctgacagccacagaattccaaaccaagtagtgtctgtcagccctcttaactctgtgcacgccctatttcagtcttttacatttgttcttctagggaatgtatgcatctctatatatattttccctctcaaaaccagaacatcaacagtgctgtttctgacacttcagacatcccacgcaaagccacattgaatttttgccaaatgaaaaacacatccaacaatcaagtttctaagaaggtgtcaagtggggaataataataatgtataataatcaagaaattagtttattaaaaggaagcagaagcattgaccattttttcccagagaagaggagaaatctgtagtgagcaaaggacagaccatgaatcctccttgagaagtagtactctcagaaaggagaagcgccactcaagttcttttaacccaagactttagagaaattaggtccaagatttttatatgttcagttgtttatgtataaaaataactttctggattttgtggggaggagcaggagaggaaggaagttaatacctatgtaatacatagaaacttccacaataaaatgccattgatggttgaaaaaaaaaaaaaaaaaaa

SEQ ID NO: 1909 - protein, 166 aa, Homo sapiens
MAAIPPDSWQPPNVYLETSMGIIVLELYWKHAPKTCKNFAELARRGYYNGTKFHRIIKDFMIQGGDPTGTGRGGASIYGKQFEDELHPDLKFTGAGILAMANAGPDTNGSQFFVTLAPTQWLDGKHTIFGRVCQGIGMVNRVGMVETNSQDRPVDDVKIIKAYPSG

SEQ ID NO: 1910 - DNA, 548 bp, Homo sapiens
cgtcagaacccatgcggcagcaaggcctgccgccgcctcttcggcccagtggacagcgagcagctgagccgcgactgtgatgcgctaatggcgggctgcatccaggaggcccgtgagcgatggaacttcgactttgtcaccgagacaccactggagggtgacttcgcctgggagcgtgtgcggggccttggcctgcccaagctctaccttcccacggggccccggcgaggccgggatgagttgggaggaggcaggcggcctggcacctcacctgctctgctgcaggggacagcagaggaagaccatgtggaccagcctggccaacatggtgaaatctctactaaaaatacaaaaattagctgggcatggtggtgcacgcttgtaatcccagctacttggaaggctgaggtgggaggatcacttgaacccaggaggcagaggttgcagtcagctgagatcataccactgtactccagcctcttccagggtgacagtgagattcatctcaaataaatacataaataaaaaactgtttggtaatatcttct

SEQ ID NO: 1911 - protein, 141 aa, Homo sapiens
MAGCIQEARERWNFDFVTETPLEGDFAWERVRGLGLPKLYLPTGPRRGRDELGGGRRPGTSPALLQGTAEEDHVDQPGQHGEISTKNTKISWAWWCTLVIPATWKAEVGGSLEPRRQRLQSAEIIPLYSSLFQGDSEIHLK

SEQ ID NO: 1912 - DNA, 2281 bp, Homo sapiens
agctgaggtgtgagcagctgccgaagtcagttccttgtggagccggagctgggcgcggattcgccgaggcaccgaggcactcagaggaggtgagagagcggcggcagacaacaggggaccccgggccggcggcccagagccgagccaagcgtgcccgcgtgtgtccctgcgtgtccgcgaggatgcgtgttcgcgggtgtgtgctgcgttcacaggtgtttctgcggcaggcgccatgtcagaaccggctggggatgtccgtcagaacccatgcggcagcaaggcctgccgccgcctcttcggcccagtggacagcgagcagctgagccgcgactgtgatgcgctaatggcgggctgcatccaggaggcccgtgagcgatggaacttcgactttgtcaccgagacaccactggagggtgacttcgcctgggagcgtgtgcggggccttggcctgcccaagctctaccttcccacggggccccggcgaggccgggatgagttgggaggaggcaggcggcctggcacctcacctgctctgctgcaggggacagcagaggaagaccatgtggacctgtcactgtcttgtacccttgtgcctcgctcaggggagcaggctgaagggtccccaggtggacctggagactctcagggtcgaaaacggcggcagaccagcatgacagatttctaccactccaaacgccggctgatcttctccaagaggaagccctaatccgcccacaggaagcctgcagtcctggaagcgcgagggcctcaaaggcccgctctacatcttctgccttagtctcagtttgtgtgtcttaattattatttgtgttttaatttaaacacctcctcatgtacataccctggccgccccctgccccccagcctctggcattagaattatttaaacaaaaactaggcggttgaatgagaggttcctaagagtgctgggcatttttattttatgaaatactatttaaagcctcctcatcccgtgttctccttttcctctctcccggaggttgggtgggccggcttcatgccagctacttcctcctccccacttgtccgctgggtggtaccctctggaggggtgtggctccttcccatcgctgtcacaggcggttatgaaattcaccccctttcctggacactcagacctgaattctttttcatttgagaagtaaacagatggcactttgaaggggcctcaccgagtgggggcatcatcaaaaactttggagtcccctcacctcctctaaggttgggcagggtgaccctgaagtgagcacagcctagggctgagctggggacctggtaccctcctggctcttgatacccccctctgtcttgtgaaggcagggggaaggtggggtcctggagcagaccaccccgcctgccctcatggcccctctgacctgcactggggagcccgtctcagtgttgagccttttccctctttggctcccctgtaccttttgaggagccccagctacccttcttctccagctgggctctgcaattcccctctgctgctgtccctcccccttgtcctttcccttcagtaccctctcagctccaggtggctctgaggtgcctgtcccacccccacccccagctcaatggactggaaggggaagggacacacaagaagaagggcaccctagttctacctcaggcagctcaagcagcgaccgccccctcctctagctgtgggggtgagggtcccatgtggtggcacaggcccccttgagtggggttatctctgtgttaggggtatatgatgggggagtagatctttctaggagggagacactggcccctcaaatcgtccagcgaccttcctcatccaccccatccctccccagttcattgcactttgattagcagcggaacaaggagtcagacattttaagatggtggcagtagaggctatggacagggcatgccacgtgggctcatatggggctgggagtagttgtctttcctggcactaacgttgagcccctggaggcactgaagtgcttagtgtacttggagtattggggtctgaccccaaacaccttccagctcctgtaacatactggcctggactgttttctctcggctccccatgtgtcctggttcccgtttctccacctagactgtaaacctctcgagggcagggaccacaccctgtactgttctgtgtctttcacagctcctcccacaatgctgaatatacagcaggtgctcaataaatgattcttagtgactttaaaaaaaaaaaaaaaaaaaa

SEQ ID NO: 1913 - protein, 164 aa, Homo sapiens
MSEPAGDVRQNPCGSKACRRLFGPVDSEQLSRDCDALMAGCIQEARERWNFDFVTETPLEGDFAWERVRGLGLPKLYLPTGPRRGRDELGGGRRPGTSPALLQGTAEEDHVDLSLSCTLVPRSGEQAEGSPGGPGDSQGRKRRQTSMTDFYHSKRRLIFSKRKP

SEQ ID NO: 1914 - DNA, 2541 bp, Homo sapiens
aataaaggcgaggagaaggcggtggtccgccatttcgtggacgccgggtgagtgagagagttggttggtgttgggccggaggaaagcgggaagactcatcggagcgtgtggatttgagccgccgcattttttaaccctagatctcgaaatgcatcgtgattcctgtccattggactgtaaggtttatgtaggcaatcttggaaacaatggcaacaagacggaattggaacgggcttttggctactatggaccactccgaagtgtgtgggttgctagaaacccacccggctttgcttttgttgaatttgaagatccccgagatgcagctgatgcagtccgagagctagatggaagaacactatgtggctgccgtgtaagagtggaactgtcgaatggtgaaaaaagaagtagaaatcgtggcccacctccctcttggggtcgtcgccctcgagatgattatcgtaggaggagtcctccacctcgtcgcagagtcaccatcatgtctcttctcaccaccctctgaatctgcattagccagtcaactagccctttcagcgtcatgtgaccagcgcgccccattcagcttggctggtgtcgtttcacatgacccaggctggccagtcgtcaggttgcaccgccctttggttcccgagcatgctgttttctctcagccttctctccaaccttaaccaaatcggcagcagccacctcgaccgcccacacattcctggccaatcagctcagctgtttatttaccaaatgtcttcacaacaactacagcagcagccttcggctaacaaaaaagcaggaaaaatccacaacacccccttcgccaaccaactaaatccaacgcaacatctggcaaaaccttttcagcaaattcttcctggccgtcagtccggcagcctcacctcaccatttctagcttgttgaaacccaaaactaatctccaagaaggagaagcttctctcgcagccggagcaggtccctttctagagataggagaagagagagatcgctgtctcgggagagaaatcacaagccgtcccgatccttctctaggtctcgtagtcgatctaggtcaaatgaaaggaaatagaagacagtttgcaagagaagtggtgtacaggaaattacttcatttgacaggagtatgtacagaaaattcaagttttgtttgagacttcataagcttggtgcatttttaagatgttttagctgttcaaatctgtttgtctcttgaaacagtgacacaaaggtgtaattctctatggtttgaaatggatcatacgaggcatgtaataccaagaattgttactttacaatgttcccttaagcaaaattgaatttgctttgaacttttagttatgcacagactgataataaacctctaaacctgcccagcggaagtgtgtttttttttaaatttaaatacagaaacaactggcaaaaattgaactaagatttacttttttttccatagctgggatataggctgcagctatagttgaacaagcagtctttaaaaactgctgtgaaacacaggccatcagggaaaacgaaatgctgcactattaaattagaggtttttgaaaaatccaactctcatcctgggcagaggttgcctagttggtatagaatgttaagtttcaagaaagtttacctttgctttaggtcataagttccttatttgattgctgtatatggatacatggctgttcgtgacattctttatgtgcaaatttgtgatttcaaaaatgtcctgccagtttaagggtacattgtagagccgaactttgagttactgtgcaagatttttttttcatgctgtcatttgtaatatgttttgtgagaatccttgggattaaagttttggttacaaattgttctttaacttgaaagcctgtttttccttgcaaactcaaatctgtgagcttggtaccaagtccaggtataacattcctattggaagccatacttatattttcttgtaaagtgcttttgaattaataaaatattagcataattgtgtatagtcagttgaacccactgttaccattgttcttatcccatgggaagcagttggttacacgattcttattttataagaaacagctgagaggcactatggattagtcttctgaagtgaaggaaatatagatgtcacctaagtgatagttaacccattttttttttttttaggcatagaagccagttcagggtccataatatttagtgaccaacattttaaagtatagcagcaacctggttcttaaacacaaagtaagttgcccattaacaaatggcttttatctttagcatgaaaactttccacaggtctaaaaattgcttccattttataatttgaggtgttgcatgggaattctaagctgatccatcatgatgtaaaagttcacaatatggttcaaatgtaacagtgcagaattgaatatggaggcatgcataaccttcctcttagaaaatggcaggtgttgtaatttcaaatttttgtgcaattagattaaatcataatgcaacagt

SEQ ID NO: 1915 - protein, 124 aa, Homo sapiens
MHRDSCPLDCKVYVGNLGNNGNKTELERAFGYYGPLRSVWVARNPPGFAFVEFEDPRDAADAVRELDGRTLCGCRVRVELSNGEKRSRNRGPPPSWGRRPRDDYRRRSPPPRRRVTIMSLLTTL

SEQ ID NO: 1916 - DNA, 4244 bp, Homo sapiens
ggtctcaccatggagcggaaagtgcttgcgctccaggcccgaaagaaaaggaccaaggccaagaaggacaaagcccaaaggaaatctgaaactcagcaccgaggctctgctccccactctgagagtgatctaccagagcaggaagaggagattctgggatctgatgatgatgagcaagaagatcctaatgattattgtaaaggaggttatcatcttgtgaaaattggagatctattcaatgggagataccatgtgatccgaaagttaggctggggacacttttcaacagtatggttatcatgggatattcaggggaagaaatttgtggcaatgaaagtagttaaaagtgctgaacattacactgaaacagcactagatgaaatccggttgctgaagtcagttcgcaattcagaccctaatgatccaaatagagaaatggttgttcaactactagatgactttaaaatatcaggagttaatggaacacatatctgcatggtatttgaagttttggggcatcatctgctcaagtggatcatcaaatccaattatcaggggcttccactgccttgtgtcaaaaaaattattcagcaagtgttacagggtcttgattatttacataccaagtgccgtatcatccacactgacattaaaccagagaacatcttattgtcagtgaatgagcagtacattcggaggctggctgcagaagcaacagaatggcagcgatctggagctcctccgccttccggatctgcagtcagtactgctccccagcctaaaccagctgacaaaatgtcaaagaataagaagaagaaattgaagaagaagcagaagcgccaggcagaattactagagaagcgaatgcaggaaattgaggaaatggagaaagagtcgggccctgggcaaaaaagaccaaacaagcaagaagaatcagagagtcctgttgaaagacccttgaaagagaacccacctaataaaatgacccaagaaaaacttgaagagtcaagtaccattggccaggatcaaacgcttatggaacgtgatacagagggtggtgcagcagaaattaattgcaatggagtgattgaagtcattaattatactcagaacagtaataatgaaacattgagacataaagaggatctacataatgctaatgactgtgatgtccaaaatttgaatcaggaatctagtttcctaagctcccaaaatggagacagcagcacatctcaagaaacagactcttgtacacctataacatctgaggtgtcagacaccatggtgtgccagtcttcctcaactgtaggtcagtcattcagtgaacaacacattagccaacttcaagaaagcattcgggcagagataccctgtgaagatgaacaagagcaagaacataacggaccactggacaacaaaggaaaatccacggctggaaattttcttgttaatccccttgagccaaaaaatgcagaaaagctcaaggtgaagattgctgaccttggaaatgcttgttggcacaaacatttcactgaagatattcaaacaaggcaatatcgttccttggaagttctaatcggatctggctataatacccctgctgacatttggagcacggcatgcatggcctttgaactggccacaggtgactatttgtttgaacctcattcaggggaagagtacactcgagatgaagatcacattgcattgatcatagaacttctggggaaggtgcctcgcaagctcattgtggcaggaaaatattccaaggaatttttcaccaaaaaaggtgacctgaaacatatcacgaagctgaaaccttggggcctttttgaggttctagtggagaagtatgagtggtcgcaggaagaggcagctggcttcacagatttcttactgcccatgttggagctgatccctgagaagagagccactgccgccgagtgtctccggcacccttggcttaactcctaagcccctgcccagcaccacagcagagatcacacactgaccctccgcccttccccttcaagcattttcctcttcccttttcagggtgaagctcttccttcaagagtttctagatcttgttttttttttaatccaacatgttcatttgggtttgcttacttgaccctgtggagatccccacagccattgggcatcctaggtgaatttggccttggttgggctctgccaaagactaatggactaaaatgtgaaacagcctcttgccctgtacctttccttcccattaggacatcctttaaattataagcatcctttttgaaaagagctatgaaggtgtatgagcccatccttttattcattgactctaagagtcaaattttctagtgcatatcctattgccagcataaggatgaggagggggaaagggtcttaattctatgtacagcagagacattaaacttgctgtgtccgggctgcatcatcttcctggactgtttctgttgttctctgtgttcacattttttcctgcaacttttaagctactgtcttttttaaatagctatatgaacaccaaatttgggtaccattttatcactgttcaaagcactgtcaaattcctttcatcctttaatagttaagatctttgaatcttcagtctgatttttaatgtaagcaaaaacagaaccattgaatagtaatttcttgagaacctcaggtgttctataaacagtcctttcctgtatgtcttctattaccctaagaccagagttattttggttggttgttttgttttattttttgtttttgtatccatggctggcactttactcattgcacttgagtttattgccccataactaaaggatcaggatgatggtagaacggagatctgggtttcagagctttcccatttaagaaaaatagatcttgagattctgattcttttccaaacagtcccctgctttcatgtacagctttttctttaccttacccaaaattctggccttgaagcagttttcctctatggctttgcctttctgattttctcagaggctcgagtctttaatataaccccaaatgaaagaaccaaggggaggggtgggatggcacttttttttgttggtcttgttttgttttgttttttggttggttggttcgttattttttaagattagccattctctgctgctatttccctacataatgtcaatttttaaccataattttgacatgattgagatgtacttgaggcttttttgttttaattgagaaaagactttgcaattttttttttaggatgagcctctcctagacttgacctagaatattacatattcctccagtaagtaatactgaagagcaaaagagaggcaggattggggtcacagccgcttcttcagcatggaccaagtgggccttggggattgcagcgttctcgaagtggctgtaggactcgaatttacagaaagccacagaggtgcaacttgaggctctgctagcaagccaccagtgaggctattgggtaaccacctttctatacaggagattggaatctactttgtcatttatccaccacagtgacaaaggaaaagtggtgccgttatgcaatccatttaactcataaacatattactctgagtaactggccagccattcatcggatccttcattgggtactcctgaaatcagacatgttcctgtagaaagaattttaagttaggctttctatgcacctatcaagaatcaagagaatagattgtatcaaacaacggcagggaaatccttcagcaattctaatccactttgggttttcagctgtttttacatctaaagcaatagactagaactgaattatcttctacatagtaaaatcacaattgtggaattacaggaattctggtgatattaaggtgaaataacaaaacacaaaaggccctattttaacagttgatgtgacagtaagttttaatagaacctgtaacttcattttggaaatgcttctccaccaaataagggctttttcccctatttaaggagccagatggattgaaagatgtggaaataggcagctgtagatcttgatcttccaggtaccccatgtacctttattgagcttaattataatactgtcaaattgccacgatctcactaaaggatttctatttgctgtcagttaaaaataaagccctaaatacatttttattctttctactgagggcattgtctgttttctttgtaaatgccgtacaataaacaaattatttaataaccta

SEQ ID NO: 1917 - protein, 654 aa, Homo sapiens
MERKVLALQARKKRTKAKKDKAQRKSETQHRGSAPHSESDLPEQEEEILGSDDDEQEDPNDYCKGGYHLVKIGDLFNGRYHVIRKLGWGHFSTVWLSWDIQGKKFVAMKVVKSAEHYTETALDEIRLLKSVRNSDPNDPNREMVVQLLDDFKISGVNGTHICMVFEVLGHHLLKWIIKSNYQGLPLPCVKKIIQQVLQGLDYLHTKCRIIHTDIKPENILLSVNEQYIRRLAAEATEWQRSGAPPPSGSAVSTAPQPKPADKMSKNKKKKLKKKQKRQAELLEKRMQEIEEMEKESGPGQKRPNKQEESESPVERPLKENPPNKMTQEKLEESSTIGQDQTLMERDTEGGAAEINCNGVIEVINYTQNSNNETLRHKEDLHNANDCDVQNLNQESSFLSSQNGDSSTSQETDSCTPITSEVSDTMVCQSSSTVGQSFSEQHISQLQESIRAEIPCEDEQEQEHNGPLDNKGKSTAGNFLVNPLEPKNAEKLKVKIADLGNACWHKHFTEDIQTRQYRSLEVLIGSGYNTPADIWSTACMAFELATGDYLFEPHSGEEYTRDEDHIALIIELLGKVPRKLIVAGKYSKEFFTKKGDLKHITKLKPWGLFEVLVEKYEWSQEEAAGFTDFLLPMLELIPEKRATAAECLRHPWLNS

SEQ ID NO: 1918 - DNA, 3781 bp, Homo sapiens
gggccggctcgcgggcgctgccagtctcgggcggcggtgtccggcgcgcgggcggcctgctgggcgggctgaagggttagcggagcacgggcaaggcggagagtgacggagtcggcgagcccccgcggcgacaggttctctacttaaaagacaatgactactgatgaaggtgccaagaacaatgaagaaagccccacagccactgttgctgagcagggagaggatattacctccaaaaaagacaggggagtattaaagattgtcaaaagagtggggaatggtgaggaaacgccgatgattggagacaaagtttatgtccattacaaaggaaaattgtcaaatggaaagaagtttgattccagtcatgatagaaatgaaccatttgtctttagtcttggcaaaggccaagtcatcaaggcatgggacattggggtggctaccatgaagaaaggagagatatgccatttactgtgcaaaccagaatatgcatatggctcggctggcagtctccctaaaattccctcgaatgcaactctcttttttgagattgagctccttgatttcaaaggagaggatttatttgaagatggaggcattatccggagaaccaaacggaaaggagagggatattcaaatccaaacgaaggagcaacagtagaaatccacctggaaggccgctgtggtggaaggatgtttgactgcagagatgtggcattcactgtgggcgaaggagaagaccacgacattccaattggaattgacaaagctctggagaaaatgcagcgggaagaacaatgtattttatatcttggaccaagatatggttttggagaggcagggaagcctaaatttggcattgaacctaatgctgagcttatatatgaagttacacttaagagcttcgaaaaggccaaagaatcctgggagatggataccaaagaaaaattggagcaggctgccattgtcaaagagaagggaaccgtatacttcaagggaggcaaatacatgcaggcggtgattcagtatgggaagatagtgtcctggttagagatggaatatggtttatcagaaaaggaatcgaaagcttctgaatcatttctccttgctgcctttctgaacctggccatgtgctacctgaagcttagagaatacaccaaagctgttgaatgctgtgacaaggcccttggactggacagtgccaatgagaaaggcttgtataggaggggtgaagcccagctgctcatgaacgagtttgagtcagccaagggtgactttgagaaagtgctggaagtaaacccccagaataaggctgcaagactgcagatctccatgtgccagaaaaaggccaaggagcacaacgagcgggaccgcaggatatacgccaacatgttcaagaagtttgcagagcaggatgccaaggaagaggccaataaagcaatgggcaagaagacttcagaaggggtcactaatgaaaaaggaacagacagtcaagcaatggaagaagagaaacctgagggccacgtatgacgccacgccaaggagggaagagtcccagtgaactcggcccctcctcaatgggctttcccccaactcaggacagaacagtgtttaatgtaaagtttgttatagtctatgtgattctggaagcaaatggcaaaaccagtagcttcccaaaaacagcccccctgctgctgcccggagggttcactgaggggtggcacgggaccactccaggtggaacaaacagaaatgactgtggtgtggagggagtgagccagcagcttaagtccagctcatttcagtttctatcaaccttcaagtatccaattcagggtccctggagatcatcctaacaatgtggggctgttaggttttacctttgaactttcatagcactgcagaaaccttttaaaaaaaaatgcttcatgaatttctcctttcctacagttgggtagggtaggggaaggaggataagcttttgttttttaaatgactgaagtgctataaatgtagtctgttgcatttttaaccaacagaacccacagtagaggggtctcatgtctccccagttccacagcagtgtcacagacgtgaaagccagaacctcagaggccacttgcttgctgacttagcctcctcccaaagtccccctcctcagccagcctccttgtgagagtggctttctaccacacacagcctgtccctgggggagtaattctgtcattcctaaaacacccttcagcaatgataatgagcagatgagagtttctggattagcttttcctattttcgatgaagttctgagatactgaaatgtgaaaagagcaatcagaattgtgctttttctcccctcctctattccttttagggaataatattcaatacacagtacttcctcccagcattgctactgctcagcttcttctttcattctaatccttgctattaagaatttaagacttgtgcttacaatatttttgacctggagtggatctatttacatagtcatttaggatccatgcagctttttttgtctttttaagattattggctcataagcatatgtatactggtttatggaactttatttacactcctctatcatgcaaaaaaattttgactttttagtactaagcttaatttttaaaaacaaaatctgtagtgttgacaaataaatagttgctcttctacactaggggtttcacctgcaggtttgacacgcagttgctcgcttttcctgccctgtcaagcttctctgttctggcgtgagttgtgaaagagttgaagacagcttcccatgccggtacacagccagtagcctaaatctccagtacttgagctgaccattgaactagggcaagtcttaaatgtgtacatgtagttgaatttcagtccttacgggtaaacagattgagcatggctctctattccctcagcctaagaaacactcatgggaatgcatttggcaacccaaggaaccatttgcttaaacctggaacatctcacctttttaaatcctaaaaaacactggcagttatattttaaattagtttttatttttatgatggttttatcaaaagacttttattattagattgggacccccttcaaacctaaaaatcaagttatttccttttataatacttttcttccccatggaacaaatgggatcaatttgtgagttttttcctttaatgataactaaaatccctctaatttctcatttatgcttttgtcttttttatgaaatatttcttttaaaagccccagtctcacctacgaaatatgaagagcaaaagctgattttgcttacttgctaaactgttgggaaagctctgtagagcatggttccagtgaggccaagattgaaatttgatactaaaaaggccacctagctttttgcagataacaaacaagaaagctattccaagactcagatgatgccagctgtctcccacgtgtgtattatggttcaccagggggaactggcaaaagtgtgtgtggggaggggaagggtgtgtgagtggttctgagcaaataactacagggtgcccattaccactcaagaagacacttcacgtattcttgtatcaaattcaataatcttaaacaatttgtgtagaagtccacagacatctttcaaccaccttttaggctgcatatggattgccaagtcagcatatgaggaattaaagacattgtttttaaaaaaaaaaaatcatttagatgcacttttttgtgtgttctttaaataaatccaaaaaaaatgtgaaaaaaaaaa

SEQ ID NO: 1919 - protein, 457 aa, Homo sapiens
MTTDEGAKNNEESPTATVAEQGEDITSKKDRGVLKIVKRVGNGEETPMIGDKVYVHYKGKLSNGKKFDSSHDRNEPFVFSLGKGQVIKAWDIGVATMKKGEICHLLCKPEYAYGSAGSLPKIPSNATLFFEIELLDFKGEDLFEDGGIIRRTKRKGEGYSNPNEGATVEIHLEGRCGGRMFDCRDVAFTVGEGEDHDIPIGIDKALEKMQREEQCILYLGPRYGFGEAGKPKFGIEPNAELIYEVTLKSFEKAKESWEMDTKEKLEQAAIVKEKGTVYFKGGKYMQAVIQYGKIVSWLEMEYGLSEKESKASESFLLAAFLNLAMCYLKLREYTKAVECCDKALGLDSANEKGLYRRGEAQLLMNEFESAKGDFEKVLEVNPQNKAARLQISMCQKKAKEHNERDRRIYANMFKKFAEQDAKEEANKAMGKKTSEGVTNEKGTDSQAMEEEKPEGHV

SEQ ID NO: 1920 - DNA, 483 bp, Homo sapiens
cgccaccatggtgtgcgtgaacgtcctggccgatgctctcaagagcatcaacaatgccgaaaagagaggcaaacgcccagtgcttattaggccgtgctccaaactcatcgtccggtttctcactgtgatgatgaagcatggttacattggcgaatttgaaatcattgatgatcgcagagctgggaaaattgttgcgaacctcacaggcaggctaaacaagtgtggagtgatcagccccagattcggtgtgcaactcaaagatctagaaaatggcagaataatctgcttccatcccaccagtttggtttcattgtactgacaacctcagctggcatcatggaccatgaagaagcaagacgaaaacacacaggagggaaaatcctgggattctttttctagggatgtaatacatatatttacaaataaaatgtctcatggaaaaaaaagaaaaaagacaggaaaaaaaaaaaaaaaaaaaaaaat

SEQ ID NO: 1921 - DNA, 2888 bp, Homo sapiens
gcctcccgctccagcccggctcattccgcacattccggccagccccctccccacgaccccccttccccggccccccttgcggctccctcgggcccggcggagcggcccggccggagcgcccccgcgagctcggaccaggctcagccgcccagtgggctcaggcccagagcccagagcaaccagcacaatagcgtccaacagctggaacgccagcagcagccccggggaggcccgggaggatgggcccgagggcctggacaaggggctggacaacgatgcggagggcgtgtggagcccggacatcgagcagagcttccaggaggccctggccatctacccgccctgcggccggcggaagatcatcctgtcagacgagggcaagatgtacggccgaaatgagttgattgcacgctatattaaactgaggacggggaagactcggacgagaaaacaggtgtccagccacatacaggttctagctcggaagaaggtgcgggagtaccaggttggcatcaaggccatgaacctggaccaggtctccaaggacaaagcccttcagagcatggcgtccatgtcctctgcccagatcgtctctgccagtgtcctgcagaacaagttcagcccaccttcccctctgccccaggccgtcttctccacttcctcgcggttctggagcagcccccctctcctgggacagcagcctggaccctctcaggacatcaagccctttgcacagccagcctaccccatccagccgcccctgccgccgacgctcagcagttatgagcccctggccccgctcccctcagctgctgcctctgtgcctgtgtggcaggaccgtaccattgcctcctcccggctgcggctcctggagtattcagccttcatggaggtgcagcgagaccctgacacgtacagcaaacacctgtttgtgcacatcggccagacgaaccccgccttctcagacccacccctggaggcagtagatgtgcgccagatctatgacaaattccccgagaaaaagggaggattgaaggagctctatgagaaggggccccctaatgccttcttccttgtcaagttctgggccgacctcaacagcaccatccaggagggcccgggagccttctatggggtcagctctcagtacagctctgctgatagcatgaccatcagcgtctccaccaaggtgtgctcctttggcaaacaggtggtagagaaggtggagactgagtatgccaggctggagaacgggcgctttgtgtaccgtatccaccgctcgcccatgtgcgagtacatgatcaacttcatccacaagctgaagcacctgcccgagaagtacatgatgaacagcgtgctggagaacttcaccatcctgcaggtggtcacgagccgggactcccaggagaccctgcttgtcattgcttttgtcttcgaagtctccaccagtgagcacggggcccagcaccatgtctacaagctcgtcaaagactagggtgccctctgcgcctccttaaggatgcagggtgagcatctcctctccacacctgcctggcacccctgggggggtccaggattgaggattcatctacctgccaggcctcaggcccaggacccaggaggcctccccacctaccccagcacacacactccctgccactgttctgcgctttaattgtgggagaagagaggagaggagggctcagcggtggggcagcctgtccggggcgctgacccaccatcaccctgctctgcccagcctcgcgtgacctcagagaggtggggataggggacaccttcagcctccagcatgtgtggccactgtacccccacccacccttgggggagcatgatgggcaggtgagggcaggatggagaccaagggagtcagtgagcagaggccctgggagtgtccggttggggttggactgaggacagaggggcccacacttccttgcccctttgtgtcccaggcctggtgcccagactccttgcatggcttgtgtggtcctcagactccgcacagcgagcgtaggtctctgggtttcagatgaagtgcccaggctccaggaagttgagggacccacaggagaggtgggcagagctggagttctcatccagggctgcttgtccccagagcccaggtttatactacctccctggggcgggggctggccgcagggtaggggagaggctctgcagtgtggagtggagcctcatcgaggggcgctgggttaggggagcacctgtttcagactgggcatgaagaagggagcacagcagctactagaccccattagcacctcattagcccacaagccagccaggggccccaggaagatggggcaccccccagcaccctccagattgagagcaaggtagaggaaggagtcccagcctctgggcagaccagaggcccagagggagagagtagcagaaggcttttgatttttctcttgcctgaggcttgaatctgacaaacccttggtgggcactgctcccttaggttcttccccacctcaatctacctgcctagagtagcagctcccagacccagttctgggactgaaggttaacccttcacctgctgtcccttcttaacacccaggcccccagagccagctgggcctgtccagcagccacctgtgggtatttatgagtttcatatgaagtactgtgccccttcccttcctcatcccgaccctgcccgagcttcctgaaggtcctcactgtttgcatatcgctcaggccacctccaaaccccacctaggttttataatgtatattatatatttttttgtgtatttttaaaatccagctgtgatgggttatatcataaatgcagcttggggttggagcaggggccctcaaaggcccagctcctgctc

SEQ ID NO: 1922 - DNA, 700 bp, Rattus norvegicus
gcggcgtgagaagccatgagcagcaaagtctctcgcgacaccctgtacgaggcggtgcgggaagtcctgcacgggaaccagcgcaagcgccgcaagttcctggagacggtggagttgcagatcagcttgaagaactatgatccccagaaggacaagcgcttctcgggcaccgtcaggcttaagtccactccccgccctaagttctctgtgtgtgtcctgggggaccagcagcactgtgacgaggctaaggccgtggatatcccccacatggacatcgaggcgctgaaaaaactcaacaagaataaaaaactggtcaagaagctggccaagaagtatgatgcgtttttggcctcagagtctctgatcaagcagattccacgaatcctcggcccaggtttaaataaggcaggaaagttcccttccctgctcacacacaacgaaaacatggtggccaaagtggatgaggtgaagtccacaatcaagttccaaatgaagaaggtgttatgtctggctgtagctgttggtcacgtgaagatgacagacgatgagcttgtgtataacattcacctggctgtcaacttcttggtgtcattgctcaagaaaaactggcagaatgtccgggccttatatatcaagagcaccatgggcaagccccagcgcctatattaaggcacatttgaataaattctattaccagttc

SEQ ID NO: 1923 - protein, 217 aa, Rattus norvegicus
MSSKVSRDTLYEAVREVLHGNQRKRRKFLETVELQISLKNYDPQKDKRFSGTVRLKSTPRPKFSVCVLGDQQHCDEAKAVDIPHMDIEALKKLNKNKKLVKKLAKKYDAFLASESLIKQIPRILGPGLNKAGKFPSLLTHNENMVAKVDEVKSTIKFQMKKVLCLAVAVGHVKMTDDELVYNIHLAVNFLVSLLKKNWQNVRALYIKSTMGKPQRLY

SEQ ID NO: 1924 - DNA, 1088 bp, Homo sapiens
gtgagtttacccctatgagactgtgagaggcccggggcctacctcaaaggagcggggtcgcgaagctagctagcagcggcccccctccaggtccccgggcccggcggcgcggcggcggcttggttgtgaagaggcggggaagcgggtgtccggtccccgccatggagggcatggacgtagacctggacccggagctgatgcagaagttcagctgcctgggcaccaccgacaaggacgtgctcatctccgagttccagaggctgctcggcttccagctcaatcctgccggttgcgccttcttcctggacatgaccaactggaacctacaagcagcaattggcgcctattatgactttgagagcccaaacatcagtgtgccctctatgtcctttgttgaagatgtcaccataggagaaggggagtcaatacctccggatactcagtttgtaaaaacatggcggatccagaattctggggcagaggcctggcctccaggggtttgtcttaaatatgtcgggggagaccaatttggacatgtgaacatggtgatggtgagatcgctagagccccaagagattgcagatgtcagcgtccagatgtgcagccccagcagagcaggaatgtatcagggacagtggcggatgtgcactgctacaggactctactatggagatgtcatctgggtgattctcagtgtggaggtgggtggacttttaggagtaacgcagcagctgtcatcttttgaaacggagttcaacacacagccgcatcgtaaggtagaaggaaacttcaacccttttgcctctccccaaaagaaccgacaatcagatgaaaacaacttaaaagaccctgggggctccgagttcgactcgatcagcaaaaacacatgggctcctgctcctgacacatgggctcctgctcctgaccaaactgagcaagaccagaatagactgtcacagaactctgtaaatctgtctcccagcagtcacgcaaacaacttatcagtagtgacttacagtaaggggctccatgggccttaccccttcggccagtcttaaacgggtgtcagcaaaaaaaaaaaaaaaaaa

SEQ ID NO: 1925 - protein, 298 aa, Homo sapiens
MEGMDVDLDPELMQKFSCLGTTDKDVLISEFQRLLGFQLNPAGCAFFLDMTNWNLQAAIGAYYDFESPNISVPSMSFVEDVTIGEGESIPPDTQFVKTWRIQNSGAEAWPPGVCLKYVGGDQFGHVNMVMVRSLEPQEIADVSVQMCSPSRAGMYQGQWRMCTATGLYYGDVIWVILSVEVGGLLGVTQQLSSFETEFNTQPHRKVEGNFNPFASPQKNRQSDENNLKDPGGSEFDSISKNTWAPAPDTWAPAPDQTEQDQNRLSQNSVNLSPSSHANNLSVVTYSKGLHGPYPFGQS

SEQ ID NO: 1926 - DNA, 1677 bp, Homo sapiens
ggcacgagggggtgagggtctgcctgcctgtttctgtctgggtgtctgagttccaaaaaatgtgtgttgtttgttcctcctcatcctcttctgagactgttgtttttttagagcttgattgtgggagaaaagcttgtgtgaaattccctcttcacctccccaccccccaaaaaataaaagggggcataaactttattccactggagaagccctgggggtggctggagccagcctgctgagaagcgtggtgcagctgggtctgggacttcactagagcttactctggagcacctattttctgtgcacatgggagtgctccactccctagcagagcagagggaagtctctgccaggtacccacgccacaggcctcaggatggctttttgtctgagggcctcattaggcccagactgctgctgctggtaccagtctcctgagacactgcctccctggagcccatgcatgcccagctgttcttactgcttagtagccttgaagcagcacatctccactgtccctggcaggattgtgggaggcttcacaacccctgctttcctgacttcctcttctgcccaacactgggtgccccttcccagtttcccagcaggggcttcatgggccaccgtcagtgggtctgggcctgccagagtcgtcttgctcttcctcttgcttctaggcaaccacacttggcaagttaaatgtcccaagcaccttgtctcccttcccaagaacaaaccatttctgtgcacatccttggaggcgagatgagctccttgcagagggccagagtaagtgcaagtcatggagtgcaggcagaggggtccatggcttccccagcccagggagggtatcagtatcattcattctctctcccctcactggtatgggttcagagcaatgcctagggcccctctctgctcccctgcctagtggggtggtagtggctacctctcagccccaatagtccctgctcctcttagaatcttcaccaagtggcaggccacctctgggcaggaccacctgcgtctggcacccaggaggtgaggcagacaccatggttaggtgatagggtctgaacccagttggggagacagaggggttcagacttgggaagaatctgtcagtgtgcatggagtgaggtgtgtgtgtgtggatggatgtgcacgtgtgcatgctttttttctttttgccgtgaggacagttgaatttggggcatttttctacaagaagcagtcagccttctctcccccataaggactggctgtaaccttaagcccatcaaagttacttccagcctggagagaacctcaccaaacagctggtgtggcctgagggtggccatggtgggaaatgggcatgagaataaatacctccccaaattcaatctgagcccagcaggagaggatggtagggttgccagggctcagaagtgcaagctgattactcaccccaccctgcctcgccgcacctttcctttgtttccttgggtgaatgcaggagcagcagtggctgcccttcccacctggacagtggtgtgtgtagaaagccagctggatgtttgtggtggggcctcatggtgcctaggaggagataaagatgaggaggtttttccttattgtataaatgaatatttgtatgattaaattaacacacacaccaaaaaaaaaaaaaaaaaa

SEQ ID NO: 1927 - protein, 130 aa, Homo sapiens
MAFCLRASLGPDCCCWYQSPETLPPWSPCMPSCSYCLVALKQHISTVPGRIVGGFTTPAFLTSSSAQHWVPLPSFPAGASWATVSGSGPARVVLLFLLLLGNHTWQVKCPKHLVSLPKNKPFLCTSLEAR

SEQ ID NO: 1928 - DNA, 583 bp, Homo sapiens
agagtcgtcttgctcttcctcttgcttctaggcaaccacacttggcaagttaaatgtcccaagcaccttgtctcccttcccaagaacaaaccatttttttctttttgccgtgaggacagttgaatttggggcatttttctacaagaagcagtcagccttctctcccccataaggactggctgtaaccttaagcccatcaaagttacttccagcctggagagaacctcaccaaacagctggtgtggcctgagggtggccatggtgggaaatgggcatgagaataaatacctccccaaattcaatctgagcccagcaggagaggatggtagggttgccagggctcagaagtgcaagctgattactcaccccaccctgcctcgccgcacctttcctttgtttccttgggtgaatgcaggagcagcagtggctgcccttcccacctggacagtggtgtgtgtagaaagccagctggatgtttgtggtggggcctcatggtgcctaggaggagataaagatgaggaggtttttccttattgtataaatgaatatttgtatgattaaattaacacacacaccaaaaaaa

SEQ ID NO: 1929 - DNA, 1894 bp, Homo sapiens
gtctgacttcctcccagcacattcctgcactctgccgtgtccacactgccccacagacccagtcctccaagcctgctgccagctccctgcaagcccctcaggttgggccttgccacggtgccagcaggcagccctgggctgggggtaggggactccctacaggcacgcagccctgagacctcagagggccaccccttgagggtggccaggcccccagtggccaacctgagtgctgcctctgccaccagccctgctggcccctggttccgctggccccccagatgcctggctgagacacgccagtggcctcagctgcccacacctcttcccggcccctgaagttggcactgcagcagacagctccctgggcaccaggcagctaacagacacagccgccagcccaaacagcagcggcatgggcagcgccagcccgggtctgagcagcgtatcccccagccacctcctgctgccccccgacacggtgtcgcggacaggcttggagaaggcggcagcgggggcagtgggtctcgagagacgggactggagtcccagtccacccgccacgcccgagcagggcctgtccgccttctacctctcctactttgacatgctgtaccctgaggacagcagctgggcagccaaggcccctggggccagcagtcgggaggagccacctgaggagcctgagcagtgcccggtcattgacagccaagccccagcgggcagcctggacttggtgcccggcgggctgaccttggaggagcactcgctggagcaggtgcagtccatggtggtgggcgaagtgctcaaggacatcgagacggcctgcaagctgctcaacatcaccgcagatcccatggactggagccccagcaatgtgcagaagtggctcctgtggacagagcaccaataccggctgccccccatgggcaaggccttccaggagctggcgggcaaggagctgtgcgccatgtcggaggagcagttccgccagcgctcgcccctgggtggggatgtgctgcacgcccacctggacatctggaagtcagcggcctggatgaaagagcggacttcacctggggcgattcactactgtgcctcgaccagtgaggagagctggaccgacagcgaggtggactcatcatgctccgggcagcccatccacctgtggcagttcctcaaggagttgctactcaagccccacagctatggccgcttcattaggtggctcaacaaggagaagggcatcttcaaaattgaggactcagcccaggtggcccggctgtggggcatccgcaagaaccgtcccgccatgaactacgacaagctgagccgctccatccgccagtattacaagaagggcatcatccggaagccagacatctcccagcgcctcgtctaccagttcgtgcaccccatctgagtgcctggcccagggcctgaaacccgccctcaggggcctctctcctgcctgccctgcctcagccaggccctgagatgggggaaaacgggcagtctgctctgctgctctgaccttccagagcccaaggtcagggaggggcaaccaactgccccagggggatatgggtcctctggggccttcgggaccatggggcaggggtgcttcctcctcaggcccagctgctcccctggaggacagagggagacagggctgctccccaacacctgcctctgaccccagcatttccagagcagagcctacagaagggcagtgactcgacaaaggccacaggcagtccaggcctctctctgctccatccccctgcctcccattctgcaccacacctggcatggtgcagggagacatctgcacccctgagttgggcagccaggagtgcccccgggaatggataataaagatactagagaactg

SEQ ID NO: 1930 - protein, 335 aa, Homo sapiens
MGSASPGLSSVSPSHLLLPPDTVSRTGLEKAAAGAVGLERRDWSPSPPATPEQGLSAFYLSYFDMLYPEDSSWAAKAPGASSREEPPEEPEQCPVIDSQAPAGSLDLVPGGLTLEEHSLEQVQSMVVGEVLKDIETACKLLNITADPMDWSPSNVQKWLLWTEHQYRLPPMGKAFQELAGKELCAMSEEQFRQRSPLGGDVLHAHLDIWKSAAWMKERTSPGAIHYCASTSEESWTDSEVDSSCSGQPIHLWQFLKELLLKPHSYGRFIRWLNKEKGIFKIEDSAQVARLWGIRKNRPAMNYDKLSRSIRQYYKKGIIRKPDISQRLVYQFVHPI

SEQ ID NO: 1931 - DNA, 1663 bp, Homo sapiens
cggcggccgagctcgcgcatcccagccatcactcttccacctgctccttagagaagggaagatgagtgagtcgagctcgaagtccagccagcccttggcctccaagcaggaaaaggacggcactgagaagcggggccggggcaggccgcgcaagcagcctccggtgagtcccgggacagcgctggtagggagtcagaaggagcccagcgaagtgccaacacctaagagacctcggggccgaccaaagggaagcaaaaacaagggagaaggaggaagaggagggcatctcgcaggagtcctcggaggaggagcagtgacccatgcgtgccgcctgctcctcactggaggagcagcttccttctgggactggacagctttgctccgctcccaccgcccccaccccttccccaggcccaccatcaccaccgcctctggccgccacccccatcttccacctgtgccctcaccaccacactacacagcacaccagccgctgcagggctcccatgggctgagtggggagcagttttcccctggcctcagttcccagctccccccgcccacccacgcatacacacatgccctcctggacaaggctaacatcccacttagccgcaccctgcacctgctgcgtccccactcccttggtggtggggacattgctctctgggcttttggtttgggggcgccctctctgctccttcactgttccctctggcttcccatagtggggcctgggagggttcccctggccttaaaaggggcccaagccccatctcatcctggcacgccctactccactgccctggcagcagcaggtgtggccaatggaggggggtgctggcccccaggattcccccagccaaactgtctttgtcaccacgtggggctcacttttcatccttccccaacttccctagtccccgtactaggttggacagcccccttcggttacaggaaggcaggaggggtgagtcccctactccctcttcactgtggccacagcccccttgccctccgcctgggatctgagtacatattgtggtgatggagatgcagtcacttattgtccaggtgaggcccaagagccctgtggccgccacctgaggtgggctggggctgctcccctaaccctactttgcttccgccactcagccatttccccctcctcagatggggcaccaataacaaggagctcaccctgcccgctcccaacccccctcctgctcctccctgccccccaaggttctggttccatttttcctctgttcacaaactacctctggacagttgtgttgttttttgttcaatgttccattcttcgacatccgtcattgctgctgctaccagcgccaaatgttcatcctcattgcctcctgttctgcccacgatcccctcccccaagatactctttgtggggaagaggggctggggcatggcaggctgggtgaccgactaccccagtcccagggaaggtggggccctgcccctaggatgctgcagcagagtgagcaagggggcccaaatcgaccataaagggtgtaggggccacctcctccccctgttctgttggggaggggtagccatgatttgtcccagcctggggctccctctctggtttcctatttgcagttacttgaataaaaaaaatatccttttctgg

SEQ ID NO: 1932 - DNA, 2113 bp, Homo sapiens
ggtggccacagagcaacttcctctagagggagctgattggagccgggtgccgctggcacctctatgatcactggagtctcgcgggtccctcgggctgcacagggacaagtaaaggctacatccagatgccgggaatgcactgacgcccattcctggaaactgggctcccactcagcccctgggagcagcagccgccagcccctcgggacctccatctccaccctgctgagccacccgggttgggccaggatcccggcaggctgatcccgtcctccactgagacctgaaaaatggcttcggggcaaggcccaggtcctcccaggcaggagtgcggagagcctgccctgccctctgcttctgcaggaacaggaggctgaaggggtggctgcccctgccgacccagagatggtcaccttacctctgcaacctacagcaccatggggcaggtgggacggcagctcgccatcatcggggacgacatcaaccgacgctatgactcagagttccagaccatgttgcagcacctgcagcccacggcagagaatgcctatgagtacttcaccaagattgccaccagcctgtttgagagtggcatcaattggggccgtgtggtggctcttctgggcttcggctaccgtctggccctacacgtctaccagcatggcctgactggcttcctaggccaggtgacccgcttcgtggtcgacttcatgctgcatcactgcattgcccggtggattgcacagaggggtggctgggtggcagccctgaacttgggcaatggtcccatcctgaacgtgctggtggttctgggtgtggttctgttgggccagtttgtggtacgaagattcttcaaatcatgactcccaagggtgccctttggggtcccggttcagacccctgcctggacttaagcgaagtctttgccttctctgttcccttgcaggggtcccccctcaagagtacagaagctttagcaagtgtgcactccagcttcggagggcccctgcgtgggggccagtcaggctgcagaggcacctcaacattgcatggtgctagtgggccctctctctgggcccaggggctgtggccgtctcctccctcagctctctgggacctccttagccctgtctgctaggcgctggggagactgataacttggggaggcaagagactgggagccacttctccccagaaagtgtttaacggttttagctttttataatacccttgtgagagcccattcccaccattctacctgaggccaggacgtctggggtgtggggattggtgggtctatgttccccaggattcagctattctggaagatcagcaccctaagagatgggactaggacctgagcctggtcctggccgtccctaagcatgtgtcccaggagcaggacctactaggagaggggggccaaggtcctgctcaactctacccctgctcccattcctccctccggccatactgcctttgcagttggactctcagggattctgggcttggggtgtggggtggggtggagtcgcagaccagagctgtctgaactcacgtgtcagaagcctccaagcctgcctcccaaggtcctctcagttctctcccttcctctctccttatagacacttgctcccaacccattcactacaggtgaaggctctcacccccatccctgggggccttgggtgagtggcctgctaaggctcctccttgcccagactacagggcttaggacttggtttgttatatcagggaaaaggagtagggagttcatctggagggttctaagtgggagaaggactatcaacaccactaggaatcccagaggtgggatcctccctcatggctctggcacagtgtaatccaggggtgtagatgggggaactgtgaatacttgaactctgttcccccaccctccatgctcctcacctgtctaggtctcctcagggtggggggtgacagtgccttctctattgggcacagcctagggtcttgggggtcaggggggagaagttcttgattcagccaaatgcagggaggggaggcagatggagcccataggccaccccctatcctctgagtgtttggaaataaactgtgcaatcccctc

SEQ ID NO: 1933 - protein, 141 aa, Homo sapiens
MGQVGRQLAIIGDDINRRYDSEFQTMLQHLQPTAENAYEYFTKIATSLFESGINWGRVVALLGFGYRLALHVYQHGLTGFLGQVTRFVVDFMLHHCIARWIAQRGGWVAALNLGNGPILNVLVVLGVVLLGQFVVRRFFKS

SEQ ID NO: 1934 - DNA, 722 bp, Homo sapiens
ggccggagccgtgcgagttctctaccctgcttcgcgagcgggcgagagaacgcgagtcccaggatccccggcacccagttctcttccactgcatgatttttcctttgaccgggtattcccaccaggaagtggacaggatgaagtgtttgaagagattgccatgcttgtccagtcagccctggatggctatccagtatgcatctttgcctatggccagacaggcagtggcaagaccttcacaatggagggtgggcctgggggagacccccagttggaggggctgatccctcgggccctgcggcacctcttctctgtggctcaggagctgagtggtcagggctggacctacagctttgtagcaagctacgtagagatctacaatgagactgtccgggacctgctggccactggaacccggaagggtcaagggggcgagtgtgagattcgccgtgcagggccagggagtgaggagctcactgtcaccaatgctcgatatgtccctgtctcctgtgagaaagaagtggacgccctgcttcatctggcccgccagaatcgggctgtggcccgcacagcccagaatgaacggtcatcacgcagccacagtgtattccagctacagatttctggggagcactccagccgaggcctgcagtgtggggcccccctcagtcttgtggacctggccgggagtgagcgacttgaccccggcttagccctcggcc

SEQ ID NO: 1935 - protein, 673 aa, Homo sapiens
MDPQRSPLLEVKGNIELKRPLIKAPSQLPLSGSRLKRRPDQMEDGLEPEKKRTRGLGATTKITTSHPRVPSLTTVPQTQGQTTAQKVSKKTGPRCSTAIATGLKNQKPVPAVPVQKSGTSGVPPMAGGKKPSKRPAWDLKGQLCDLNAELKRCRERTQTLDQENQQLQDQLRDAQQQVKALGTERTTLEGHLAKVQAQAEQGQQELKNLRACVLELEERLSTQEGLVQELQKKQVELQEERRGLMSQLEEKERRLQTSEAALSSSQAEVASLRQETVAQAALLTEREERLHGLEMERRRLHNQLQELKGNIRVFCRVRPVLPGEPTPPPGLLLFPSGPGGPSDPPTRLSLSRSDERRGTLSGAPAPPTRHDFSFDRVFPPGSGQDEVFEEIAMLVQSALDGYPVCIFAYGQTGSGKTFTMEGGPGGDPQLEGLIPRALRHLFSVAQELSGQGWTYSFVASYVEIYNETVRDLLATGTRKGQGGECEIRRAGPGSEELTVTNARYVPVSCEKEVDALLHLARQNRAVARTAQNERSSRSHSVFQLQISGEHSSRGLQCGAPLSLVDLAGSERLDPGLALGPGERERLRETQAINSSLSTLGLVIMALSNKESHVPYRNSKLTYLLQNSLGGSAKMLMFVNISPLEENVSESLNSLRFASKVNQCVIGTAQANRK

SEQ ID NO: 1936 - DNA, 630 bp, Homo sapiens
ctctcggctttcggctcggaggaggccaaggtgcaactttcttcggtcatcctgaatctgggttcatccgacaccagctgcctccaccatgccaccgaagttcgaccccaacgagatcaaggtcgtatacctgaggtgcaccagaggtgaagtcggtgccacttctgccctggcccccaagatcggccccctgggtctgtctccaaaaaaggttggtgatgacattgccaaggcaacgggtgactggaagggcctgaggattacagtgaaactgaccattgagaacagacaggcccagattgaggtggtgccttctgcctctgccccgatcatcaaagccctcaagaaaccaccaagagacagaaagaaacagaaaaacattaaacacaatgggaatatcacttttgatgagatcgtcaacattgctcgacagatgcggcaccgatccttagccagagaactctctggaaccattaaagagattccggggactgcccagtctatgggctgtaatgttgatggccaccaccctcatgacatcatagatgacatcaacagtggtgctgtggaatgcccagctagttaagcacaaaggaaaatatttcaataaaggatcatttgacaactggt

SEQ ID NO: 1937 - DNA, 1624 bp, Homo sapiens
gttccggcgggggcggccgagggggaagagtgtgtgtctgcgggagaaagaggagaatcacccaagcggcctcagaagtcccagggagtggaggcccctgccatggagccgtgtggtgtatgtgtggtaacaccatgtctgtgcccctgctcaacgatgctgccaccgtgtctggagctgagcgggaaacggccgtggttatttttttacatggacttggagacacagggcacagctgggctgacgccctctccaccattcggctccctcacgtcaagtacatctgttcccatgagcctaggatccctgtgaccctcaacatgaagatggtgatgccctcctggtttgacctgatggggctgagtccagatgccccagaggacgaggctggcatcaagaaggcagcagagaacatcaaggccttgattgagcatgaaatgaagaacgggatccctgccaatcaaatcatcctgggaggcttttcacagggccgggccctgtccctctacatggccctcacctgcccccaccctctggctggcatcctggctttgagctgctggccgcctctgcaccgggccttcccccaggcagctaatggcagtgccaaggacctggccatcctccagtgccatggggagctggaccccatggtgcccgtacggtttggggccctgatggctgagaagctccggtctgttgtcacacctgccagggtccagttccagacatacctgggtgtcatgcacagctcctgtcctcaggagatggcagctgtgaaggaatttcttgagaagctgctgcctcctgtctaactagtcgctggccccagtgcagtaccccagctcatgggggactcagcaagtaagcatggcaccatcttgggtctgagctggtcgagcccctgtccccacccttcctgacctgtccttttcccacaggcctctaggggcaggtggcaaggcctggctgggccttccttcctggcctcagccacctggctctgtctgcagtaggggcaggctgctttcttatcccatttccctggaggcgggcccccctggcagcagtattggaggggctacaggcagctggagaaagaggcccagccactgacccactcactcaggacctcactcactagccccactttgggccccctcctgtaaccttagggtttggcccatggggccctcccaggcccctgccccaactgattctgcccagataatcttgtgtctcctgcctccactcagctgcttctcagtcatgaacgtggccatggccccgggggtccccttgctgctgtgggctccctgtccctgggcaggagtgctggtgaggaggtggagccttttgaggggggccttccctcagctgtttccccacactggggggctgggccctgcctccccgttaccctccttccctgcaggcctggagcctgtagggctggactgaggttcaggtctccccccagctgtctcacccccactttgtccccactctagagcagggaggcagtgggggaggagttgtgtcttgtcttctgtctccatgtggtttttgggtgtttttcttcttgtgtcctggattctgataaaattaaagaaattgcttcctc

SEQ ID NO: 1938 - DNA, 856 bp, Homo sapiens
gtgtgtctgcgggagaaagaggagaatcacccaagcggcctcagaagtcccagggagtggaggcccctgccatggagccgtgtggtgtatgtgtggtaacaccatgtctgtgcccctgctcaacgatgctgccaccgtgtctggagctgagcgggaaacggccgtggttatttttttacatggacttggagacacagggcacagctgggctgacgccctctccaccattcggctccctcacgtcaagtacatctgttcccatgagcctaggatccctgtgaccctcaacatgaagatggtgatgccctcctgtcaaggccttgattgagcatgaaatgaagaacgggatccctgccaatcaaatcatcctgggaggcttttcacagggccgggccctgtccctctacatggccctcacctgcccccaccctctggctggcatcctggctttgagctgctggccgcctctgcaccgggccttcccccaggcagctaatggcagtgccaaggacctggccatcctccagtgccatggggagctggaccccatggtgcccgtacggtttggggccctgatggctgagaagctccggtctgttgtcacacctgccagggtccagttccagacatacctgggtgtcatgcacagctcctgtcctcaggagatggcagctgtgaaggaatttcttgagaagctgctgcctcctgtctaactagtcgctggccccagtgcagtaccccagctcatgggggactcagcaagtaagcatggcaccatcttgggtctgagctggtcgagcccctgtccccacccttcctgacctgtccttttcccacaggcctctaggggcaggtg

SEQ ID NO: 1939 - DNA, 856 bp, Homo sapiens
gaaagaggagaatcacccaagcggcctcagaagtcccagggagtggaggcccctgccatggagccgtgtggtgtatgtgtggtaacaccatgtctgtgcccctgctcaacgatgctgccaccgtgtctggagctgagcgggaaacggccgtggttatttttttacatggacttggagacacagggcacagctgggctgacgccctctccaccattcggctccctcacgtcaagtacatctgttcccatgagcctaggatccctgtgaccctcaacatgaagatggtgatgccctcctggtttgacctgatggggctgagtccagatgccccagaggacgaggctggcatcaagaaggcagcagagaacatcaaggccttgattgagcatgaaatgaagaacgggatccctgccaatcaaatcatcctgggaggcttttcacagggccgggccctgtccctctacatggccctcacctgcccccaccctctggctggcatcctggctttgagctgctggccgcctctgcaccgggccttcccccagggtccagttccagacatacctgggtgtcatgcacagctcctgtcctcaggagatggcagctgtgaaggaatttcttgagaagctgctgcctcctgtctaactagtcgctggccccagtgcagtaccccagctcatgggggactcagcaagtaagcatggcaccatcttgggtctgagctggtcgagcccctgtccccacccttcctgacctgtccttttcccacaggcctctaggggcaggtggcaaggcctggctgggccttccttcctggcctcagccacctggctctgtctgcagtaggggcaggctg

SEQ ID NO: 1940 - DNA, 477 bp, Homo sapiens
gttatttttttacatggacttggagacacagggcacagctgggctgacgccctctccaccattcggctccctcacgtcaagtacatctgttcccatgagcctaggatccctgtgaccctcaacatgaagatggtgatgccctcctggtttgacctgatggggctgagtccagatgccccagaggacgaggctggcatcaagaaggcagcagagaacatcaaggccttgattgagcatgaaatgaagaacgggatccctgccaatcaaatcatcctgggaggcttttcacagggccgggccctgtccctctacatggccctcacctgcccccagctgtctcacccccactttgtccccactctagagcagggaggcagtgggggaggagttgtgtcttgtcttctgtctccatgtggtttttgggtgtttttcttcttgtgtcctggattctgataaaattaaagaaattgcttcctc

SEQ ID NO: 1941 - DNA, 1061 bp, Homo sapiens
acatgaagatggtgatgccctcctggtttgacctgatggggctgagtccagatgccccagaggacgaggctggcatcaagaaggcagcagagaacatcaaggccttgattgagcatgaaatgaagaacgggatccctgccaatcaaatcatcctgggaggcttttcacagggccgggccctgtccctctacatggccctcacctgcccccaccctctggctggcatcctggctttgagctgctggccgcctctgcaccgggccttcccccaggcagctaatggcagtgccaaggacctggccatcctccagtgccatggggagctggaccccatggtgcccgtacggtttggggccctgatggctgagaagctccggtctgttgtcacacctgccagggtccagttccagacatacctgggtgtcatgcacagctcctgtcctcaggagatggcagctgtgaaggaatttcttgagaagctgctgcctcctgtctaactagtcgctggccccagtgcagtaccccagctcatgggggactcagcaagtaagcatggcaccatcttgggtctgagctggtcgagcccctgtccccacccttcctgacctgtccttttcccacaggcctctaggggcaggtggcaaggcctggctgggccttccttcctggcctcagccacctgcctccactcagctgcttctcagtcatgaacgtggccatggccccgggggtccccttgctgctgtgggctccctgtccctgggcaggagtgctggtgaggaggtggagccttttgaggggggccttccctcagctgtttccccacactggggggctgggccctgcctccccgttaccctccttccctgcaggcctggagcctgtagggctggactgaggttcaggtctccccccagctgtctcacccccactttgtccccactctagagcagggaggcagtgggggaggagttgtgtcttgtcttctgtctccatgtggtttttgggtgtttttcttcttgtgtcctggattctgataaaattaaagaaattgcttcctc

SEQ ID NO: 1942 - DNA, 2487 bp, Homo sapiens
cggcacgaggcggtgggagtgggaaggaaggcggagggaaccatgcgaggttctgagaattgcggcgagggtcgcctcgagagacggtttctgagcaggaattctgaaatccccaccacttcctccctccgggggatttgatcccctatggccaccgctaacagcatcatcgtgctggatgatgatgacgaagatgaagcagctgctcagccagggccctcccacccactccccaatgcggcctcacctggggcagaagcccctagctcctctgagcctcatggggccagaggaagcagtagttcgggcggcaagaaatgctacaagctggagaatgagaagctgttcgaagagttccttgaactttgtaagatgcagacagcagaccaccctgaggtggtcccattcctctataaccggcagcaacgtgcccactctctgtttttggcctcggcggagttctgcaacatcctctctagggtcctgtctcgggcccggagccggccagccaagctctatgtctacatcaatgagctctgcactgttctcaaggcccactcagccaaaaagaagctgaacttggcccctgccgccaccacctccaatgagccctctgggaataaccctcccacacacctctccttggaccccacaaatgctgaaaacactgcctctcagtctccaaggacccgtggttcccggcggcagatccagcgtttggagcagctgctggcgctctatgtggcagagatccggcggctgcaggaaaaggagttggatctctcagaattggatgacccagactccgcatacctgcaggaggcacggttgaagcgtaagctgatccgcctctttgggcgactatgtgagctgaaagactgctcttcactgaccggccgtgtcatagagcagcgcatcccctaccgtggcacccgctacccagaggttaacaggcgcattgagcggctcatcaacaagccagggcctgataccttccctgactatggggatgtgcttcgggctgtagagaaggcagctgcccgacacagccttggcctcccccgacagcagctccagctcatggctcaggatgccttccgagatgtgggcatcaggttacaggagcgacgtcacctcgatctcatctacaactttggctgccacctcacagatgactataggccaggcgttgaccctgcactatcagatcctgtgttggcccggcgccttcgggaaaaccggagtttggccatgagtcggctggatgaggtcatctccaaatacgcaatgttgcaagacaaaagtgaggagggcgagagaaaaaagagaagagctcggctccaaggcacctcttcccactctgcagacacccccgaagcctccttggattctggtgagggccctagtggaatggcatcccaggggtgcccttctgcctccagagctgagacagatgacgaagacgatgaggagagtgatgaggaagaggaggaggaggaggaagaagaagaggaggaggccacagattctgaagaggaggaggatctggaacagatgcaggagggtcaggaggatgatgaagaggaggacgaagaggaagaagcagcagcaggtaaagatggagacaagagccccatgtcctcactacagatctccaatgaaaagaacctggaacctggcaaacagatcagcagatcttcaggggagcagcaaaacaaaggacgcatagtgtcaccatcgttactgtcagaagaacccctggccccctccagcatagatgctgaaagcaatggagaacagcctgaggagctgaccctggaggaagaaagccctgtgtctcagctctttgagctagagattgaagctttgcccctggataccccttcctctgtggagacggacatttcctcttccaggaagcaatcagaggagcccttcaccactgtcttagagaatggagcaggcatggtctcttctacttccttcaatggaggcgtctctcctcacaactggggagattctggtcccccctgcaaaaaatctcggaaggagaagaagcaaacaggatcagggccattaggaaacagctatgtggaaaggcaaaggtcagtgcatgagaagaatgggaaaaagatatgtaccctgcccagcccaccttcccccttggcttccttggccccagttgctgattcctccacgagggtggactctcccagccatggcctggtgaccagctccctctgcatcccttctccagcccggctgtcccaaaccccccattcacagcctcctcggcctggtacttgcaagacaagtgtggccacacaatgcgatccagaagagatcatcgtgctctcagactctgattaactgcctccccttctccctgcctccagaatgttctgggataacatttggaggaaggtgggaagcagatgactgaggaagggatggactaagctaatccccttttggtggtgtttcttt

SEQ ID NO: 1943 - protein, 740 aa, Homo sapiens
MATANSIIVLDDDDEDEAAAQPGPSHPLPNAASPGAEAPSSSEPHGARGSSSSGGKKCYKLENEKLFEEFLELCKMQTADHPEVVPFLYNRQQRAHSLFLASAEFCNILSRVLSRARSRPAKLYVYINELCTVLKAHSAKKKLNLAPAATTSNEPSGNNPPTHLSLDPTNAENTASQSPRTRGSRRQIQRLEQLLALYVAEIRRLQEKELDLSELDDPDSAYLQEARLKRKLIRLFGRLCELKDCSSLTGRVIEQRIPYRGTRYPEVNRRIERLINKPGPDTFPDYGDVLRAVEKAAARHSLGLPRQQLQLMAQDAFRDVGIRLQERRHLDLIYNFGCHLTDDYRPGVDPALSDPVLARRLRENRSLAMSRLDEVISKYAMLQDKSEEGERKKRRARLQGTSSHSADTPEASLDSGEGPSGMASQGCPSASRAETDDEDDEESDEEEEEEEEEEEEEATDSEEEEDLEQMQEGQEDDEEEDEEEEAAAGKDGDKSPMSSLQISNEKNLEPGKQISRSSGEQQNKGRIVSPSLLSEEPLAPSSIDAESNGEQPEELTLEEESPVSQLFELEIEALPLDTPSSVETDISSSRKQSEEPFTTVLENGAGMVSSTSFNGGVSPHNWGDSGPPCKKSRKEKKQTGSGPLGNSYVERQRSVHEKNGKKICTLPSPPSPLASLAPVADSSTRVDSPSHGLVTSSLCIPSPARLSQTPHSQPPRPGTCKTSVATQCDPEEIIVLSDSD

SEQ ID NO: 1944 - DNA, 2074 bp, Homo sapiens
ggcacgagggctgagaagagttttgcacgtggatcgccgttcgggtgggcgagatggagacagcccccaagccgggcaaggatgtcccgcccaagaaagacaaacttcagaccaagagaaagaaaccgcggcgatactgggaggaagagaccgttccgaccacagccggagcctctccagggcctcctcgtaacaagaagaatcgggagctccgtcctcagagaccaaaaaatgcttacatcttaaagaagtctcggatctctaagaagcctcaggtcccgaagaaaccccgagaatggaagaacccggagtcccagcgcggcttgtccggggcccaagatccattcccaggccccgcccccgtccctgtggaagtggtccagaagttctgtcgcattgacaaatcccgaaagctaccacattctaaagccaaaactcgaagccgacttgaggtggctgaagctgaggaagaggaaacaagtatcaaagctgctcgttctgagctgctgcttgctgaagaacctgggtttctggaaggggaggatggggaagacacagcaaagatatgccaggctgacattgtggaggctgtggacattgcaagtgcagccaagcactttgacttgaatctgcggcagtttggaccctacagactaaactactctcgaactggaagacacctggcttttggagggcgccgaggtcatgtggctgcccttgattgggtaacaaagaagcttatgtgcgagatcaacgtcatggaggcggtgcgggacatccggtttctccattctgaggcactgcttgctgttgctcagaaccgctggctccacatctatgacaatcagggcattgagctccactgtatccgccgctgtgaccgagtaacacggcttgagttcctgcccttccacttcctcctggctacagcttcagaaacagggtttctaacctacctggatgtgtcagtggggaagattgtggcagctctgaatgctcgagctgggcggctcgatgttatgagtcagaacccttacaatgccgtcatccatctcggacacagcaatggtactgtgtctttatggagtccagctatgaaggagccactggcaaagattctctgtcatcgtggtggggtccgggctgtggcagtagattctacaggcacgtacatggccacctctggcctagaccaccagctgaagatctttgacttgcgagggacgtaccagcctctgagcactcggaccctgccccatggagcagggcacctggccttctcccagaggggactgctggtggcgggaatgggtgacgttgtcaacatctgggcagggcagggcaaggccagcccaccctcccttgaacagccctacctcacccaccggctctcaggccctgtgcatggccttcagttctgcccctttgaagatgtgctgggggtggggcacactgggggcatcaccagcatgctggtccctggggccggtgagcccaacttcgatggcctggagagtaatccatacagaagccggaagcagcgccaggagtgggaggtgaaggccctgctagagaaggtacctgcagagcttatttgtctggacccacgagccctggccgaggtggatgtcatctccctggagcagggaaagaaggagcagatagagaggctgggctatgacccgcaggctaaggctcccttccagccaaagccaaagcagaagggccgcagctccacggcaagcctggtgaagaggaagaggaaggtcatggatgaggaacacagggacaaggtccggcagagccttcagcagcagcatcataaggaggcgaaggccaagcccacgggggcccggccatctgccctggacagatttgtgcgctgagccagactccagggttgcctgggaacagtctctccccaagatcacctgtagggaaatgagtgttccctggaacaaggaggtgggggcagtgtggccccttccccaactgggggtggacagctgtctcctggggtgggttggtattaaagaggaaagcgattttttggaaaaaaaaaaaaaaaaaaaaa

SEQ ID NO: 1945 - protein, 610 aa, Homo sapiens
METAPKPGKDVPPKKDKLQTKRKKPRRYWEEETVPTTAGASPGPPRNKKNRELRPQRPKNAYILKKSRISKKPQVPKKPREWKNPESQRGLSGAQDPFPGPAPVPVEVVQKFCRIDKSRKLPHSKAKTRSRLEVAEAEEEETSIKAARSELLLAEEPGFLEGEDGEDTAKICQADIVEAVDIASAAKHFDLNLRQFGPYRLNYSRTGRHLAFGGRRGHVAALDWVTKKLMCEINVMEAVRDIRFLHSEALLAVAQNRWLHIYDNQGIELHCIRRCDRVTRLEFLPFHFLLATASETGFLTYLDVSVGKIVAALNARAGRLDVMSQNPYNAVIHLGHSNGTVSLWSPAMKEPLAKILCHRGGVRAVAVDSTGTYMATSGLDHQLKIFDLRGTYQPLSTRTLPHGAGHLAFSQRGLLVAGMGDVVNIWAGQGKASPPSLEQPYLTHRLSGPVHGLQFCPFEDVLGVGHTGGITSMLVPGAGEPNFDGLESNPYRSRKQRQEWEVKALLEKVPAELICLDPRALAEVDVISLEQGKKEQIERLGYDPQAKAPFQPKPKQKGRSSTASLVKRKRKVMDEEHRDKVRQSLQQQHHKEAKAKPTGARPSALDRFVR

SEQ ID NO: 1946 - DNA, 549 bp, Homo sapiens
ctctcttccacaggaggcctacacgccgccgcttgtgctgcagccatgtctctagtgatccctgaaaagttccagcatattttgcgagtactcaacaccaacatcgatgggcggcggaaaatagcctttgccatcactgccattaagggtgtgggccgaagatatgctcatgtggtgttgaggaaagcagacattgacctcaccaagagggcgggagaactcactgaggatgaggtggaacgtgtgatcaccattatgcagaatccacgccagtacaagatcccagactggttcttgaacagacagaaggatgtaaaggatggaaaatacagccaggtcctagccaatggtctggacaacaagctccgtgaagacctggagcgactgaagaagattcgggcccatagagggctgcgtcacttctggggccttcgtgtccgaggccagcacaccaagaccactggccgccgtggccgcaccgtgggtgtgtccaagaagaaataagtctgtaggccttgtctgttaataaatagtttatatacaaaaaaa

SEQ ID NO: 1947 - protein, 152 aa, Homo sapiens [sequence omitted]

SEQ ID NO: 1948 - DNA, 2359 bp, Homo sapiens
ggagaggatcccggagccggtgagaattctctgttttttctctaccatcctttccaggccttttcctcacctaatgagtcgtagagacgagggcccagagagtctgtaaagtggctggtgaaagattagtgtcccagggccctacatccgggaggtggttcgggataaagagaactagtcttgggaacaatgtaggtgggaacttaagggaatgggagagcggcccatagaggtggacggagggcgcgattggagtaaagcggaccctgtgtaggtatagagttgagtcaagtggagtcactgcctctgtccctctggtcagcgtgatggccagaggcctgggggccccccactgggtggccgtgggactgctgacctgggcgaccttggggcttctggtggctggactcgggggtcatgacgacctgcacgacgatctgcaagaggacttccatggccacagccacaggcactcacatgaagatttccaccatggccacagccatgcccatggccatggccacactcacgagagcatctggcatggacatacccacgatcacgaccatggacattcacatgaggatttacaccatggccatagccatggctactcccatgagagcctctaccacagaggacatggacatgaccatgagcatagccatggaggctatggggagtctggggctccaggcatcaagcaggacctggatgctgtcactctctgggcttatgcactgggggccacagtgctgatctcagcagctccattttttgtcctcttccttatccccgtggagtcgaactctccccggcatcgctctctacttcagatcttgctcagttttgcttccggtgggctcctgggagatgctttcctgcacctcattcctcatgctcttgaacctcattctcaccacactctggagcaacccggacatggacactcccacagtggccagggccccattctgtctgtgggactgtgggttctcagtggaattgttgcctttcttgtcgtggagaaatttgtgagacatgtgaaaggaggacatggtcacagtcatggacatggacacgctcacagtcatacacgtggaagtcatggacatggaagacaagagcgttctaccaaggagaagcagagctcagaggaagaagaaaaggaaacaagaggggttcagaagaggcgaggagggagcacagtacccaaagatgggccagtgagacctcagaacgctgaagaagaaaaaagaggcttagacctgcgtgtgtcggggtacctgaatctggctgctgacttggcacacaacttcactgatggtctggccattggggcttcctttcgagggggccggggactagggatcctgaccacaatgactgtcctgctacatgaagtgccccacgaggtcggagactttgccatcttggtccagtctggctgcagcaaaaagcaggcgatgcgtctgcaactactgacagcagtaggggcactggcaggcacagcctgtgcccttctcactgaaggaggagcagtgggcagtgaaattgcaggtggtgcaggtcctggctgggtcctgccatttactgcaggtggctttatctacgtagcaacagtgtctgtgttgcccgagctgctgagggaggcatcaccattgcaatcacttctggaggtgctggggctgctggggggagttatcatgatggtgctgattgcccaccttgagtgaggggtggataaactacccctgccccaaacctctacccctaactccaggtcaggggtgcgtagaggttgggggccctggccagggacatctgccaaaggaaggaactgtagcctgggagaatggttactttggcattagggccttcaagggctggcagtcttacagaggctggagcggtgagaatgagaggccagagggaccatagtgttgggcactgtctgaccatgttgcatttggaaggctaaatggggccatgaagaaggctggaagggacagggggtgatggcagcctacctggtgtcccctaccccacctgttctcggagaaccaagttgctacacaggaagttctccaaggtccagtttcctttctcccaccagttggtggaggcttcagggaagaccagagtcctggacagagagggtaacaggaggagtcggggataaacatcaaacatcaatcgtgtgtcctgatttgggagtgattggggggatggggtgggagagggttagttggtattctcatggcctgattttttttgtttctattccttttatatcactgtgtttgaatcgagggggaggggtggtaaccggaaataaagacctccgatcttccgcccc

SEQ ID NO: 1949 - DNA, 1157 bp, Homo sapiens
gctcacagtcatcaattatagaccccacaacatgcgccctgaagacagaatgttccatatcagagctgtgatcttgagagccctctccttggctttcctgctgagtctccgaggagctggggccatcaaggcggaccatgtgtcaacttatgccgcgtttgtacagacgcatagaccaacaggggagtttatgtttgaatttgatgaagatgagatgttctatgtggatctggacaagaaggagaccgtctggcatctggaggagtttggccaagccttttcctttgaggctcagggcgggctggctaacattgctatattgaacaacaacttgaataccttgatccagcgttccaaccacactcaggccaccaacgatccccctgaggtgaccgtgtttcccaaggagcctgtggagctgggccagcccaacaccctcatctgccacattgacaagttcttcccaccagtgctcaacgtcacgtggctgtgcaacggggagctggtcactgagggtgtcgctgagagcctcttcctgcccagaacagattacagcttccacaagttccattacctgacctttgtgccctcagcagaggacttctatgactgcagggtggagcactggggcttggaccagccgctcctcaagcactgggaggcccaagagccaatccagatgcctgagacaacggagactgtgctctgtgccctgggcctggtgctgggcctagtcggcatcatcgtgggcaccgtcctcatcataaagtctctgcgttctggccatgacccccgggcccaggggaccctgtgaaatactgtaaaggtgacaaaatatctgaacagaagaggacttaggagagatctgaactccagctgccctacaaactccatctcagcttttcttctcacttcatgtgaaaactactccagtggctgactgaattgctgacccttcaagctctgtccttatccattacctcaaagcagtcattccttagtaaagtttccaacaaatagaaattaatgacactttggtagcactaatatggagattatcctttcattgagccttttatcctctgttctcctttgaagaacccctcactgtcaccttcccgagaataccctaagaccaataaatacttcagtatttc

SEQ ID NO: 1950 - protein, 260 aa, Homo sapiens
MRPEDRMFHIRAVILRALSLAFLLSLRGAGAIKADHVSTYAAFVQTHRPTGEFMFEFDEDEMFYVDLDKKETVWHLEEFGQAFSFEAQGGLANIAILNNNLNTLIQRSNHTQATNDPPEVTVFPKEPVELGQPNTLICHIDKFFPPVLNVTWLCNGELVTEGVAESLFLPRTDYSFHKFHYLTFVPSAEDFYDCRVEHWGLDQPLLKHWEAQEPIQMPETTETVLCALGLVLGLVGIIVGTVLIIKSLRSGHDPRAQGTL

SEQ ID NO: 1951 - DNA, 4693 bp, Homo sapiens
ggactgcgggataggaagctggggatatggacaagcagcagcgttatagcgctctgggtttcgggacataggcctgggccatgcggcccccttggccccttggcgcgacccccaggaacgttcggaaagctggtcctcgtggctgggggaaaggcggggggtgggggggaagcgggcacgtgaccccggtcagccaatctgggtgctgctgacgtacgcgcgcggccccgatgctctccccacccccccagcccgttcgggaagggaggggctgggggctacgccccatcccccagcacggcttcgttttctgggggggggttgacaccccggattacataccccgtaccaagccgagggcaactttggaggccccctggaaggctttaggatccagattcttcgctgctgctgccttaccgccgagaaccaccacccgccaggcgtcttgcggccacacccctggcgggttcaggcaggctacgcccacgcgacccctcccgtttccctgctttggccaatggaggagctacgaatggcacgacctgctcgagcttggcagtctccagttgggctgtgcatggaagcttgggaagactttgttggaaggggaggcggggagagagtgctggaggctctggggcgatggcttccgcacctcttccaaccaccctctttccctggagtcggcggaccacagctcagccaattggcttggagatgtggcgggttgccacttccctgtgggtctctgcggcactcttctgcctggtgactgacaccttggaaatgaagtttatgacgtcatcgttgcggctggccaatagaaaaagctcccgcggagaggtgttccttccccttcgactcagcttcttcacccgcgtgagcgagcgcgcgcgcgcggagggggtggggaaaatctcaagcagggtggcgcgcatgagcggcgaagctcctcctccccgcctatatataaagggctggcgcggggctcggcggcgccatttcgtgctggagtggagcagcctctagaacgagctggaggattctgcctaccgatacagagccttcgagtcgtccggggccgccattacaatccacctccatccgcttggaaatggccttcgtcccggcctatgactggtcccagcgggcagtacagaccccctagaagcccctggagctcccctttttcgggccccgcccaatcctcggagtctgtccaccccctctactccgccctcaagaggatttcaaagatggaggcggcggctccctaaaccacttttcgtgttcatccgcctccatccgagatcgaaacgggacctcgtcggccccgtaggggcccgacaagaagagggaatccctgcagaccaacagcgggctatattgacgacggtgtctgagatcggggaccgtcttttgaagagtcagtccctccttagttgcccgcctcagctgaggccgccgccattttcttgctgtccgccgtctgcagagcgcgccaagctgcccggagctctccgagaggccccaaagagactgctttcgtgccggccaggcagggggtttgtcgcctggaggcccaagaggaacggcctccccccaacttagcgggttatgctggaccgggcggtgaggggaaccgaggccacccggactttccgcggctgagggcagcgccggttccttgcggtcaagatgctgcaaaacgtgactccccacaataagctccctggggaagggaatgcagggttgctggggctgggcccagaagcagcagcaccagggaaaaggattcgaaaaccctctctcttgtatgagggctttgagagccccacaatggcttcggtgcctgctttgcaacttacccctgccaacccaccacccccggaggtgtccaatcccaaaaagccaggacgagttaccaaccagctgcaatacctacacaaggtagtgatgaaggctctgtggaaacatcagttcgcatggccattccggcagcctgtggatgctgtcaaactgggtctaccggattatcacaaaattataaaacagcctatggacatgggtactattaagaggagacttgaaaacaattattattgggctgcttcagagtgtatgcaagattttaataccatgttcaccaactgttacatttacaacaagcccactgatgatattgtcctaatggcacaaacgctggaaaagatattcctacagaaggttgcatcaatgccacaagaagaacaagagctggtagtgaccatccctaagaacagccacaagaagggggccaagttggcagcgctccagggcagtgttaccagtgcccatcaggtgcctgccgtctcttctgtgtcacacacagccctgtatactcctccacctgagatacctaccactgtcttcaacattccccacccatcagtcatttcctctccacttctcaagtccttgcactctgctggacccccgctccttgctgttactgcagctcctccagcccagccccttgccaagaaaaaaggcgtaaagcggaaagcagatactaccacccctacacctacagccatcttggctcctggttctccagctagccctcctgggagtcttgagcctaaggcagcacggcttccccctatgcgtagagagagtggtcgccccatcaagcccccacgcaaagacttgcctgactctcagcaacaacaccagagctctaagaaaggaaagctttcagaacagttaaaacattgcaatggcattttgaaggagttactctctaagaagcatgctgcctatgcttggcctttctataaaccagtggatgcttctgcacttggcctgcatgactaccatgacatcattaagcaccccatggacctcagcactgtcaagcggaagatggagaaccgtgattaccgggatgcacaggagtttgctgctgatgtacggcttatgttctccaactgctataagtacaatcccccagatcacgatgttgtggcaatggcacgaaagctacaggatgtatttgagttccgttatgccaagatgccagatgaaccactagaaccagggcctttaccagtctctactgccatgccccctggcttggccaaatcgtcttcagagtcctccagtgaggaaagtagcagtgagagctcctctgaggaagaggaggaggaagatgaggaggacgaggaggaagaagagagtgaaagctcagactcagaggaagaaagggctcatcgcttagcagaactacaggaacagcttcgggcagtacatgaacaactggctgctctgtcccagggtccaatatccaagcccaagaggaaaagagagaaaaaagagaaaaagaagaaacggaaggcagagaagcatcgaggccgagctggggccgatgaagatgacaaggggcctagggcaccccgcccacctcaacctaagaagtccaagaaagcaagtggcagtgggggtggcagtgctgctttaggcccttccggctttggaccttctggaggaagtggcaccaagctccccaaaaaggccacaaagacagccccacctgccctgcctacaggttatgattcagaggaggaggaagagagcaggcccatgagttacgatgagaagcggcagctgagcctggacatcaacaaattacctggggagaagctgggccgagttgtgcatataatccaagccagggagccctctttacgtgattcaaacccagaagagattgagattgattttgaaacactcaagccatccacacttagagagcttgagcgctatgtcctttcctgcctacgtaagaaaccccggaagccctacaccattaagaagcctgtgggaaagacaaaggaggaactggctttggagaaaaagcgggaattagaaaagcggttacaagatgtcagcggacagctcaattctactaaaaagccccccaagaaagcgaatgagaaaacagagtcatcctctgcacagcaagtagcagtgtcacgccttagcgcttccagctccagctcagattccagctcctcctcttcctcgtcgtcgtcttcagacaccagtgattcagactcaggctaaggggtcaggccagatggggcaggaaggctccgcaggaccggacccctagaccaccctgccccacctgccccttccccctttgctgtgacacttcttcatctcacccccccctgcccccctctaggagagctggctctgcagtgggggagggatgcagggacatttactgaaggagggacatggacaaaacaacattgaattcccagccccattggggagtgatctcttggacacagagcccccattcaaaatggggcagggcaagggtgggagtgtgcaaagccctgatctggagttacctgaggccatagctgccctattcacttctaagggccctgttttgagattgtttgttctaatttattttaagctaggtaaggctggggggagggtggggccgtggtcccctcagcctccatggggagggaagaagggggagctctttttttacgttgatttttttttttctactctgttttccctttttccttccgctccatttggggccctgggggtttcagtcatctccccatttggtcccctggactgtctttgttgattctaacttgtaaataaagaaaatatt

SEQ ID NO: 1952 - DNA, 1205 bp, Homo sapiens
gggcagaaagggcacgctcttgtgggtgactacaggttaggagaccgttgaacctggaggggccctaggatggaccccgtggaaagattcagagactgcgccctctccctggcgccgccttcccctacacgcggcgggtatattctgttgcagttggcccaggacctgtttccaagactctgccccctcgcacttccgtccctcctggttttgtaaagtgatgctcataggaacccccaccccgcgtgacactactcccagctcctggctgacttctagtcttctggttgaagctgcgcctttagatgacacgaccctacccacccctgtttccagcggatgcccgggcctggagcccacagaattcttccagtccctgggtggggacggagaaaggaacgttcagattgagatggcccatggcaccaccacgctcgccttcaagttccagcatggagtgattgcagcagtggattctcgggcctcagctgggtcctacattagtgccttacgggtgaacaaggtgattgagattaacccttacctgcttggcaccatgtctggctgtgcagcagactgtcagtactgggagcgcctgctggccaaggaatgcaggctgtactatctgcgaaatggagaacgtatttcagtgtcggcagcctccaagctgctgtccaacatgatgtgccagtaccggggcatgggcctctctatgggcagtatgatctgtggctgggataagaagggtcctggactctactacgtggatgaacatgggactcggctctcaggaaatatgttctccacgggtagtgggaacacttatgcctacggtgtcatggacagtggctatcggcctaatcttagccctgaagaggcctatgaccttggccgcagggctattgcttatgccactcacagagacagctattctggaggcgttgtcaatatgtaccacatgaaggaagatggttgggtgaaagtagaaagtacagatgtcagtgacctgctgcaccagtaccgggaagccaatcaataatggtggtggtggcagctgggcaggtctcctctgggaggtcttggccgactcagggacctaagccacgttaagtccaaggagaagaagaggcctagcctgagccaaagagagagtacgggctcagcagccagaggaggccggtgaagtgcatcttctgcgtgttctc

SEQ ID NO: 1953 - protein, 272 aa, Homo sapiens
MLIGTPTPRDTTPSSWLTSSLLVEAAPLDDTTLPTPVSSGCPGLEPTEFFQSLGGDGERNVQIEMAHGTTTLAFKFQHGVIAAVDSRASAGSYISALRVNKVIEINPYLLGTMSGCAADCQYWERLLAKECRLYYLRNGERISVSAASKLLSNMMCQYRGMGLSMGSMICGWDKKGPGLYYVDEHGTRLSGNMFSTGSGNTYAYGVMDSGYRPNLSPEEAYDLGRRAIAYATHRDSYSGGVVNMYHMKEDGWVKVESTDVSDLLHQYREANQ

SEQ ID NO: 1954 - DNA, 1235 bp, Homo sapiens
attcttgtctgttctgcctcactcccgagctctactgactcccaacagagcgcccaagaagaaaatggccataagtggagtccctgtgctaggatttttcatcatagctgtgctgatgagcgctcaggaatcatgggctatcaaagaagaacatgtgatcatccaggccgagttctatctgaatcctgaccaatcaggcgagtttatgtttgactttgatggtgatgagattttccatgtggatatggcaaagaaggagacggtctggcggcttgaagaatttggacgatttgccagctttgaggctcaaggtgcattggccaacatagctgtggacaaagccaacctggaaatcatgacaaagcgctccaactatactccgatcaccaatgtacctccagaggtaactgtgctcacgaacagccctgtggaactgagagagcccaacgtcctcatctgtttcatagacaagttcaccccaccagtggtcaatgtcacgtggcttcgaaatggaaaacctgtcaccacaggagtgtcagagacagtcttcctgcccagggaagaccaccttttccgcaagttccactatctccccttcctgccctcaactgaggacgtttacgactgcagggtggagcactggggcttggatgagcctcttctcaagcactgggagtttgatgctccaagccctctcccagagactacagagaacgtggtgtgtgccctgggcctgactgtgggtctggtgggcatcattattgggaccatcttcatcatcaagggattgcgcaaaagcaatgcagcagaacgcagggggcctctgtaaggcacatggaggtgatggtgtttcttagagagaagatcactgaagaaacttctgctttaatggctttacaaagctggcaatattacaatccttgacctcagtgaaagcagtcatcttcagcattttccagccctatagccaccccaagagtggttatgcctcctcgattgctccatactctaacatctagctggcttccctgtctattgccttttcctgtatctattttcctctatttcctatcattttattatcaccatgcaatgcctctggaataaaacatacaggagtctgtctctgctatggaatgccccatggggcatctcttgtgtacttattgtttaaggtttcctcaaactgtgatttttctgaacacaataaactattttgaagatcttgggtggaa

SEQ ID NO: 1955 - DNA, 1286 bp, Homo sapiens
gccgtcttatctaagtcagagtctcctaaagagccagaacaactgaggaagctcttcattggagggttgagctttgaaacaactgatgagagcctgaggagccattttgagcagtgagggacactcccggacagtgtggtcatgagagatccaaacccaagcgctccaggggctttggatttttcacatatgccactgtggaggaggtggatgcagccgtgaatgcaaggccacacaaggtggatggaagagctgtggaaccaaagagagctgtctcaagagaagattctcaaataccaggtgcccacttaactgtgaaaaagatatatgctggtggcattaaagaagacactgaagaaatcacctaagaaattattttgagtagtatggaaaaattgaagtgattgaaaacatgactgaccgaggcagttgcaagaaaaggggctttgcctttgtaacctttgatgaccatgactccgtggataagactgtcattcagaaataccacagtgtgaatggccacaactgtgaagttaggaaagcctgtcaaagcaagagatggctagtgctccatccagccgaagaggtcgaagtggttctggaaactttggtggtggtcatggaggtggtttcggtgggaatgacaactttgatcatggaggaaacttcagtggttgtggtagctttggtggcagctgtggtggtggtggatatggtggcagtgaggatggctataatggatttggtaatgatgggagcaattttggaggtggtggaagctacaatgattttggcaattacaacaatcagtcttcaaattttggacccatgaagggaggaaactttggaggcagaagctgtggcctctatggtggtggaggccaatactttgccaaaccatgaaaccaaagtggctattgtggttccagtagcagcagtagctatggcagtggcagaagattttaattaggaaacaaagcttagcaggagaggagagccagagaagtgacagggaagctacaggttacaacagatttgtgaactcagccaagcacagtggtggcagggcctagctggtacaaagaagacatgttttagacaaatactcatgtgtatgggcaaaaaactcgaggactgtatttgtgactaattgtataacaggttattttagtttctgttctgtggaaagtgtaaagcattccaacaaagggttttaatgtagatttttttttgcacccatgctgtttattgctaaatgtaatagtctgatcgtgacactgaaaaaa

SEQ ID NO: 1956 - DNA, 2931 bp, Homo sapiens
atggacgaacggctactggggccgccccctccaggcgggggccgggggggcctgggattggtgagtggggagcctgggggccctggcgagcctcccggtggcggagaccccggtgggggtagcgggggggtcccgggaggccgagggaagcaagacatcggggacattctgcagcagataatgaccatcaccgaccagagcctggacgaggcccaggccaagaaacacgccctaaactgccaccgaatgaagcctgctctctttagcgtcctgtgtgaaatcaaggagaaaactggcctcagcattcggagctcccaggaggaggagccggtggacccacagctgatgcgcttggacaacatgcttctggcagagggtgtggctgggcccgagaaagggggcggctcagcagcagcagctgcagccgctgcagcctctggtggtggtgtgtcccctgacaactccatcgaacactcggactatcgcagcaaacttgcccagatccgtcacatataccactcggagctggagaagtatgagcaggcatgtaatgagttcacgacccatgtcatgaacctgctgagggagcagagccgcaccaggcccgtggcccccaaagagatggaacgcatggtgagcatcatccatcgaaagttcagcgccatccagatgcagctgaagcagagcacctgcgaggctgtgatgatcctgcgctcccgtttcctggatgccagacgaaagcgccgtaacttcagcaaacaggccactgaggtcctaaatgagtatttctactcccacctgagtaacccatatcctagtgaggaggccaaggaggagcttgccaagaagtgtggcatcaccgtgtctcaggtctccaactggtttggcaacaagaggattcgctataagaaaaacatcggaaagttccaagaggaggcaaacatctatgctgtcaagaccgccgtgtcagtcacccaggggggccacagccgcaccagctccccgacacccccttcctctgcaggctctggcggctctttcaatctctcaggatctggagacatgtttctggggatgcctgggctcaacggagattcctattctgcttcccaggtggaatcactccgacactcgatggggccagggggctatggggataacctcgggggaggccagatgtacagcccacgggaaatgagggcaaatggcagctggcaagaggctgtgaccccctcttcagtgacatccccaacggagggaccagggagtgttcactctgatacctccaactgatcttgcccctcagggtcacaggggtgggggctctcacaaggcgacttgaagaggacgcaggcttccagaggacaaaccccaatacaggagaagcacaagacagagaagggccaatggggtcatcccctccctaacgagactctctgtgctgggggtgctaattacatggcaggaagaatggggcctctaaggggagtgtggggtctgtctctcccttttttccatctttttcctctctcgctttctttcttacacagaaacatacacataccgagaaacctatttctcagacccctttttctcctctgtctttctctctccctctcccacacctcacacacacatactcccacttgcaactattctgtttctctcctgggctcccccactttcccttccccaccccacttgtatgctctggaatctgtggagacgccagccctgcccaatcagagatgccaaaaatggggacatgacttctggacagaggacatgggccacgcccccatgcatccccacccccgcccctccggacggcttacttacctcatacgcagctcatcttaaaccaatagaatcgctcggtggacgagagtgtctgactcagatatctacctcggagggagtttctgctactttagggaattattgactgggctttggggttgaacttttttttttttaaagaaagaaaaagaaaccctgggatccatctgttttttttgttgttgttgttgtttttgttgttgttggtggtggtggtggtggtggttcttaatttttaatttagtttggggaagtagcttgtttttttttttataaatatgttgatttcttgtcttttttttttatttcttactttcccatattaggggtgatagccaaaggggttctggtaagagaaagggggacaaacagaactggtaaagaggcccccctggctccaggcctgtccatcaggaagtaaattttacagggcaccaagctttgccccctaaaatcccttaggtgttctttgttcatgcaggcaggtttctgccgcatttgatgtggaggcagtgaagggcttgccctgctggcctctcatcccccttcttcccacaacccttgggcagggctggactcagtaattttgaggaaattgaagatgccatcttcccctgtgagtgacatgtctttaattttttaaaaaactactatttgaaaattggagggggaagaatgggaagggagttattgccaaatatgttaaatatgggttggggtgcttgtatatgtatcttcctcaatttccccataaatgaggtatctttttgtcacaccaaaatcaaggggtagggagagggaggaggttgcaaaaagccagatgtgggggaaaagtaacatcaacactgtcccatcctcagccctgaactagctaccatctgatcccctcagacattctcaggattttacaagactgtcagagtggggaacccctcccattaaagatccgggcaggactggggacaggttggaagtgtgatgggtgggggggtgggaggcatgggccgggggcagttctctcctcacttgtaaacttgtgtagtttcacagaaaaaaaacaaaatgcagttttaaataaagaaatttcttttt

SEQ ID NO: 1957 - DNA, 5426 bp, Homo sapiens
agaaggtagcagacagacagacggatctaacctctcttggatcctccagccatgaggctgctctgggggctgatctgggcatccagcttcttcaccttatctctgcagaagcccaggttgctcttgttctctccttctgtggttcatctgggggtccccctatcggtgggggtgcagctccaggatgtgccccgaggacaggtagtgaaaggatcagtgttcctgagaaacccatctcgtaataatgtcccctgctccccaaaggtggacttcacccttagctcagaaagagacttcgcactcctcagtctccaggtgcccttgaaagatgcgaagagctgtggcctccatcaactcctcagaggccctgaggtccagctggtggcccattcgccatggctaaaggactctctgtccagaacgacaaacatccagggtatcaacctgctcttctcctctcgccgggggcacctctttttgcagacggaccagcccatttacaaccctggccagcgggttcggtaccgggtctttgctctggatcagaagatgcgcccgagcactgacaccatcacagtcatggtggagaactctcacggcctccgcgtgcggaagaaggaggtgtacatgccctcgtccatcttccaggatgactttgtgatcccagacatctcagagccagggacctggaagatctcagcccgattctcagatggcctggaatccaacagcagcacccagtttgaggtgaagaaatatgtccttcccaactttgaggtgaagatcacccctggaaagccctacatcctgacggtgccaggccatcttgatgaaatgcagttagacatccaggccaggtacatctatgggaagccagtgcagggggtggcatatgtgcgctttgggctcctagatgaggatggtaagaagactttctttcgggggctggagagtcagaccaagctggtgaatggacagagccacatttccctctcaaaggcagagttccaggacgccctggagaagctgaatatgggcattactgacctccaggggctgcgcctctacgttgctgcagccatcattgagtatccaggtggggagatggaggaggcagagctcacatcctggtattttgtgtcatctcccttctccttggatcttagcaagaccaagcgacaccttgtgcctggggcccccttcctgctgcaggccttggtccgtgagatgtcaggctccccagcttctggcattcctgtcaaagtttctgccacggtgtcttctcctgggtctgttcctgaagtccaggacattcagcaaaacacagacgggagcggccaagtcagcattccaataattatccctcagaccatctcagagctgcagctctcagtatctgcaggctccccacatccagcgatagccaggctcactgtggcagccccaccttcaggaggccccgggtttctgtctattgagcggccggattctcgacctcctcgtgttggggacactctgaacctgaacttgcgagccgtgggcagtggggccaccttttctcattactactacatgatcctatcccgagggcagatcgtgttcatgaatcgagagcccaagaggaccctgacctcggtctcggtgtttgtggaccatcacctggcaccctccttctactttgtggccttctactaccatggagaccacccagtggccaactccctgcgagtggatgtccaggctggggcctgcgagggcaagctggagctcagcgtggacggtgccaagcagtaccggaacggggagtccgtgaagctccacttagaaaccgactccctagccctggtggcgctgggagccttggacacagctctgtatgctgcaggcagcaagtcccacaagcccctcaacatgggcaaggtctttgaagctatgaacagctatgacctcggctgtggtcctgggggtggggacagtgcccttcaggtgttccaggcagcgggcctggccttttctgatggagaccagtggaccttatccagaaagagactaagctgtcccaaggagaagacaacccggaaaaagagaaacgtgaacttccaaaaggcgattaatgagaaattgggtcagtatgcttccccgacagccaagcgctgctgccaggatggggtgacacgtctgcccatgatgcgttcctgcgagcagcgggcagcccgcgtgcagcagccggactgccgggagcccttcctgtcctgctgccaatttgctgagagtctgcgcaagaagagcagggacaagggccaggcgggcctccaacgagccctggagatcctgcaggaggaggacctgattgatgaggatgacattcccgtgcgcagcttcttcccagagaactggctctggagagtggaaacagtggaccgctttcaaatattgacactgtggctccccgactctctgaccacgtgggagatccatggcctgagcctgtccaaaaccaaaggcctatgtgtggccaccccagtccagctccgggtgttccgcgagttccacctgcacctccgcctgcccatgtctgtccgccgctttgagcagctggagctgcggcctgtcctctataactacctggataaaaacctgactgtgagcgtccacgtgtccccagtggaggggctgtgcctggctgggggcggagggctggcccagcaggtgctggtgcctgcgggctctgcccggcctgttgccttctctgtggtgcccacggcagccgccgctgtgtctctgaaggtggtggctcgagggtccttcgaattccctgtgggagatgcggtgtccaaggttctgcagattgagaaggaaggggccatccatagagaggagctggtctatgaactcaaccccttggaccaccgaggccggaccttggaaatacctggcaactctgatcccaatatgatccctgatggggactttaacagctacgtcagggttacagcctcagatccattggacactttaggctctgagggggccttgtcaccaggaggcgtggcctccctcttgaggcttcctcgaggctgtggggagcaaaccatgatctacttggctccgacactggctgcttcccgctacctggacaagacagagcagtggagcacactgcctcccgagaccaaggaccacgccgtggatctgatccagaaaggctacatgcggatccagcagtttcggaaggcggatggttcctatgcggcttggttgtcacggggcagcagcacctggctcacagcctttgtgttgaaggtcctgagtttggcccaggagcaggtaggaggatcgcctgagaaactgcaggagacatctaactggcttctgtcccagcagcaggctgacggctcgttccaggacctctctccagtgatacataggagcatgcaggggggtttggtgggcaatgatgagactgtggcactcacagcctttgtgaccatcgcccttcatcatgggctggccgtcttccaggatgagggtgcagagccattgaagcagagagtggaagcctccatctcaaaggcaagctcatttttgggggagaaagcaagtgctgggctcctgggtgcccacgcagctgccatcacggcctatgccctgacactgaccaaggcccctgcggacctgcggggtgttgcccacaacaacctcatggcaatggcccaggagactggagataacctgtactggggctcagtcactggttctcagagcaatgccgtgtcgcccaccccggctcctcgcaacccatccgaccccatgccccaggccccagccctgtggattgaaaccacagcctacgccctgctgcacctcctgcttcacgagggcaaagcagagatggcagaccaggctgcggcctggctcacccgtcagggcagcttccaagggggattccgcagtacccaagacacggtgattgccctggatgccctgtctgcctactggattgcctcccacaccactgaggagaggggtctcaatgtgactctcagctccacaggccggaatgggttcaagtcccacgcgctgcagctgaacaaccgccagattcgcggcctggaggaggagctgcagttttccttgggcagcaagatcaatgtgaaggtgggaggaaacagcaaaggaaccctgaaggtccttcgtacctacaatgtcctggacatgaagaacacgacctgccaggacctacagatagaagtgacagtcaaaggccacgtcgagtacacgatggaagcaaacgaggactatgaggactatgagtacgatgagcttccagccaaggatgacccagatgcccctctgcagcccgtgacacccctgcagctgtttgagggtcggaggaaccgccgcaggagggaggcgcccaaggtggtggaggagcaggagtccagggtgcactacaccgtgtgcatctggcggaacggcaaggtggggctgtctggcatggccatcgcggacgtcaccctcctgagtggattccacgccctgcgtgctgacctggagaagctgacctccctctctgaccgttacgtgagtcactttgagaccgaggggccccacgtcctgctgtattttgactcggtccccacctcccgggagtgcgtgggctttgaggctgtgcaggaagtgccggtggggctggtgcagccggccagcgcaaccctgtacgactactacaaccccgagcgcagatgttctgtgttttacggggcaccaagtaagagcagactcttggccaccttgtgttctgctgaagtctgccagtgtgctgaggggaagtgccctcgccagcgtcgcgccctggagcggggtctgcaggacgaggatggctacaggatgaagtttgcctgctactacccccgtgtggagtacggcttccaggttaaggttctccgagaagacagcagagctgctttccgcctctttgagaccaagatcacccaagtcctgcacttcaccaaggatgtcaaggccgctgctaatcagatgcgcaacttcctggttcgagcctcctgccgccttcgcttggaacctgggaaagaatatttgatcatgggtctggatggggccacctatgacctcgagggacacccccagtacctgctggactcgaatagctggatcgaggagatgccctctgaacgcctgtgccggagcacccgccagcgggcagcctgtgcccagctcaacgacttcctccaggagtatggcactcaggggtgccaggtgtgagggctgccctcccacctccgctgggaggaacctgaacctgggaaccatgaagctggaagcactgctgtgtccgctttcatgaacacagcctgggaccagggcatattaaaggcttttggcagcaaagtgtcagtgttggc

SEQ ID NO: 1958 - protein, 1744 aa, Homo sapiens
MRLLWGLIWASSFFTLSLQKPRLLLFSPSVVHLGVPLSVGVQLQDVPRGQVVKGSVFLRNPSRNNVPCSPKVDFTLSSERDFALLSLQVPLKDAKSCGLHQLLRGPEVQLVAHSPWLKDSLSRTTNIQGINLLFSSRRGHLFLQTDQPIYNPGQRVRYRVFALDQKMRPSTDTITVMVENSHGLRVRKKEVYMPSSIFQDDFVIPDISEPGTWKISARFSDGLESNSSTQFEVKKYVLPNFEVKITPGKPYILTVPGHLDEMQLDIQARYIYGKPVQGVAYVRFGLLDEDGKKTFFRGLESQTKLVNGQSHISLSKAEFQDALEKLNMGITDLQGLRLYVAAAIIEYPGGEMEEAELTSWYFVSSPFSLDLSKTKRHLVPGAPFLLQALVREMSGSPASGIPVKVSATVSSPGSVPEVQDIQQNTDGSGQVSIPIIIPQTISELQLSVSAGSPHPAIARLTVAAPPSGGPGFLSIERPDSRPPRVGDTLNLNLRAVGSGATFSHYYYMILSRGQIVFMNREPKRTLTSVSVFVDHHLAPSFYFVAFYYHGDHPVANSLRVDVQAGACEGKLELSVDGAKQYRNGESVKLHLETDSLALVALGALDTALYAAGSKSHKPLNMGKVFEAMNSYDLGCGPGGGDSALQVFQAAGLAFSDGDQWTLSRKRLSCPKEKTTRKKRNVNFQKAINEKLGQYASPTAKRCCQDGVTRLPMMRSCEQRAARVQQPDCREPFLSCCQFAESLRKKSRDKGQAGLQRALEILQEEDLIDEDDIPVRSFFPENWLWRVETVDRFQILTLWLPDSLTTWEIHGLSLSKTKGLCVATPVQLRVFREFHLHLRLPMSVRRFEQLELRPVLYNYLDKNLTVSVHVSPVEGLCLAGGGGLAQQVLVPAGSARPVAFSVVPTAAAAVSLKVVARGSFEFPVGDAVSKVLQIEKEGAIHREELVYELNPLDHRGRTLEIPGNSDPNMIPDGDFNSYVRVTASDPLDTLGSEGALSPGGVASLLRLPRGCGEQTMIYLAPTLAASRYLDKTEQWSTLPPETKDHAVDLIQKGYMRIQQFRKADGSYAAWLSRGSSTWLTAFVLKVLSLAQEQVGGSPEKLQETSNWLLSQQQADGSFQDLSPVIHRSMQGGLVGNDETVALTAFVTIALHHGLAVFQDEGAEPLKQRVEASISKASSFLGEKASAGLLGAHAAAITAYALTLTKAPADLRGVAHNNLMAMAQETGDNLYWGSVTGSQSNAVSPTPAPRNPSDPMPQAPALWIETTAYALLHLLLHEGKAEMADQAAAWLTRQGSFQGGFRSTQDTVIALDALSAYWIASHTTEERGLNVTLSSTGRNGFKSHALQLNNRQIRGLEEELQFSLGSKINVKVGGNSKGTLKVLRTYNVLDMKNTTCQDLQIEVTVKGHVEYTMEANEDYEDYEYDELPAKDDPDAPLQPVTPLQLFEGRRNRRRREAPKVVEEQESRVHYTVCIWRNGKVGLSGMAIADVTLLSGFHALRADLEKLTSLSDRYVSHFETEGPHVLLYFDSVPTSRECVGFEAVQEVPVGLVQPASATLYDYYNPERRCSVFYGAPSKSRLLATLCSAEVCQCAEGKCPRQRRALERGLQDEDGYRMKFACYYPRVEYGFQVKVLREDSRAAFRLFETKITQVLHFTKDVKAAANQMRNFLVRASCRLRLEPGKEYLIMGLDGATYDLEGHPQYLLDSNSWIEEMPSERLCRSTRQRAACAQLNDFLQEYGTQGCQV

SEQ ID NO: 1959 - DNA, 2477 bp, Homo sapiens
aggggaagggaatgtgaccaggtctaggtctggagtttcagcttggacactgagccaagcagacaagcaaagcaagccaggacacaccatcctgccccaggcccagcttctctcctgccttccaacgccatggggagcaatctcagcccccaactctgcctgatgccctttatcttgggcctcttgtctggaggtgtgaccaccactccatggtctttggcccagccccagggatcctgctctctggagggggtagagatcaaaggcggctccttccgacttctccaagagggccaggcactggagtacgtgtgtccttctggcttctacccgtaccctgtgcagacacgtacctgcagatctacggggtcctggagcaccctgaagactcaagaccaaaagactgtcaggaaggcagagtgcagagcaatccactgtccaagaccacacgacttcgagaacggggaatactggccccggtctccctactacaatgtgagtgatgagatctctttccactgctatgacggttacactctccggggctctgccaatcgcacctgccaagtgaatggccggtggagtgggcagacagcgatctgtgacaacggagcggggtactgctccaacccgggcatccccattggcacaaggaaggtgggcagccagtaccgccttgaagacagcgtcacctaccactgcagccgggggcttaccctgcgtggctcccagcggcgaacgtgtcaggaaggtggctcttggagcgggacggagccttcctgccaagactccttcatgtacgacacccctcaagaggtggccgaagctttcctgtcttccctgacagagaccatagaaggagtcgatgctgaggatgggcacggcccaggggaacaacagaagcggaagatcgtcctggacccttcaggctccatgaacatctacctggtgctagatggatcagacagcattggggccagcaacttcacaggagccaaaaagtgtctagtcaacttaattgagaaggtggcaagttatggtgtgaagccaagatatggtctagtgacatatgccacataccccaaaatttgggtcaaagtgtctgaagcagacagcagtaatgcagactgggtcacgaagcagctcaatgaaatcaattatgaagaccacaagttgaagtcagggactaacaccaagaaggccctccaggcagtgtacagcatgatgagctggccagatgacgtccctcctgaaggctggaaccgcacccgccatgtcatcatcctcatgactgatggattgcacaacatgggcggggacccaattactgtcattgatgagatccgggacttgctatacattggcaaggatcgcaaaaacccaagggaggattatctggatgtctatgtgtttggggtcgggcctttggtgaaccaagtgaacatcaatgctttggcttccaagaaagacaatgagcaacatgtgttcaaagtcaaggatatggaaaacctggaagatgttttctaccaaatgatcgatgaaagccagtctctgagtctctgtggcatggtttgggaacacaggaagggtaccgattaccacaagcaaccatggcaggccaagatctcagtcattcgcccttcaaagggacacgagagctgtatgggggctgtggtgtctgagtactttgtgctgacagcagcacattgtttcactgtggatgacaaggaacactcaatcaaggtcagcgtaggaggggagaagcgggacctggagatagaagtagtcctatttcaccccaactacaacattaatgggaaaaaagaagcaggaattcctgaattttatgactatgacgttgccctgatcaagctcaagaataagctgaaatatggccagactatcaggcccatttgtctcccctgcaccgagggaacaactcgagctttgaggcttcctccaactaccacttgccagcaacaaaaggaagagctgctccctgcacaggatatcaaagctctgtttgtgtctgaggaggagaaaaagctgactcggaaggaggtctacatcaagaatggggataagaaaggcagctgtgagagagatgctcaatatgccccaggctatgacaaagtcaaggacatctcagaggtggtcacccctcggttcctttgtactggaggagtgagtccctatgctgaccccaatacttgcagaggtgattctggcggccccttgatagttcacaagagaagtcgtttcattcaagttggtgtaatcagctggggagtagtggatgtctgcaaaaaccagaagcggcaaaagcaggtacctgctcacgcccgagactttcacatcaacctctttcaagtgctgccctggctgaaggagaaactccaagatgaggatttgggttttctataaggggtttcctgctggacaggggcgtgggattgaattaaaacagctgcgacaac

SEQ ID NO: 1960 - protein, 764 aa, Homo sapiens
MGSNLSPQLCLMPFILGLLSGGVTTTPWSLAQPQGSCSLEGVEIKGGSFRLLQEGQALEYVCPSGFYPYPVQTRTCRSTGSWSTLKTQDQKTVRKAECRAIHCPRPHDFENGEYWPRSPYYNVSDEISFHCYDGYTLRGSANRTCQVNGRWSGQTAICDNGAGYCSNPGIPIGTRKVGSQYRLEDSVTYHCSRGLTLRGSQRRTCQEGGSWSGTEPSCQDSFMYDTPQEVAEAFLSSLTETIEGVDAEDGHGPGEQQKRKIVLDPSGSMNIYLVLDGSDSIGASNFTGAKKCLVNLIEKVASYGVKPRYGLVTYATYPKIWVKVSEADSSNADWVTKQLNEINYEDHKLKSGTNTKKALQAVYSMMSWPDDVPPEGWNRTRHVIILMTDGLHNMGGDPITVIDEIRDLLYIGKDRKNPREDYLDVYVFGVGPLVNQVNINALASKKDNEQHVFKVKDMENLEDVFYQMIDESQSLSLCGMVWEHRKGTDYHKQPWQAKISVIRPSKGHESCMGAVVSEYFVLTAAHCFTVDDKEHSIKVSVGGEKRDLEIEVVLFHPNYNINGKKEAGIPEFYDYDVALIKLKNKLKYGQTIRPICLPCTEGTTRALRLPPTTTCQQQKEELLPAQDIKALFVSEEEKKLTRKEVYIKNGDKKGSCERDAQYAPGYDKVKDISEVVTPRFLCTGGVSPYADPNTCRGDSGGPLIVHKRSRFIQVGVISWGVVDVCKNQKRQKQVPAHARDFHINLFQVLPWLKEKLQDEDLGFL

SEQ ID NO: 1961 - DNA, 2460 bp, Homo sapiens
ggtcccaaggctttccagagcgaacctgtgcggctgcaggcaccggcgtgttgagtttccggcgttccgaaggactgagctcttgtcgcggatcccgtccgccgtttccagcccccagtctcagagcggagcccacagagcagggcaccggcatggccaaagccgcggcgatcggcatcgacctgggcaccacctactcctgcgtgggggtgttccaacacggcaaggtggagatcatcgccaacgaccagggcaaccgcaccacccccagctacgtggccttcacggacaccgagcggctcatcggggatgcggccaagaaccaggtggcgctgaacccgcagaacaccgtgtttgacgcgaagcggctgatcggccgcaagttcggcgacccggtggtgcagtcggacatgaagcactggcctttccaggtgatcaacgacggagacaagcccaaggtgcaggtgagctacaagggggagaccaaggcattctaccccgaggagatctcgtccatggtgctgaccaagatgaaggagatcgccgaggcgtacctgggctacccggtgaccaacgcggtgatcaccgtgccggcctacttcaacgactcgcagcgccaggccaccaaggatgcgggtgtgatcgcggggctcaacgtgctgcggatcatcaacgagcccacggccgccgccatcgcctacggcctggacagaacgggcaagggggagcgcaacgtgctcatctttgacctgggcgggggcaccttcgacgtgtccatcctgacgatcgacgacggcatcttcgaggtgaaggccacggccggggacacccacctgggtggggaggactttgacaacaggctggtgaaccacttcgtggaggagttcaagagaaaacacaagaaggacatcagccagaacaagcgagccgtgaggcggctgcgcaccgcctgcgagagggccaagaggaccctgtcgtccagcacccaggccagcctggagatcgactccctgtttgagggcatcgacttctacacgtccatcaccagggcgaggttcgaggagctgtgctccgacctgttccgaagcaccctggagcccgtggagaaggctctgcgcgacgccaagctggacaaggcccagattcacgacctggtcctggtcgggggctccacccgcatccccaaggtgcagaagctgctgcaggacttcttcaacgggcgcgacctgaacaagagcatcaaccccgacgaggctgtggcctacggggcggcggtgcaggcggccatcctgatgggggacaagtccgagaacgtgcaggacctgctgctgctggacgtggctcccctgtcgctggggctggagacggccggaggcgtgatgactgccctgatcaagcgcaactccaccatccccaccaagcagacgcagatcttcaccacctactccgacaaccaacccggggtgctgatccaggtgtacgagggcgagagggccatgacgaaagacaacaatctgttggggcgcttcgagctgagcggcatccctccggcccccaggggcgtgccccagatcgaggtgaccttcgacatcgatgccaacggcatcctgaacgtcacggccacggacaagagcaccggcaaggccagcaagatcaccatcaccaacgacaagggccgcctgagcaaggaggagatcgagcgcatggtgcaggaggcggagaagtacaaagcggaggacgaggtgcagcgcgagagggtgtcagccaagaacgccctggagtcctacgccttcaacatgaagagcgccgtggaggatgaggggctcaagggcaagatcagcgaggcggacaagaagaaggttctggacaagtgtcaagaggtcatctcgtggctggacgccaacaccttggccgagaaggacgagtttgagcacaagaggaaggagctggagcaggtgtgtaaccccatcatcagcggactgtaccagggtgccggtggtcccgggcctgggggcttcggggctcagggtcccaagggagggtctgggtcaggccctaccattgaggaggtggattaggggcctttgttctttagtatgtttgtctttgaggtggactgttgggactcaaggactttgctgctgttttcctatgtcatttctgcttcagctctttgctgcttcacttctttgtaaagttaagttgtaacctgatggtaattagctggcttcattatttttgtagtacaaccgatatgttcattagaattctttgcatttaatgttgatactgtaagggtgtttcgttccctttaaatgaatcaacactgccaccttctgtacgagtttgtttttttttttttttttttttttttttgcttggcgaaaacactacaaaggctgggaatgtatgtttttataatttgtttatttaaatatgaaaaataaaatgttaaacttt

SEQ ID NO: 1962 - protein, 641 aa, Homo sapiens
MAKAAAIGIDLGTTYSCVGVFQHGKVEIIANDQGNRTTPSYVAFTDTERLIGDAAKNQVALNPQNTVFDAKRLIGRKFGDPVVQSDMKHWPFQVINDGDKPKVQVSYKGETKAFYPEEISSMVLTKMKEIAEAYLGYPVTNAVITVPAYFNDSQRQATKDAGVIAGLNVLRIINEPTAAAIAYGLDRTGKGERNVLIFDLGGGTFDVSILTIDDGIFEVKATAGDTHLGGEDFDNRLVNHFVEEFKRKHKKDISQNKRAVRRLRTACERAKRTLSSSTQASLEIDSLFEGIDFYTSITRARFEELCSDLFRSTLEPVEKALRDAKLDKAQIHDLVLVGGSTRIPKVQKLLQDFFNGRDLNKSINPDEAVAYGAAVQAAILMGDKSENVQDLLLLDVAPLSLGLETAGGVMTALIKRNSTIPTKQTQIFTTYSDNQPGVLIQVYEGERAMTKDNNLLGRFELSGIPPAPRGVPQIEVTFDIDANGILNVTATDKSTGKASKITITNDKGRLSKEEIERMVQEAEKYKAEDEVQRERVSAKNALESYAFNMKSAVEDEGLKGKISEADKKKVLDKCQEVISWLDANTLAEKDEFEHKRKELEQVCNPIISGLYQGAGGPGPGGFGAQGPKGGSGSGPTIEEVD

SEQ ID NO: 1963 - DNA, 2387 bp, Homo sapiens
gctgctgcgacagtccactacctttttcgagagtgactcccgttgtcccaaggcttcccagagcgaacctgtgcggctgcaggcaccggcgcgtcgagtttccggcgtccggaaggaccgagctcttctcgcggatccagtgttccgtttccagcccccaatctcagagccgagccgacagagagcagggaaccggcatggccaaagccgcggcgatcggcatcgacctgggcaccacctactcctgcgtgggggtgttccaacacggcaaggtggagatcatcgccaacgaccagggcaaccgcaccacccccagctacgtggccttcacggacaccgagcggctcatcggggatgcggccaagaaccaggtggcgctgaacccgcagaacaccgtgtttgacgcgaagcggctgatcggccgcaagttcggcgacccggtggtgcagtcggacatgaagcactggcctttccaggtgatcaacgacggagacaagcccaaggtgcaggtgagctacaagggggacaccaaggcattctaccccgaggagatctcgtccatggtgctgaccaagatgaaggagatcgccgaggcgtacctgggctacccggtgaccaacgcggtgatcaccgtgccggcctacttcaacgactcgcagcgccaggccaccaaggatgcgggtgtgatcgcggggctcaacgtgctgcggatcatcaacgagcccacggccgccgccatcgcctacggcctggacagaacgggcaagggggagcgcaacgtgctcatctttgacctgggcgggggcaccttcgacgtgtccatcctgacgatcgacgacggcatcttcgaggtgaaggccacggccggggacacccacctgggtggggaggactttgacaacaggctggtgaaccacttcgtggaggagttcaagagaaaacacaagaaggacatcagccagaacaagcgagccgtgaggcggctgcgcaccgcctgcgagagggccaagaggaccctgtcgtccagcacccaggccagcctggagatcgactccctgtttgagggcatcgacttctacacgtccatcaccagggcgaggttcgaggagctgtgctccgacctgttccgaagcaccctggagcccgtggagaaggctctgcgcgacgccaagctggacaaggcccagattcacgacctggtcctggtcgggggctccacccgcatccccaaggtgcagaagctgctgcaggacttcttcaacgggcgcgacctgaacaagagcatcaaccccgacgaggctgtggcctacggggcggcggtgcaggcggccatcctgatgggggacaagtccgagaacgtgcaggacctgctgctgctggacgtggctcccctgtcgctggggctggagacggccggaggcgtgatgactgccctgatcaagcgcaactccaccatccccaccaagcagacgcagatcttcaccacctactccgacaaccaacccggggtgctgatccaggtgtacgagggcgagagggccatgacgaaagacaacaatctgttggggcgcttcgagctgagcggcatccctccggcccccaggggcgtgccccagatcgaggtgaccttcgacatcgatgccaacggcatcctgaacgtcacggccacggacaagagcaccggcaaggccaacaagatcaccatcaccaacgacaagggccgcctgagcaaggaggagatcgagcgcatggtgcaggaggcggagaagtacaaagcggaggacgaggtgcagcgcgagagggtgtcagccaagaacgccctggagtcctacgccttcaacatgaagagcgccgtggaggatgaggggctcaagggcaagatcagcgaggccgacaagaagaaggtgctggacaagtgtcaagaggtcatctcgtggctggacgccaacaccttggccgagaaggacgagtttgagcacaagaggaaggagctggagcaggtgtgtaaccccatcatcagcggactgtaccagggtgccggtggtcccgggcctgggggcttcggggctcagggtcccaagggagggtctgggtcaggccccaccattgaggaggtagattaggggcctttccaagattgctgtttttgttttggagcttcaagactttgcatttcctagtatttctgtttgtcagttctcaatttcctgtgtttgcaatgttgaaattttttggtgaagtactgaacttgctttttttccggtttctacatgcagagatgaatttatactgccatcttacgactatttcttctttttaatacacttaactcaggccattttttaagttggttacttcaaagtaaataaactttaaaattcaagtga

SEQ ID NO: 1964 - protein, 641 aa, Homo sapiens
MAKAAAIGIDLGTTYSCVGVFQHGKVEIIANDQGNRTTPSYVAFTDTERLIGDAAKNQVALNPQNTVFDAKRLIGRKFGDPVVQSDMKHWPFQVINDGDKPKVQVSYKGDTKAFYPEEISSMVLTKMKEIAEAYLGYPVTNAVITVPAYFNDSQRQATKDAGVIAGLNVLRIINEPTAAAIAYGLDRTGKGERNVLIFDLGGGTFDVSILTIDDGIFEVKATAGDTHLGGEDFDNRLVNHFVEEFKRKHKKDISQNKRAVRRLRTACERAKRTLSSSTQASLEIDSLFEGIDFYTSITRARFEELCSDLFRSTLEPVEKALRDAKLDKAQIHDLVLVGGSTRIPKVQKLLQDFFNGRDLNKSINPDEAVAYGAAVQAAILMGDKSENVQDLLLLDVAPLSLGLETAGGVMTALIKRNSTIPTKQTQIFTTYSDNQPGVLIQVYEGERAMTKDNNLLGRFELSGIPPAPRGVPQIEVTFDIDANGILNVTATDKSTGKANKITITNDKGRLSKEEIERMVQEAEKYKAEDEVQRERVSAKNALESYAFNMKSAVEDEGLKGKISEADKKKVLDKCQEVISWLDANTLAEKDEFEHKRKELEQVCNPIISGLYQGAGGPGPGGFGAQGPKGGSGSGPTIEEVD

SEQ ID NO: 1965 - DNA, 864 bp, Homo sapiens
ggcttcctcctcccctctactctacccagcttgcgctccccagccgcaagtcggccgcgctttgcccgtcagcgcttggagctttctgcgtcgcttcccgctgcgcctgcgcggtcccgcctcgccccacgcgcgggctcgcgcttcggtttccccagacctgctcgcagcaccctgctgtcttcccggtccggcccgctgcccgcggcgccagcaccatgctcttctattcttttttcaagtcccttgtgggcaaggatgtggtcgtggaactaaagaatgacctgagcatctgtggaaccctccattctgtggatcagtatctcaacatcaaactaactgacatcagtgtcacagaccctgagaaataccctcacatgttatcagtgaagaactgcttcattcggggctcagtggtccgatacgtgcagctgccagcagatgaggtcgacacacagttgctacaggatgcggcaaggaaggaagccctgcagcagaaacagtgatggctcctcctcctcttcccctccctctttcattggtgacccataaccccaagtcccagcccagaacccctaacccccaatacttgaaggggttttgtttttttactaatgatggttttgtgggttttttttaagggatgagtggatgagaggagtaatagggaacagctatcctctcttgagaaggggaggataagtaggctgggaaacttcaaagccttcccagtccccagcacctgcctttctcactacttctctggagatggtaggagagtttcctaggtctttccagggcagcatgtgattcatttggggatggaaggaatctgtcccgcatcgggaataaaatttatgatgc

SEQ ID NO: 1966 - protein, 95 aa, Homo sapiens
MLFYSFFKSLVGKDVVVELKNDLSICGTLHSVDQYLNIKLTDISVTDPEKYPHMLSVKNCFIRGSVVRYVQLPADEVDTQLLQDAARKEALQQKQ

SEQ ID NO: 1967 - DNA, 4092 bp, Homo sapiens
gtcacaaaggggggaacacgtgggcgccggctgccggggcggcgatcttagggaactagggtcacctggagagccgcccaccgtctctgcccgctcgactcctccgcccgggccgctcggccggtccagccgcggccggcgcctggctgtgaggtggattcccggcccagtctgaccatctccctccagtttttccacttcgttcggaccttctcataactatgtccaccctctacgtctcccctcacccagatgccttccccagcctccgagccctcatagccgctcgctatggggaggctggggagggtcccggatggggaggagcccacccccgcatctgtctccagccacccccgactagcaggactccctttcccccaccccgcctgccggccctggagcaggggcccggtgggctctgggtgtggggggccacggctgtggcccagctgctgtggccagcaggcctggggggcccagggggcagccgggcggctgtccttgtccaacagtgggtcagttacgccgacacggagttaataccagctgcctgtggagcaacgctgccggccctgggactccgaagctcggcccaggacccccaggctgtgctgggggccctgggcagggccctgagccccttggaggagtggcttcggctgcacacctacttggccggggaggcccccactctggctgacctggcggctgtcacagccttgctgctgcctttccgatacgtcctagacccacctgcccgccggatctggaataatgtgactcgctggtttgtcacgtgtgtccggcagccagaattccgagccgtgctaggagaagtggttctatactcaggagccaggcctctctctcatcagccaggccccgaggctcctgccctcccaaagacagctgctcagctcaagaaagaggcaaagaaacgggagaagctagagaaattccaacagaagcagaagatccaacagcagcagccacctccaggggagaagaaaccaaaaccagagaagagggagaaacgggatcctggggtcattacctatgacctcccaaccccacccggggaaaagaaagatgtcagtggccccatgcccgactcctacagccctcggtatgtggaggctgcctggtacccttggtgggagcagcagggcttcttcaagccagagtatgggcgtcctaatgtgtcagcagcaaatccccgaggtgtcttcatgatgtgcatcccaccccccaatgtgacaggctccctgcacctgggccatgcactcaccaacgccatccaggactccctgactcgatggcaccgcatgcgtggggagaccaccctgtggaaccctggctgtgaccatgcaggtattgccacccaggtggtggtggagaagaagctatggcgtgagcagggactgagccggcaccagctgggccgcgaggcctttctacaggaagtctggaagtggaaggaggagaaaggtgaccggatttaccaccagttgaagaagcttggcagctccttggactgggatcgagcctgtttcaccatggaccctaaactctcagcagctgtgacagaggcctttgtccggcttcacgaggaaggcatcatctatcgcagtacccgccttgttaactggtcctgcaccctcaactccgccatctctgacattgaggtggataagaaggagctgacaggtcgcaccctgctctccgtgcctggctacaaggagaaggtggagttcggggtcctcgtgtcctttgcctataaggtccaaggctcagatagcgacgaggaggtggtggtggcaacaactcggatcgagacaatgctgggagatgtggctgtagctgtgcaccccaaagataccagataccagcacctgaaggggaagaacgtgatccacccattcctgtctcggagccttcccattgtcttcgatgaatttgtggacatggactttggcacaggtgctgtgaagatcacccccgcacatgaccaaaatgactatgaagttgggcagcggcacgggctggaggccatcagcatcatggactcccggggggccctcatcaatgtgcctccgcctttcctgggcctgcccaggtttgaggccaggaaagcggtgctggtggcgctgaaggagcggggactgttccgtggcattgaggacaaccccatggtggtgccactttgcaaccggtcgaaggacgtggtagagcctctgctgcggccgcagtggtacgttcgctgcggggagatggcccaggctgccagcgccgctgtgactcggggtgacctccgcatcctgcctgaggcccatcagcgcacatggcatgcctggatggacaacatccgggagtggtgcatttccaggcagctgtggtggggccatcgcatcccagcctactttgtcactgtcagtgacccagcggtgccccctggggaggaccctgatgggcggtactgggtgagtggacgcaatgaggcggaggcccgggagaaggcagccaaggagttcggagtgtcccctgacaagatcagtctccagcaagatgaggatgtattggatacctggttctcctctggcctcttccccttatccattttgggctggcccaaccagtcagaagacctgagtgtgttctaccccgggacactgctggagaccggtcatgacatcctcttcttctgggtggcccggatggtcatgctgggcctgaagctcacgggcaggctgccctttagagaggtctacctccatgccatcgtgcgagatgctcacggccggaagatgagcaagtctctaggcaatgtcatcgatcccctggatgtcatctatggaatctccctgcagggcctccacaaccagctgctgaacagcaacctggatcccagcgaggtggagaaggccaaagaagggcagaaagctgacttcccagcggggattcctgaatgtggcaccgatgctctccggtttggattatgtgcctacatgtcccagggtcgtgacatcaacctggatgtgaaccggatactgggttaccgccacttctgcaacaagctctggaatgccaccaagtttgcccttcgtggccttgggaagggttttgtgccctcacccacctcccagcccggaggccatgagagcctggtggaccgctggatccgcagccgcctgacagaggctgtgaggctcagcaatcaaggcttccaggcctacgacttcccggccgtcaccactgcccagtacagcttctggctctatgagctctgtgatgtctacttggagtgcctgaaacctgtactgaatggggtggaccaggtggcagctgagtgtgcccgccagaccctgtacacttgcctggacgttggcctgcggctgctctcacccttcatgcccttcgtgacggaggagctgttccagaggctgccccggaggatgccgcaagctccccctagcctctgtgttaccccctacccggagccctcagagtgctcctggaaggaccccgaggcagaagccgcccttgagctggcgctaagcatcacgcgagccgtgcgctccctgcgggccgactacaacctcacccggatccggcctgactgtttcctggaagtggcggatgaggccacgggcgccctggcatcggcggtgtcgggctacgtgcaggccctggccagcgcaggtgtggtggctgttctggccctgggggctcccgccccccagggttgcgctgtggctctggcttctgatcgctgctccatccacctgcagcttcaggggctggtggaccctgcacgggagctgggcaagctgcaagccaagcgagttgaggcccagcggcaggcccagcgtctgcgggaacgccgtgctgcctcgggctatcctgtcaaggtgccgctcgaagtccaggaggcagatgaagccaagctccaacagacagaagcagagctcaggaaggtggatgaggccatcgccctattccagaagatgctgtgatccaccacccagcttcacccctcacccccagcggctcaccatggggatggcagcaataaaatattttcccacaaaa

SEQ ID NO: 1968 - protein, 1264 aa, Homo sapiens
MSTLYVSPHPDAFPSLRALIAARYGEAGEGPGWGGAHPRICLQPPPTSRTPFPPPRLPALEQGPGGLWVWGATAVAQLLWPAGLGGPGGSRAAVLVQQWVSYADTELIPAACGATLPALGLRSSAQDPQAVLGALGRALSPLEEWLRLHTYLAGEAPTLADLAAVTALLLPFRYVLDPPARRIWNNVTRWFVTCVRQPEFRAVLGEVVLYSGARPLSHQPGPEAPALPKTAAQLKKEAKKREKLEKFQQKQKIQQQQPPPGEKKPKPEKREKRDPGVITYDLPTPPGEKKDVSGPMPDSYSPRYVEAAWYPWWEQQGFFKPEYGRPNVSAANPRGVFMMCIPPPNVTGSLHLGHALTNAIQDSLTRWHRMRGETTLWNPGCDHAGIATQVVVEKKLWREQGLSRHQLGREAFLQEVWKWKEEKGDRIYHQLKKLGSSLDWDRACFTMDPKLSAAVTEAFVRLHEEGIIYRSTRLVNWSCTLNSAISDIEVDKKELTGRTLLSVPGYKEKVEFGVLVSFAYKVQGSDSDEEVVVATTRIETMLGDVAVAVHPKDTRYQHLKGKNVIHPFLSRSLPIVFDEFVDMDFGTGAVKITPAHDQNDYEVGQRHGLEAISIMDSRGALINVPPPFLGLPRFEARKAVLVALKERGLFRGIEDNPMVVPLCNRSKDVVEPLLRPQWYVRCGEMAQAASAAVTRGDLRILPEAHQRTWHAWMDNIREWCISRQLWWGHRIPAYFVTVSDPAVPPGEDPDGRYWVSGRNEAEAREKAAKEFGVSPDKISLQQDEDVLDTWFSSGLFPLSILGWPNQSEDLSVFYPGTLLETGHDILFFWVARMVMLGLKLTGRLPFREVYLHAIVRDAHGRKMSKSLGNVIDPLDVIYGISLQGLHNQLLNSNLDPSEVEKAKEGQKADFPAGIPECGTDALRFGLCAYMSQGRDINLDVNRILGYRHFCNKLWNATKFALRGLGKGFVPSPTSQPGGHESLVDRWIRSRLTEAVRLSNQGFQAYDFPAVTTAQYSFWLYELCDVYLECLKPVLNGVDQVAAECARQTLYTCLDVGLRLLSPFMPFVTEELFQRLPRRMPQAPPSLCVTPYPEPSECSWKDPEAEAALELALSITRAVRSLRADYNLTRIRPDCFLEVADEATGALASAVSGYVQALASAGVVAVLALGAPAPQGCAVALASDRCSIHLQLQGLVDPARELGKLQAKRVEAQRQAQRLRERRAASGYPVKVPLEVQEADEAKLQQTEAELRKVDEAIALFQKML

SEQ ID NO: 1969 - DNA, 1225 bp, Homo sapiens
gcggctctctgatccagcccgggagaggaccgagctggaggagctgggtgtggggtgcgttgggctggtggggaggcctagtttgggtgcaagtaggtctgattgagcttgtgttgtgctgaagggacagccctgggtctaggggagagagtccctgagtgtgagacccgccttccccggtcccagcccctcccagttcccccagggacggccacttcctggtccccgacgcaaccatggctgaagaacaaccgcaggtcgaattgttcgtgaaggctggcagtgatggggccaagattgggaactgcccattctcccagagactgttcatggtactgtggctcaagggagtcaccttcaatgttaccaccgttgacaccaaaaggcggaccgagacagtgcagaagctgtgcccaggggggcagctcccattcctgctgtatggcactgaagtgcacacagacaccaacaagattgaggaatttctggaggcagtgctgtgccctcccaggtaccccaagctggcagctctgaaccctgagtccaacacagctgggctggacatatttgccaaattttctgcctacatcaagaattcaaacccagcactcaatgacaatctggagaagggactcctgaaagccctgaaggttttagacaattacttaacatcccccctcccagaagaagtggatgaaaccagtgctgaagatgaaggtgtctctcagaggaagtttttggatggcaacgagctcaccctggctgactgcaacctgttgccaaagttacacatagtacaggtggtgtgtaagaagtaccggggattcaccatccccgaggccttccggggagtgcatcggtacttgagcaatgcctacgcccgggaagaattcgcttccacctgtccagatgatgaggagatcgagctcgcctatgagcaagtggcaaaggccctcaaataagcccctcctgggactccctcaaccccctccattttctccacaaaggccctggtggtttccacattgctacccaatggacacactccaaaatggccagtgggcagggaatcctggagcacttgttccgggatggtgtggtggaagaggggatgagggaaagaaatggggggcctgggtcagatttttattgtggggtggggtgagtaggacaacatatttcagtaataaaatacagaataaaaatcaagtgtttttaaaaaaaa

SEQ ID NO: 1970 - protein, 241 aa, Homo sapiens
MAEEQPQVELFVKAGSDGAKIGNCPFSQRLFMVLWLKGVTFNVTTVDTKRRTETVQKLCPGGQLPFLLYGTEVHTDTNKIEEFLEAVLCPPRYPKLAALNPESNTAGLDIFAKFSAYIKNSNPALNDNLEKGLLKALKVLDNYLTSPLPEEVDETSAEDEGVSQRKFLDGNELTLADCNLLPKLHIVQVVCKKYRGFTIPEAFRGVHRYLSNAYAREEFASTCPDDEEIELAYEQVAKALK

SEQ ID NO: 1971 - DNA, 648 bp, Homo sapiens
atgagcagctcagaggaggtgtcctggatttcctggttctgtgggctccgtggcaatgaattcttctgtgaagtggatgaagactacatccaggacaaatttaatcttactggactcaatgagcaggtccctcactaccgacaagctctagacatgatcttggacctggagcctgatgaagaactggaagacaaccccaaccagagtgacctgattgagcaggcagccgagatgctttatggattgatccacgcccgctacatccttaccaaccgtggcatcgcccagatgttggaaaagtaccagcaaggagactttggttactgtcctcgtgtgtactgtgagaaccagccaatgcttcccattggcctttcagacatcccaggtgaagccatggtgaagctctactgccccaagtgcatggatgtgtacacacccaagtcatcaagacaccatcacacggatggcgcctacttcggcactggtttccctcacatgctcttcatggtgcatcccgagtaccggcccaagagacctgccaaccagtttgtgcccaggctctacggtttcaagatccatgcgatggcctaccagctgcagctccaagccgccagcaacttcaagagcccagtcaagacgattcgctga

SEQ ID NO: 1972 - protein, 215 aa, Homo sapiens
MSSSEEVSWISWFCGLRGNEFFCEVDEDYIQDKFNLTGLNEQVPHYRQALDMILDLEPDEELEDNPNQSDLIEQAAEMLYGLIHARYILTNRGIAQMLEKYQQGDFGYCPRVYCENQPMLPIGLSDIPGEAMVKLYCPKCMDVYTPKSSRHHHTDGAYFGTGFPHMLFMVHPEYRPKRPANQFVPRLYGFKIHAMAYQLQLQAASNFKSPVKTIR

SEQ ID NO: 1973 - DNA, 3773 bp, Homo sapiens
tagtgcgacgcacgcaggcgtagtacggtcccccgggcgacagcggtggcggctcctcggggtgctcggctccctcccacctaggccggccccggcccgactcgccctcagaaactcactgtttggggctgcggactttctcgtcgtgccccacaaaagtaaagcttggggacctggggggagccggaagtatcgcttcgagatccccaaatactatcggggaaacggaagtggccgtcggtggcaggtttgggggagaccggaagtgacgagacctgtcggccatggagcctaatgatagtaccagtaccgctgtggaggagcctgacagcttggaggtgttggtgaagaccttggactctcaaactcgtacctttattgtgggggcccagatgaatgtaaaagagtttaaggagcacattgctgcctctgtcagcatcccatctgaaaaacaacggctcatttaccagggacgagttctgcaagatgataagaagcttcaggaatacaatgttgggggaaaggttatccacctggtggaacgggctcctcctcagactcacctcccttctggggcatcttctgggacggggtctgcctcagccactcatggtgggggatccccccctggtactcgggggcctggggcctctgttcatgaccggaatgccaacagctatgtcatggttggaaccttcaatcttcctagtgacggctctgctgtggatgttcacatcaacatggaacaggccccgattcagagtgagccccgggtacggctggtgatggctcagcacatgatcagggatatacagaccttactatcccggatggagactctcccctaccttcagtgtcgaggagggccccaaccgcagcacagtcagccgcccccgcagccaccggctgtgaccccggagccagtagccttgagctctcaaacatcagaaccagttgaaagtgaagcacctccccgggagcccatggaggcagaagaagtggaggagcgtgccccagcccagaacccggagctcactcctggcccagccccagcgggcccaacacctgccccggaaacaaatgcacccaaccatccttcccctgcggagtatgtcgaggtgctccaggagctacagcggctggagagtcgcctccagcccttcttgcagcgctactacgaggttctgggtgctgctgccaccacggactacaataacaatcacgagggccgggaggaggatcagcggttgatcaacttggtaggggagagcctgcgactgctgggcaacacctttgttgcactgtctgacctgcgctgcaatctggcctgcacgcccccacgacacctgcatgtggtccggcctatgtctcactacaccacccccatggtgctccagcaggcagccattcccatacagatcaatgtgggaaccactgtgaccatgacaggaaatgggactcggccccccccaactcccaatgcagaggcacctccccctggtcctgggcaggcctcatccgtggctccgtcttctaccaatgtcgagtcctcagctgagggggctcccccgccaggtccagctcccccgccagccaccagccacccgagggtcatccggatttcccaccagagtgtggaacccgtggtcatgatgcacatgaacattcaagattctggcacacagcctggtggtgttccgagtgctcccactggccccctgggaccccctggtcatggccaaaccctgggacagcaggtgccaggcttcccaacagctccaacccgggtggtgattgcccggcccactcctccacaggctcggccttcccatcctggagggcccccagtctctgggacactgcagggcgccggtctgggtaccaatgcctcgttggcccagatggtgagcggccttgtggggcagcttcttatgcagccagtccttgtggctcaggggaccccaggtatggctccaccgccagcccctgccactgcttctgccagtgctggcaccaccaacacagctaccacagctggccccgctcctggggggcctgcccagcctccacccacccctcaaccctccatggctgatcttcagttctctcagcttctggggaacctgctagggcctgcagggccaggggctggagggcctggtgtggcttctcccaccatcactgtggcgatgcctggtgtccctgcctttctccaaggcatgactgacttcttgcaggcaacacagacagcccctccaccacccccacctcctccacccccaccacctgccccagagcagcagaccatgcccccaccaggctccccttctggtggcgcagggagtcctggaggcctgggtcttgagagcctgtcaccggagttttttacctcagtggtgcagggtgtgctcagctccctgctgggctccctgggggctcgggctggcagcagtgaaagtattgctgccttcatacaacgcctcagtggatccagcaacatctttgagcctggagctgatggggcccttggattctttggggccttgctttctcttctgtgccagaacttctctatggtggacgtagtgatgcttctccatgggcatttccagccactacaacggctccagccccagctgcgatccttcttccaccagcactacctgggtggtcaggagcccacacccagtaacatccggatggcaacccacacattgatcacggggctagaagagtatgtgcgggagagtttttccttggtgcaggttcagccaggtgtggacatcatccggacaaacctggaatttctccaagagcagtttaatagcattgctgcgcatgtgctgcattgcacagatagtggatttggggcccggttgctggagttgtgtaaccaaggcctgtttgaatgcctggccctaaacctgcactgcttggggggacagcagatggagcttgctgctgttatcaatggccgaattcgtcgtatgtctcgtggggtgaatccctccttggtgagctggctgaccactatgatgggactgaggcttcaggtggtactggagcacatgcctgtaggccctgatgccattctcagatacgttcgcagggttggtgatcccccccagccacttcctgaggagccaatggaagttcagggagcagaaagagcttcccctgagcctcagcgggagaatgcttccccagcccctggaacaacagcagaagaggccatgtcccgaggtccacctcctgctcctgaggggggctcccgggatgaacaggatggagcttcagctgagacagaaccttgggcagctgcagtccccccagaatgggtccctattatccagcaggacattcagagccagcggaaggtgaaaccgcagccccctctgagtgatgcctacctcagtggtatgcctgccaagagacgcaagacgatgcagggtgagggcccccagctgcttctctcagaggctgtgagccgggcagctaaggcagccggagctcggcccctgacgagccccgagagcctgagccgggacctggaggcaccagaggttcaggagagctacaggcagcagctccggtctgatatacaaaaacgactgcaggaagaccccaactacagtccccagcgcttccccaatgcccagcgggcctttgctgatgatccttagctctttgctctatggcccttcctcatcaggggaccgtttcccccctcttccttcacagtatttaagaaataaaagtcggatttttctggc

SEQ ID NO: 1974 - protein, 1132 aa, Homo sapiens
MEPNDSTSTAVEEPDSLEVLVKTLDSQTRTFIVGAQMNVKEFKEHIAASVSIPSEKQRLIYQGRVLQDDKKLQEYNVGGKVIHLVERAPPQTHLPSGASSGTGSASATHGGGSPPGTRGPGASVHDRNANSYVMVGTFNLPSDGSAVDVHINMEQAPIQSEPRVRLVMAQHMIRDIQTLLSRMETLPYLQCRGGPQPQHSQPPPQPPAVTPEPVALSSQTSEPVESEAPPREPMEAEEVEERAPAQNPELTPGPAPAGPTPAPETNAPNHPSPAEYVEVLQELQRLESRLQPFLQRYYEVLGAAATTDYNNNHEGREEDQRLINLVGESLRLLGNTFVALSDLRCNLACTPPRHLHVVRPMSHYTTPMVLQQAAIPIQINVGTTVTMTGNGTRPPPTPNAEAPPPGPGQASSVAPSSTNVESSAEGAPPPGPAPPPATSHPRVIRISHQSVEPVVMMHMNIQDSGTQPGGVPSAPTGPLGPPGHGQTLGQQVPGFPTAPTRVVIARPTPPQARPSHPGGPPVSGTLQGAGLGTNASLAQMVSGLVGQLLMQPVLVAQGTPGMAPPPAPATASASAGTTNTATTAGPAPGGPAQPPPTPQPSMADLQFSQLLGNLLGPAGPGAGGPGVASPTITVAMPGVPAFLQGMTDFLQATQTAPPPPPPPPPPPPAPEQQTMPPPGSPSGGAGSPGGLGLESLSPEFFTSVVQGVLSSLLGSLGARAGSSESIAAFIQRLSGSSNIFEPGADGALGFFGALLSLLCQNFSMVDVVMLLHGHFQPLQRLQPQLRSFFHQHYLGGQEPTPSNIRMATHTLITGLEEYVRESFSLVQVQPGVDIIRTNLEFLQEQFNSIAAHVLHCTDSGFGARLLELCNQGLFECLALNLHCLGGQQMELAAVINGRIRRMSRGVNPSLVSWLTTMMGLRLQVVLEHMPVGPDAILRYVRRVGDPPQPLPEEPMEVQGAERASPEPQRENASPAPGTTAEEAMSRGPPPAPEGGSRDEQDGASAETEPWAAAVPPEWVPIIQQDIQSQRKVKPQPPLSDAYLSGMPAKRRKTMQGEGPQLLLSEAVSRAAKAAGARPLTSPESLSRDLEAPEVQESYRQQLRSDIQKRLQEDPNYSPQRFPNAQRAFADDP

SEQ ID NO: 1975 - DNA, 3755 bp, Homo sapiens
tagtgcgacgcacgcaggcgtagtacggtcccccgggcgacagcggtggcggctcctcggggtgctcggctccctcccacctaggccggccccggcccgactcgccctcagaaactcactgtttggggctgcggactttctcgtcgtgccccacaaaagtaaagcttggggacctggggggagccggaagtatcgcttcgagatccccaaatactatcggggaaacggaagtggccgtcggtggcaggtttgggggagaccggaagtgacgagacctgtcggccatggagcctaatgatagtaccagtaccgctgtggaggagcctgacagcttggaggtgttggtgaagaccttggactctcaaactcgtacctttattgtgggggcccagatgaatgtaaaagagtttaaggagcacattgctgcctctgtcagcatcccatctgaaaaacaacggctcatttaccagggacgagttctgcaagatgataagaagcttcaggaatacaatgttgggggaaaggttatccacctggtggaacgggctcctcctcagactcacctcccttctggggcatcttctgggacggggtctgcctcagccactcatggtgggggatccccccctggtactcgggggcctggggcctctgttcatgaccggaatgccaacagctatgtcatggttggaaccttcaatcttcctagtgacggctctgctgtggatgttcacatcaacatggaacaggccccgattcagagtgagccccgggtacggctggtgatggctcagcacatgatcagggatatacagaccttactatcccggatggagtgtcgaggagggccccaaccgcagcacagtcagccgcccccgcagccaccggctgtgaccccggagccagtagccttgagctctcaaacatcagaaccagttgaaagtgaagcacctccccgggagcccatggaggcagaagaagtggaggagcgtgccccagcccagaacccggagctcactcctggcccagccccagcgggcccaacacctgccccggaaacaaatgcacccaaccatccttcccctgcggagtatgtcgaggtgctccaggagctacagcggctggagagtcgcctccagcccttcttgcagcgctactacgaggttctgggtgctgctgccaccacggactacaataacaatcacgagggccgggaggaggatcagcggttgatcaacttggtaggggagagcctgcgactgctgggcaacacctttgttgcactgtctgacctgcgctgcaatctggcctgcacgcccccacgacacctgcatgtggtccggcctatgtctcactacaccacccccatggtgctccagcaggcagccattcccatacagatcaatgtgggaaccactgtgaccatgacaggaaatgggactcggccccccccaactcccaatgcagaggcacctccccctggtcctgggcaggcctcatccgtggctccgtcttctaccaatgtcgagtcctcagctgagggggctcccccgccaggtccagctcccccgccagccaccagccacccgagggtcatccggatttcccaccagagtgtggaacccgtggtcatgatgcacatgaacattcaagattctggcacacagcctggtggtgttccgagtgctcccactggccccctgggaccccctggtcatggccaaaccctgggacagcaggtgccaggcttcccaacagctccaacccgggtggtgattgcccggcccactcctccacaggctcggccttcccatcctggagggcccccagtctctgggacactgcagggcgccggtctgggtaccaatgcctcgttggcccagatggtgagcggccttgtggggcagcttcttatgcagccagtccttgtggctcaggggaccccaggtatggctccaccgccagcccctgccactgcttctgccagtgctggcaccaccaacacagctaccacagctggccccgctcctggggggcctgcccagcctccacccacccctcaaccctccatggctgatcttcagttctctcagcttctggggaacctgctagggcctgcagggccaggggctggagggtctggtgtggcttctcccaccatcactgtggcgatgcctggtgtccctgcctttctccaaggcatgactgacttcttgcaggcaacacagacagcccctccaccacccccacctcctccacccccaccacctgccccagagcagcagaccatgcccccaccaggctccccttctggtggcgcagggagtcctggaggcctgggtcttgagagcctgtcaccggagttttttacctcagtggtgcagggtgtgctcagctccctgctgggctccctgggggctcgggctggcagcagtgaaagtattgctgccttcatacaacgcctcagtggatccagcaacatctttgagcctggagctgatggggcccttggattctttggggccttgctttctcttctgtgccagaacttctctatggtggacgtagtgatgcttctccatgggcatttccagccactacaacggctccagccccagctgcgatccttcttccaccagcactacctgggtggtcaggagcccacacccagtaacatccggatggcaacccacacattgatcacggggctagaagagtatgtgcgggagagtttttccttggtgcaggttcagccaggtgtggacatcatccggacaaacctggaatttctccaagagcagtttaatagcattgctgcgcatgtgctgcattgcacagatagtggatttggggcccggttgctggagttgtgtaaccaaggcctgtttgaatgcctggccctaaacctgcactgcttggggggacagcagatggagcttgctgctgttatcaatggccgaattcgtcgtatgtctcgtggggtgaatccctccttggtgagctggctgaccactatgatgggactgaggcttcaggtggtactggagcacatgcctgtaggccctgatgccattctcagatacgttcgcagggttggtgatcccccccagccacttcctgaggagccaatggaagttcagggagcagaaagagcttcccctgagcctcagcgggagaatgcttccccagcccctggaacaacagcagaagaggccatgtcccgaggtccacctcctgctcctgaggggggctcccgggatgaacaggatggagcttcagctgagacagaaccttgggcagctgcagtccccccagaatgggtccctattatccagcaggacattcagagccagcggaaggtgaaaccgcagccccctctgagtgatgcctacctcagtggtatgcctgccaagagacgcaagacgatgcagggtgagggcccccagctgcttctctcagaggctgtgagccgggcagctaaggcagccggagctcggcccctgacgagccccgagagcctgagccgggacctggaggcaccagaggttcaggagagctacaggcagcagctccggtctgatatacaaaaacgactgcaggaagaccccaactacagtccccagcgcttccccaatgcccagcgggcctttgctgatgatccttagctctttgctctatggcccttcctcatcaggggaccgtttcccccctcttccttcacagtatttaagaaataaaagtcggatttttctggc

SEQ ID NO: 1976 - protein, 1126 aa, Homo sapiens
MEPNDSTSTAVEEPDSLEVLVKTLDSQTRTFIVGAQMNVKEFKEHIAASVSIPSEKQRLIYQGRVLQDDKKLQEYNVGGKVIHLVERAPPQTHLPSGASSGTGSASATHGGGSPPGTRGPGASVHDRNANSYVMVGTFNLPSDGSAVDVHINMEQAPIQSEPRVRLVMAQHMIRDIQTLLSRMECRGGPQPQHSQPPPQPPAVTPEPVALSSQTSEPVESEAPPREPMEAEEVEERAPAQNPELTPGPAPAGPTPAPETNAPNHPSPAEYVEVLQELQRLESRLQPFLQRYYEVLGAAATTDYNNNHEGREEDQRLINLVGESLRLLGNTFVALSDLRCNLACTPPRHLHVVRPMSHYTTPMVLQQAAIPIQINVGTTVTMTGNGTRPPPTPNAEAPPPGPGQASSVAPSSTNVESSAEGAPPPGPAPPPATSHPRVIRISHQSVEPVVMMHMNIQDSGTQPGGVPSAPTGPLGPPGHGQTLGQQVPGFPTAPTRVVIARPTPPQARPSHPGGPPVSGTLQGAGLGTNASLAQMVSGLVGQLLMQPVLVAQGTPGMAPPPAPATASASAGTTNTATTAGPAPGGPAQPPPTPQPSMADLQFSQLLGNLLGPAGPGAGGSGVASPTITVAMPGVPAFLQGMTDFLQATQTAPPPPPPPPPPPPAPEQQTMPPPGSPSGGAGSPGGLGLESLSPEFFTSVVQGVLSSLLGSLGARAGSSESIAAFIQRLSGSSNIFEPGADGALGFFGALLSLLCQNFSMVDVVMLLHGHFQPLQRLQPQLRSFFHQHYLGGQEPTPSNIRMATHTLITGLEEYVRESFSLVQVQPGVDIIRTNLEFLQEQFNSIAAHVLHCTDSGFGARLLELCNQGLFECLALNLHCLGGQQMELAAVINGRIRRMSRGVNPSLVSWLTTMMGLRLQVVLEHMPVGPDAILRYVRRVGDPPQPLPEEPMEVQGAERASPEPQRENASPAPGTTAEEAMSRGPPPAPEGGSRDEQDGASAETEPWAAAVPPEWVPIIQQDIQSQRKVKPQPPLSDAYLSGMPAKRRKTMQGEGPQLLLSEAVSRAAKAAGARPLTSPESLSRDLEAPEVQESYRQQLRSDIQKRLQEDPNYSPQRFPNAQRAFADDP

SEQ ID NO: 1977 - DNA, 3754 bp, Homo sapiens
tagtgcgacgcacgcaggcgtagtacggtcccccgggcgacagcggtggcggctcctcggggtgctcggctccctcccacctaggccggccccggcccgactcgccctcagaaactcactgtttggggctgcggactttctcgtcgtgccccacaaaagtaaagcttggggacctggggggagccggaagtatcgcttcgagatccccaaatactatcggggaaacggaagtggccgtcggtggcagagacctgtcggccatggagcctaatgatagtaccagtaccgctgtggaggagcctgacagcttggaggtgttggtgaagaccttggactctcaaactcgtacctttattgtgggggcccagatgaatgtaaaagagtttaaggagcacattgctgcctctgtcagcatcccatctgaaaaacaacggctcatttaccagggacgagttctgcaagatgataagaagcttcaggaatacaatgttgggggaaaggttatccacctggtggaacgggctcctcctcagactcacctcccttctggggcatcttctgggacggggtctgcctcagccactcatggtgggggatccccccctggtactcgggggcctggggcctctgttcatgaccggaatgccaacagctatgtcatggttggaaccttcaatcttcctagtgacggctctgctgtggatgttcacatcaacatggaacaggccccgattcagagtgagccccgggtacggctggtgatggctcagcacatgatcagggatatacagaccttactatcccggatggagtgtcgaggagggccccaaccgcagcacagtcagccgcccccgcagccaccggctgtgaccccggagccagtagccttgagctctcaaacatcagaaccagttgaaagtgaagcacctccccgggagcccatggaggcagaagaagtggaggagcgtgccccagcccagaacccggagctcactcctggcccagccccagcgggcccaacacctgccccggaaacaaatgcacccaaccatccttcccctgcggagtatgtcgaggtgctccaggagctacagcggctggagagtcgcctccagcccttcttgcagcgctactacgaggttctgggtgctgctgccaccacggactacaataacaatcacgagggccgggaggaggatcagcggttgatcaacttggtaggggagagcctgcgactgctgggcaacacctttgttgcactgtctgacctgcgctgcaatctggcctgcacgcccccacgacacctgcatgtggtccggcctatgtctcactacaccacccccatggtgctccagcaggcagccattcccatacagatcaatgtgggaaccactgtgaccatgacaggaaatgggactcggccccccccaactcccaatgcagaggcacctccccctggtcctgggcaggcctcatccgtggctccgtcttctaccaatgtcgagtcctcagctgagggggctcccccgccaggtccagctcccccgccagccaccagccacccgagggtcatccggatttcccaccagagtgtggaacccgtggtcatgatgcacatgaacattcaagattctggcacacagcctggtggtgttccgagtgctcccactggccccctgggaccccctggtcatggccaaaccctgggacagcaggtgccaggcttcccaacagctccaacccgggtggtgattgcccggcccactcctccacaggctcggccttcccatcctggagggcccccagtctctgggacactgcagggcgccggtctgggtaccaatgcctcgttggcccagatggtgagcggccttgtggggcagcttcttatgcagccagtccttgtggctcaggggaccccaggtatggctccaccgccagcccctgccactgcttctgccagtgctggcaccaccaacacagctaccacagctggccccgctcctggggggcctgcccagcctccacccacccctcaaccctccatggctgatcttcagttctctcagcttctggggaacctgctagggcctgcagggccaggggctggagggtctggtgtggcttctcccaccatcactgtggcgatgcctggtgtccctgcctttctccaaggcatgactgacttcttgcaggcaacacagacagcccctccaccacccccacctcctccacccccaccacctgccccagagcagcagaccatgcccccaccaggctccccttctggtggcgcagggagtcctggaggcctgggtcttgagagcctgtcaccggagttttttacctcagtggtgcagggtgtgctcagctccctgctgggctccctgggggctcgggctggcagcagtgaaagtattgctgccttcatacaacgcctcagtggatccagcaacatctttgagcctggagctgatggggcccttggattctttggggccttgctttctcttctgtgccagaacttctctatggtggacgtagtgatgcttctccatgggcatttccagccactacaacggctccagccccagctgcgatccttcttccaccagcactacctgggtggtcaggagcccacacccagtaacatccggatggcaacccacacattgatcacggggctagaagagtatgtgcgggagagtttttccttggtgcaggttcagccaggtgtggacatcatccggacaaacctggaatttctccaagagcagtttaatagcattgctgcgcatgtgctgcattgcacagatagtggatttggggcccggttgctggagttgtgtaaccaaggcctgtttgaatgcctggccctaaacctgcactgcttggggggacagcagatggagcttgctgctgttatcaatggccgaattcgtcgtatgtctcgtggggtgaatccctccttggtgagctggctgaccactatgatgggactgaggcttcaggtggtactggagcacatgcctgtaggccctgatgccattctcagatacgttcgcagggttggtgatcccccccagccacttcctgaggagccaatggaagttcagggagcagaaagagcttcccctgagcctcagcgggagaatgcttccccagcccctggaacaacagcagaagaggccatgtcccgaggtccacctcctgctcctgaggggggctcccgggatgaacaggatggagcttcagctgagacagaaccttgggcagctgcagtccccccagaatgggtccctattatccagcaggacattcagagccagcggaaggtgaaaccgcagccccctctgagtgatgcctacctcagtggtatgcctgccaagagacgcaagacgatgcagggtgagggcccccagctgcttctctcagaggctgtgagccgggcagctaaggcagccggagctcggcccctgacgagccccgagagcctgagccgggacctggaggcaccagaggttcaggagagctacaggcagcagctccggtctgatatacaaaaacgactgcaggaagaccccaactacagtccccagcgcttccccaatgcccagcgggcctttgctgatgatccttagctctttgctctatggcccttcctcatcaggggaccgtttcccccctcttccttcacagtatttaagaaataaaagtcggatttttctggcaaaaaaaaaaaaaaaaaaaaaaa

SEQ ID NO: 1978 - protein, 1126 aa, Homo sapiens; identical to SEQ ID NO: 1976

SEQ ID NO: 1979 - DNA, 6714 bp, Homo sapiens
ccctaggcccgggtcccggatccccgcgcacccggccaggctctggcacgttttgggggaggtgcctgcaggacccaacatactcaatgagcttccagcgcaatgtccgatcgctcggggccgactgccaagggaaaggatggaaagaagtattcctcgctcaacctgtttgatacgtataagggcaagtccttagagatccagaaacccgctgttgcccctcgccatggcctgcagagtctcgggaaagttgccattgcccggcgtatgccacctccagccaaccttccaagcctgaaagccgagaacaaaggcaatgaccccaatgtctcactagtgccaaaagacggaacaggatgggcaagcaaacaggagcagtccgaccccaagagttccgatgcctcaaccgctcagccgccggaatcgcagccactgccggcttcacagacgcctgcctccaaccagccgaaacgacccccagcagcccccgagaacactcctttggttccaagcggggtaaagtcctgggcacaagccagcgtcacccatggagcacatggagatggtggaagggcatcaagcctactgtcacgattctctcgagaggaatttccgaccctgcaggcggctggcgaccaggacaaggctgccaaggaaagggagtctgccgaacagtcgtctgggcccggaccaagcctccgcccccaaaattctacaacttggagggacggaggtgggcgtggccctgatgagctggagggcccggactccaaacttcatcatggtcatgatccccggggtgggctacagccttcaggcccaccccagttccctccctaccgcggaatgatgccgcctttcatgtatcccccatatctcccgttccctccgccctatggaccccaggggccttaccgataccccactcctgatgggcccagccgttttccccgtgtggcgggcccccgaggctcagggccaccaatgcgcttagtagagcctgtgggtcgtccctctattctcaaagaggataatctcaaagagtttgatcagttggatcaggagaatgatgatggttgggcaggggcccatgaagaggttgactacactgaaaagctcaagttcagcgatgaggaagatgggcgagactctgatgaggagggagctgagggccacagggattcccaatcagcttctggtgaggaacggccccctgaagcagatggcaaaaagggcaactcccccaacagcgaaccgcccactcctaagacggcctgggcagaaacctctcggcctccagagacagagccgggacctcctgccccaaagcctcccctaccccctggggactacccagatcgtgggggtcctccctgcaagcccccagcacctgaagatgaggatgaggcatggcggcagcgacgaaagcagtcgtcatctgagatttccctggcagtggagcgggcccggcgacggcgagaagaagaggagcggcgcatgcaagaagagcgccgggcagcctgtgctgagaagctcaagcgactcgatgaaaagtttggggcacctgacaagcggctcaaagcagagcctgctgccccacctgctgccccttctaccccagctccaccacctgcagtccctaaagaactccctgcacctccagctccacctccagcatcagccccaacaccagagaaagaacctgaagagccagcacaggcccctcctgcccaatctactcctactccaggtgtggctgcggctcccactctggtgagtggtggtggcagtaccagtagcaccagcagtggcagcttcgaagccagcccagtggaaccacaactgccctcaaaagagggtcctgaaccaccagaagaggttcctcctcctaccacacccccagttccaaaggtggaacccaagggtgatgggattggtcccacccgccagccccctagtcagggcttgggctaccccaaatatcagaagtcgttgcctcctcgtttccagcggcagcagcaggagcagctcctgaagcagcagcagcagcaccagtggcagcagcatcaacagggctctgcccctcctaccccagtgcccccatcaccaccacagcctgtgaccctgggggctgtgccagctccacaggctccacccccgccccccaaggccctgtacccaggtgctctgggccggcccccacccatgcccccaatgaactttgatccccgatggatgatgattcctccttatgtggacccccggctcctccagggtcgtccccctctagacttctaccctcctggtgtgcatccctctggcctagttccccgagagcgttcagacagtgggggctcaagctcagagccatttgaccgtcatgcacctgctatgttacgggaacggggcactccaccggtggatccaaagttggcctgggtaggagatgtcttcaccgccacacccgctgaaccccgcccacttacctcacctctgcgccaggctgcggatgaggatgacaaggggatgaggagcgagactcctccagtacctcccccaccaccctatctggccagttatccaggctttcctgagaatggagcccctgggcccccaatctctcgctttcctctggaggaaccagggccccgtccactcccctggcccccaggcagtgatgaagtggccaagatacaaactccaccacccaagaaggagccccctaaggaggagactgcacagctgacggggccagaagcaggccgaaagcctgcccgcggagtcgggagtggaggccagggccccccaccaccacgcagagagagtcgcacagagacccgctggggccctcgtccagggagcagtcgtcgtggaatccctccagaggagccaggggccccaccccgccgggctgggcctataaagaaacctccaccacctacaaaagtagaagagctgcctcccaagcccctcgaacagggggatgaaacccccaaacccccaaagccagacccactcaagataaccaaggggaagctagggggccccaaggagaccccacccaatggaaatctttcccctgccccaaggcttcggagggactattcgtatgaaagagtgggtcctacctcttgccggggtcggggccgaggcgagtattttgccagagggaggggttttcgggggacctatgggggacgagggcggggagcccgaagccgggaattccgcagttaccgagagtttcgaggagatgatgggcgtggaggtgggacagggggaccaaaccaccctcctgctccccgaggccgcactgccagcgagacacggagcgagggttcagagtatgaggaaatccccaagcggcgccggcagcggggctcagaaacaggcagcgagacccatgagagtgatctggctccttcagacaaggaggctcccacacccaaggagggaacactcacccaggtccctctcgctcccccaccaccaggagccccaccttcaccagccccagcccgcttcactgcccggggtgggcgagtcttcactcccagaggggtgccatctcgccggggccgaggaggagggaggccccctcctcaagtttgcccaggctggagccctccagccaagtctctggctcccaagaaacctcccacaggccctttgccaccaagtaaggagcctttgaaagagaagttgatcccagggcctctgtcccctgtggcgcgcggaggcagcaatggaggtagcaatgtgggcatggaagatggggagcgaccccgaaggaggcgacatgggagggctcagcagcaggataaaccgcctcgtttccggaggctgaagcaggaacgggagaatgccgcaagggggtctgagggcaagccctccctaacccttccagcctccgctcctgcacctgaggaggccctcacaacagtcacagtggccccagcacctcgccgggcagctgccaagtctcctgatctgtcaaaccagaactcagaccaagccaatgaggaatgggagactgcatcagagagcagtgacttcaccagtgagcgccgaggggacaaagaggcacccccaccagtactgctgacacccaaggctgtgggaactcctgggggaggtggaggtggagccgtaccaggtatttcagccatgtcccgcggagatctgagccagagagccaaggatttgagtaaacggagcttctcaagtcagcggccaggcatggaacggcagaatcggcgccctggcccagggggcaaggctggcagcagtggcagcagcagtggaggaggcggtgggggtcctggaggaaggaccgggccaggacgaggcgacaagaggagctggccctctcccaagaaccgaagtcgtcctccagaggagcgtcccccggggcttcccctgcctcccccacctcccagcagttctgctgtcttccgcctggaccaagttatccacagcaaccctgctggcatccaacaggctctggcccagcttagtagccgtcaagggagtgtaactgcaccagggggtcatccaaggcacaagcctgggcctccccaagcccctcagggcccctctcctaggcccccaacccgatacgagccccagagggtcaacagcggcctcagttctgacccccactttgaggagccggggccaatggtgagaggggtgggtgggactcctcgggactctgccggggttagtccctttccccctaaacgtcgggagcggcctcccagaaaaccagagctgctacaggaggaatctttgccacctcctcatagctctggattcttgggctctaagcctgagggcccaggccctcaggcagagtccagagatacaggcacagaggccctgacccctcacatctggaaccgtttacatactgccactagccgaaagagttaccggcccagctccatggagccttggatggagcccctgagtccttttgaggatgtggctggcacagaaatgagtcagtctgacagtggggtggacctgagtggggattctcaggtgtcatcaggtccctgcagccagcgaagttcccctgatggaggactcaagggggcagcagagggaccccccaagaggcctggaggctcctcacccctgaatgctgttccttgtgagggtccacctggctctgaacctcctaggagaccaccacctgccccccacgatggggacagaaaggagctgccccgggagcagcctctgccccctggccccattggcacagaacgatcacagcatacagaccgaggcacagagcctggccccattcggccatcccatcgacctggtcccccagtccagtttggcactagtgacaaggactcagacttacgcctagtggtaggagacagcttgaaagcagagaaggagctaacagcatcagtcactgaggccattcctgtatcacgagactgggagctgcttcccagtgctgctgcctctgctgagccacaatccaagaacctggattctgggcactgtgtcccggagcccagctcctcaggccagcgcctgtatcctgaggttttctatggcagtgctgggccttccagttctcagatctctgggggagccatggactctcaattacatccaaacagtggaggcttccgccctgggacaccctcactgcacccttacagatcacagcccctatacctaccccccggcccagcccctccctcagcactgctctctggggtagctctcaagggccagtttctggatttctccacaatgcaagctacagagctggggaagttgccggctggaggagttctctaccctccaccttccttcctctactctccggctttctgccccagtcctttgcctgacacatcgttgcttcaggtacgccaggatctgccatccccttcggatttttattctactcctctgcagcctggtggccaaagtggctttctcccttcaggggctcctgcccagcagatgcttctacccatggtagactcacagctgcctgtggtgaactttggctccctgccgccagcaccacctcctgccccacctcccctttctctgttacctgtgggccctgctctgcagccccccagcctggctgtgcggcccccacctgctcctgctactcgggtgctgccttcacctgccaggcccttccccgctagcttggggcgagcagagctgcatccagtggaactaaagccgttccaggattatcaaaaactgagcagcaaccttgggggacctggatcatcacggactcccccaactggaaggtccttctctggcctcaattcccgtctcaaggccacgccttccacctacagtggagtcttccgcacccagcgcgtcgacctttaccagcaggcctccccaccagatgccctgcgctggatacctaagccttgggagcggacagggctgccacctcgagaagggccctcccgacgggcagaggagcctgggtcccgaggggacaaggagcctgggttgcccccaccccgctgagggagttcctcttgccccctacccccggggcttgtatatagattataaatatataagggggaaaggggtgggcggggaggggttgtggggctggggcctcacttcccctcctcccccttcccctggtcccctgtccctggggctgtttgttaaaaaagagtaataaaaggattt

SEQ ID NO: 1980 - protein, 2145 aa, Homo sapiens
MSDRSGPTAKGKDGKKYSSLNLFDTYKGKSLEIQKPAVAPRHGLQSLGKVAIARRMPPPANLPSLKAENKGNDPNVSLVPKDGTGWASKQEQSDPKSSDASTAQPPESQPLPASQTPASNQPKRPPAAPENTPLVPSGVKSWAQASVTHGAHGDGGRASSLLSRFSREEFPTLQAAGDQDKAAKERESAEQSSGPGPSLRPQNSTTWRDGGGRGPDELEGPDSKLHHGHDPRGGLQPSGPPQFPPYRGMMPPFMYPPYLPFPPPYGPQGPYRYPTPDGPSRFPRVAGPRGSGPPMRLVEPVGRPSILKEDNLKEFDQLDQENDDGWAGAHEEVDYTEKLKFSDEEDGRDSDEEGAEGHRDSQSASGEERPPEADGKKGNSPNSEPPTPKTAWAETSRPPETEPGPPAPKPPLPPGDYPDRGGPPCKPPAPEDEDEAWRQRRKQSSSEISLAVERARRRREEEERRMQEERRAACAEKLKRLDEKFGAPDKRLKAEPAAPPAAPSTPAPPPAVPKELPAPPAPPPASAPTPEKEPEEPAQAPPAQSTPTPGVAAAPTLVSGGGSTSSTSSGSFEASPVEPQLPSKEGPEPPEEVPPPTTPPVPKVEPKGDGIGPTRQPPSQGLGYPKYQKSLPPRFQRQQQEQLLKQQQQHQWQQHQQGSAPPTPVPPSPPQPVTLGAVPAPQAPPPPPKALYPGALGRPPPMPPMNFDPRWMMIPPYVDPRLLQGRPPLDFYPPGVHPSGLVPRERSDSGGSSSEPFDRHAPAMLRERGTPPVDPKLAWVGDVFTATPAEPRPLTSPLRQAADEDDKGMRSETPPVPPPPPYLASYPGFPENGAPGPPISRFPLEEPGPRPLPWPPGSDEVAKIQTPPPKKEPPKEETAQLTGPEAGRKPARGVGSGGQGPPPPRRESRTETRWGPRPGSSRRGIPPEEPGAPPRRAGPIKKPPPPTKVEELPPKPLEQGDETPKPPKPDPLKITKGKLGGPKETPPNGNLSPAPRLRRDYSYERVGPTSCRGRGRGEYFARGRGFRGTYGGRGRGARSREFRSYREFRGDDGRGGGTGGPNHPPAPRGRTASETRSEGSEYEEIPKRRRQRGSETGSETHESDLAPSDKEAPTPKEGTLTQVPLAPPPPGAPPSPAPARFTARGGRVFTPRGVPSRRGRGGGRPPPQVCPGWSPPAKSLAPKKPPTGPLPPSKEPLKEKLIPGPLSPVARGGSNGGSNVGMEDGERPRRRRHGRAQQQDKPPRFRRLKQERENAARGSEGKPSLTLPASAPAPEEALTTVTVAPAPRRAAAKSPDLSNQNSDQANEEWETASESSDFTSERRGDKEAPPPVLLTPKAVGTPGGGGGGAVPGISAMSRGDLSQRAKDLSKRSFSSQRPGMERQNRRPGPGGKAGSSGSSSGGGGGGPGGRTGPGRGDKRSWPSPKNRSRPPEERPPGLPLPPPPPSSSAVFRLDQVIHSNPAGIQQALAQLSSRQGSVTAPGGHPRHKPGPPQAPQGPSPRPPTRYEPQRVNSGLSSDPHFEEPGPMVRGVGGTPRDSAGVSPFPPKRRERPPRKPELLQEESLPPPHSSGFLGSKPEGPGPQAESRDTGTEALTPHIWNRLHTATSRKSYRPSSMEPWMEPLSPFEDVAGTEMSQSDSGVDLSGDSQVSSGPCSQRSSPDGGLKGAAEGPPKRPGGSSPLNAVPCEGPPGSEPPRRPPPAPHDGDRKELPREQPLPPGPIGTERSQHTDRGTEPGPIRPSHRPGPPVQFGTSDKDSDLRLVVGDSLKAEKELTASVTEAIPVSRDWELLPSAAASAEPQSKNLDSGHCVPEPSSSGQRLYPEVFYGSAGPSSSQISGGAMDSQLHPNSGGFRPGTPSLHPYRSQPLYLPPGPAPPSALLSGVALKGQFLDFSTMQATELGKLPAGGVLYPPPSFLYSPAFCPSPLPDTSLLQVRQDLPSPSDFYSTPLQPGGQSGFLPSGAPAQQMLLPMVDSQLPVVNFGSLPPAPPPAPPPLSLLPVGPALQPPSLAVRPPPAPATRVLPSPARPFPASLGRAELHPVELKPFQDYQKLSSNLGGPGSSRTPPTGRSFSGLNSRLKATPSTYSGVFRTQRVDLYQQASPPDALRWIPKPWERTGLPPREGPSRRAEEPGSRGDKEPGLPPPR

SEQ ID NO: 1981 - DNA, 6750 bp, Homo sapiens
ccctaggcccgggtcccggatccccgcgcacccggccaggctctggcacgttttgggggaggtgcctgcaggacccaacatactcaatgagcttccagcgcaatgtccgatcgctcggggccgactgccaagggaaaggatggaaagaagtattcctcgctcaacctgtttgatacgtataagggcaagtccttagagatccagaaacccgctgttgcccctcgccatggcctgcagagtctcgggaaagttgccattgcccggcgtatgccacctccagccaaccttccaagcctgaaagccgagaacaaaggcaatgaccccaatgtctcactagtgccaaaagacggaacaggatgggcaagcaaacaggagcagtccgaccccaagagttccgatgcctcaaccgctcagccgccggaatcgcagccactgccggcttcacagacgcctgcctccaaccagccgaaacgacccccagcagcccccgagaacactcctttggttccaagcggggtaaagtcctgggcacaagccagcgtcacccatggagcacatggagatggtggaagggcatcaagcctactgtcacgattctctcgagaggaatttccgaccctgcaggcggctggcgaccaggacaaggctgccaaggaaagggagtctgccgaacagtcgtctgggcccggaccaagcctccgcccccaaaattctacaacttggagggacggaggtgggcgtggccctgatgagctggagggcccggactccaaacttcatcatggtcatgatccccggggtgggctacagccttcaggcccaccccagttccctccctaccgcggaatgatgccgcctttcatgtatcccccatatctcccgttccctccgccctatggaccccaggggccttaccgataccccactcctgatgggcccagccgttttccccgtgtggcgggcccccgaggctcagggccaccaatgcgcttagtagagcctgtgggtcgtccctctattctcaaagaggataatctcaaagagtttgatcagttggatcaggagaatgatgatggttgggcaggggcccatgaagaggttgactacactgaaaagctcaagttcagcgatgaggaagatgggcgagactctgatgaggagggagctgagggccacagggattcccaatcagcttctggtgaggaacggccccctgaagcagatggcaaaaagggcaactcccccaacagcgaaccgcccactcctaagacggcctgggcagaaacctctcggcctccagagacagagccgggacctcctgccccaaagcctcccctacccccacctcaccggggccccgccgggaactggggcccccctggggactacccagatcgtgggggtcctccctgcaagcccccagcacctgaagatgaggatgaggcatggcggcagcgacgaaagcagtcgtcatctgagatttccctggcagtggagcgggcccggcgacggcgagaagaagaggagcggcgcatgcaagaagagcgccgggcagcctgtgctgagaagctcaagcgactcgatgaaaagtttggggcacctgacaagcggctcaaagcagagcctgctgccccacctgctgccccttctaccccagctccaccacctgcagtccctaaagaactccctgcacctccagctccacctccagcatcagccccaacaccagagaaagaacctgaagagccagcacaggcccctcctgcccaatctactcctactccaggtgtggctgcggctcccactctggtgagtggtggtggcagtaccagtagcaccagcagtggcagcttcgaagccagcccagtggaaccacaactgccctcaaaagagggtcctgaaccaccagaagaggttcctcctcctaccacacccccagttccaaaggtggaacccaagggtgatgggattggtcccacccgccagccccctagtcagggcttgggctaccccaaatatcagaagtcgttgcctcctcgtttccagcggcagcagcaggagcagctcctgaagcagcagcagcagcaccagtggcagcagcatcaacagggctctgcccctcctaccccagtgcccccatcaccaccacagcctgtgaccctgggggctgtgccagctccacaggctccacccccgccccccaaggccctgtacccaggtgctctgggccggcccccacccatgcccccaatgaactttgatccccgatggatgatgattcctccttatgtggacccccggctcctccagggtcgtccccctctagacttctaccctcctggtgtgcatccctctggcctagttccccgagagcgttcagacagtgggggctcaagctcagagccatttgaccgtcatgcacctgctatgttacgggaacggggcactccaccggtggatccaaagttggcctgggtaggagatgtcttcaccgccacacccgctgaaccccgcccacttacctcacctctgcgccaggctgcggatgaggatgacaaggggatgaggagcgagactcctccagtacctcccccaccaccctatctggccagttatccaggctttcctgagaatggagcccctgggcccccaatctctcgctttcctctggaggaaccagggccccgtccactcccctggcccccaggcagtgatgaagtggccaagatacaaactccaccacccaagaaggagccccctaaggaggagactgcacagctgacggggccagaagcaggccgaaagcctgcccgcggagtcgggagtggaggccagggccccccaccaccacgcagagagagtcgcacagagacccgctggggccctcgtccagggagcagtcgtcgtggaatccctccagaggagccaggggccccaccccgccgggctgggcctataaagaaacctccaccacctacaaaagtagaagagctgcctcccaagcccctcgaacagggggatgaaacccccaaacccccaaagccagacccactcaagataaccaaggggaagctagggggccccaaggagaccccacccaatggaaatctttcccctgccccaaggcttcggagggactattcgtatgaaagagtgggtcctacctcttgccggggtcggggccgaggcgagtattttgccagagggaggggttttcgggggacctatgggggacgagggcggggagcccgaagccgggaattccgcagttaccgagagtttcgaggagatgatgggcgtggaggtgggacagggggaccaaaccaccctcctgctccccgaggccgcactgccagcgagacacggagcgagggttcagagtatgaggaaatccccaagcggcgccggcagcggggctcagaaacaggcagcgagacccatgagagtgatctggctccttcagacaaggaggctcccacacccaaggagggaacactcacccaggtccctctcgctcccccaccaccaggagccccaccttcaccagccccagcccgcttcactgcccggggtgggcgagtcttcactcccagaggggtgccatctcgccggggccgaggaggagggaggccccctcctcaagtttgcccaggctggagccctccagccaagtctctggctcccaagaaacctcccacaggccctttgccaccaagtaaggagcctttgaaagagaagttgatcccagggcctctgtcccctgtggcgcgcggaggcagcaatggaggtagcaatgtgggcatggaagatggggagcgaccccgaaggaggcgacatgggagggctcagcagcaggataaaccgcctcgtttccggaggctgaagcaggaacgggagaatgccgcaagggggtctgagggcaagccctccctaacccttccagcctccgctcctgcacctgaggaggccctcacaacagtcacagtggccccagcacctcgccgggcagctgccaagtctcctgatctgtcaaaccagaactcagaccaagccaatgaggaatgggagactgcatcagagagcagtgacttcaccagtgagcgccgaggggacaaagaggcacccccaccagtactgctgacacccaaggctgtgggaactcctgggggaggtggaggtggagccgtaccaggtatttcagccatgtcccgcggagatctgagccagagagccaaggatttgagtaaacggagcttctcaagtcagcggccaggcatggaacggcagaatcggcgccctggcccagggggcaaggctggcagcagtggcagcagcagtggaggaggcggtgggggtcctggaggaaggaccgggccaggacgaggcgacaagaggagctggccctctcccaagaaccgaagtcgtcctccagaggagcgtcccccggggcttcccctgcctcccccacctcccagcagttctgctgtcttccgcctggaccaagttatccacagcaaccctgctggcatccaacaggctctggcccagcttagtagccgtcaagggagtgtaactgcaccagggggtcatccaaggcacaagcctgggcctccccaagcccctcagggcccctctcctaggcccccaacccgatacgagccccagagggtcaacagcggcctcagttctgacccccactttgaggagccggggccaatggtgagaggggtgggtgggactcctcgggactctgccggggttagtccctttccccctaaacgtcgggagcggcctcccagaaaaccagagctgctacaggaggaatctttgccacctcctcatagctctggattcttgggctctaagcctgagggcccaggccctcaggcagagtccagagatacaggcacagaggccctgacccctcacatctggaaccgtttacatactgccactagccgaaagagttaccggcccagctccatggagccttggatggagcccctgagtccttttgaggatgtggctggcacagaaatgagtcagtctgacagtggggtggacctgagtggggattctcaggtgtcatcaggtccctgcagccagcgaagttcccctgatggaggactcaagggggcagcagagggaccccccaagaggcctggaggctcctcacccctgaatgctgttccttgtgagggtccacctggctctgaacctcctaggagaccaccacctgccccccacgatggggacagaaaggagctgccccgggagcagcctctgccccctggccccattggcacagaacgatcacagcatacagaccgaggcacagagcctggccccattcggccatcccatcgacctggtcccccagtccagtttggcactagtgacaaggactcagacttacgcctagtggtaggagacagcttgaaagcagagaaggagctaacagcatcagtcactgaggccattcctgtatcacgagactgggagctgcttcccagtgctgctgcctctgctgagccacaatccaagaacctggattctgggcactgtgtcccggagcccagctcctcaggccagcgcctgtatcctgaggttttctatggcagtgctgggccttccagttctcagatctctgggggagccatggactctcaattacatccaaacagtggaggcttccgccctgggacaccctcactgcacccttacagatcacagcccctatacctaccccccggcccagcccctccctcagcactgctctctggggtagctctcaagggccagtttctggatttctccacaatgcaagctacagagctggggaagttgccggctggaggagttctctaccctccaccttccttcctctactctccggctttctgccccagtcctttgcctgacacatcgttgcttcaggtacgccaggatctgccatccccttcggatttttattctactcctctgcagcctggtggccaaagtggctttctcccttcaggggctcctgcccagcagatgcttctacccatggtagactcacagctgcctgtggtgaactttggctccctgccgccagcaccacctcctgccccacctcccctttctctgttacctgtgggccctgctctgcagccccccagcctggctgtgcggcccccacctgctcctgctactcgggtgctgccttcacctgccaggcccttccccgctagcttggggcgagcagagctgcatccagtggaactaaagccgttccaggattatcaaaaactgagcagcaaccttgggggacctggatcatcacggactcccccaactggaaggtccttctctggcctcaattcccgtctcaaggccacgccttccacctacagtggagtcttccgcacccagcgcgtcgacctttaccagcaggcctccccaccagatgccctgcgctggatacctaagccttgggagcggacagggctgccacctcgagaagggccctcccgacgggcagaggagcctgggtcccgaggggacaaggagcctgggttgcccccaccccgctgagggagttcctcttgccccctacccccggggcttgtatatagattataaatatataagggggaaaggggtgggcggggaggggttgtggggctggggcctcacttcccctcctcccccttcccctggtcccctgtccctggggctgtttgttaaaaaagagtaataaaaggattt

SEQ ID NO: 1982 - protein, 2157 aa, Homo sapiens
MSDRSGPTAKGKDGKKYSSLNLFDTYKGKSLEIQKPAVAPRHGLQSLGKVAIARRMPPPANLPSLKAENKGNDPNVSLVPKDGTGWASKQEQSDPKSSDASTAQPPESQPLPASQTPASNQPKRPPAAPENTPLVPSGVKSWAQASVTHGAHGDGGRASSLLSRFSREEFPTLQAAGDQDKAAKERESAEQSSGPGPSLRPQNSTTWRDGGGRGPDELEGPDSKLHHGHDPRGGLQPSGPPQFPPYRGMMPPFMYPPYLPFPPPYGPQGPYRYPTPDGPSRFPRVAGPRGSGPPMRLVEPVGRPSILKEDNLKEFDQLDQENDDGWAGAHEEVDYTEKLKFSDEEDGRDSDEEGAEGHRDSQSASGEERPPEADGKKGNSPNSEPPTPKTAWAETSRPPETEPGPPAPKPPLPPPHRGPAGNWGPPGDYPDRGGPPCKPPAPEDEDEAWRQRRKQSSSEISLAVERARRRREEEERRMQEERRAACAEKLKRLDEKFGAPDKRLKAEPAAPPAAPSTPAPPPAVPKELPAPPAPPPASAPTPEKEPEEPAQAPPAQSTPTPGVAAAPTLVSGGGSTSSTSSGSFEASPVEPQLPSKEGPEPPEEVPPPTTPPVPKVEPKGDGIGPTRQPPSQGLGYPKYQKSLPPRFQRQQQEQLLKQQQQHQWQQHQQGSAPPTPVPPSPPQPVTLGAVPAPQAPPPPPKALYPGALGRPPPMPPMNFDPRWMMIPPYVDPRLLQGRPPLDFYPPGVHPSGLVPRERSDSGGSSSEPFDRHAPAMLRERGTPPVDPKLAWVGDVFTATPAEPRPLTSPLRQAADEDDKGMRSETPPVPPPPPYLASYPGFPENGAPGPPISRFPLEEPGPRPLPWPPGSDEVAKIQTPPPKKEPPKEETAQLTGPEAGRKPARGVGSGGQGPPPPRRESRTETRWGPRPGSSRRGIPPEEPGAPPRRAGPIKKPPPPTKVEELPPKPLEQGDETPKPPKPDPLKITKGKLGGPKETPPNGNLSPAPRLRRDYSYERVGPTSCRGRGRGEYFARGRGFRGTYGGRGRGARSREFRSYREFRGDDGRGGGTGGPNHPPAPRGRTASETRSEGSEYEEIPKRRRQRGSETGSETHESDLAPSDKEAPTPKEGTLTQVPLAPPPPGAPPSPAPARFTARGGRVFTPRGVPSRRGRGGGRPPPQVCPGWSPPAKSLAPKKPPTGPLPPSKEPLKEKLIPGPLSPVARGGSNGGSNVGMEDGERPRRRRHGRAQQQDKPPRFRRLKQERENAARGSEGKPSLTLPASAPAPEEALTTVTVAPAPRRAAAKSPDLSNQNSDQANEEWETASESSDFTSERRGDKEAPPPVLLTPKAVGTPGGGGGGAVPGISAMSRGDLSQRAKDLSKRSFSSQRPGMERQNRRPGPGGKAGSSGSSSGGGGGGPGGRTGPGRGDKRSWPSPKNRSRPPEERPPGLPLPPPPPSSSAVFRLDQVIHSNPAGIQQALAQLSSRQGSVTAPGGHPRHKPGPPQAPQGPSPRPPTRYEPQRVNSGLSSDPHFEEPGPMVRGVGGTPRDSAGVSPFPPKRRERPPRKPELLQEESLPPPHSSGFLGSKPEGPGPQAESRDTGTEALTPHIWNRLHTATSRKSYRPSSMEPWMEPLSPFEDVAGTEMSQSDSGVDLSGDSQVSSGPCSQRSSPDGGLKGAAEGPPKRPGGSSPLNAVPCEGPPGSEPPRRPPPAPHDGDRKELPREQPLPPGPIGTERSQHTDRGTEPGPIRPSHRPGPPVQFGTSDKDSDLRLVVGDSLKAEKELTASVTEAIPVSRDWELLPSAAASAEPQSKNLDSGHCVPEPSSSGQRLYPEVFYGSAGPSSSQISGGAMDSQLHPNSGGFRPGTPSLHPYRSQPLYLPPGPAPPSALLSGVALKGQFLDFSTMQATELGKLPAGGVLYPPPSFLYSPAFCPSPLPDTSLLQVRQDLPSPSDFYSTPLQPGGQSGFLPSGAPAQQMLLPMVDSQLPVVNFGSLPPAPPPAPPPLSLLPVGPALQPPSLAVRPPPAPATRVLPSPARPFPASLGRAELHPVELKPFQDYQKLSSNLGGPGSSRTPPTGRSFSGLNSRLKATPSTYSGVFRTQRVDLYQQASPPDALRWIPKPWERTGLPPREGPSRRAEEPGSRGDKEPGLPPPR

SEQ ID NO: 1983 - DNA, 1432 bp, Homo sapiens
ccgagcttcttaaacacaggccttgggcctacggctctgggggtacttgggggggcgggggcaggtctgatgagtaacccctccccccaggttccagaggaagaagcctccacatctgtctgccggcccaagagttccatggcctccacttcccgccgccaacgccgagaacgtcgctttcgtcgttacttgtctgcaggacggctggtccgggcccaggccctcctccagcgacacccaggcctcgatgtagatgctgggcagcccccaccactgcaccgggcctgtgcccgccacgatgcccctgccctgtgcctgctgcttcggctcggggctgaccctgcccaccaggaccgccatggggacacggcactgcatgctgctgcccgccagggcccagatgcctacaccgatttcttcctcccgctgctaagccgctgtccctccgccatgggaataaagaataaggatggggagacccctggccaaattttgggctggggacccccctgggattctgctgaagaggaggaagaagatgatgcctccaaggagcgggaatggagacagaagctccagggtgagctggaggacgagtggcaggaagtcatggggaggtttgaaggtgatgcctcccatgaaacccaggaacctgagtccttctcagcctggtcagatcgcctggcccgggaacatgcccagaagtgccagcagcagcagcgagaagcagagggatcctgtcgacccccacgtgctgagggctccagccagagctggcgacagcaggaggaggagcagcggctcttcagggagcgagcccgggccaaggaggaagagctgcgtgagagccgagccaggagggcgcaggaggctctaggggaccgagaacccaagccaaccagggccgggcccagggaagagcaccccagaggagcggggaggggcagcctctggcgatttggtgatgtgccctggccctgccctgggggaggggacccagaggccatggctgcagccctggtggccaggggcccccctttggaggaacagggggctctgaggaggtacttgagggtccagcaggtccgctggcaccctgaccgcttcctgcagcgattccgaagccagattgagacctgggagctgggccgtgtgatgggagcagtgacagccctttctcaggccctgaatcgccatgcagaggccctcaagtgaccctagggaagaagcaagaaacttcggggctgcagcctcaggatgaggcagaaggaagggtaagggaaaggatggggaccacaaggaagagccaggtgctgctcagcagaggatatgggtgggagcgaaagttgtaacaagtgggggtggggggtgcgggccgccaccactgctccttgactctgccgtttcctaataagacctggttccacatctc

SEQ ID NO: 1984 - DNA, 1724 bp, Homo sapiens
acaggcattttccaaaggcaagcctggagcgcacggatctgtataaccgcggaaggccctgtttccggtcccttgcgcctgcgctcttgcagccaagaaggcgggaggctggagtagagggaagcctgcaaccggaagtgaaggcagatttccctccttcgtcgctgttgctgccgccatacgcgctctccctgtttagttatggcagagaacgatgtggacaatgagctcttggactatgaagatgatgaggtggagacagcagctgggggagatggggctgaggcccctgccaagaaggatgtcaagggctcctatgtctccatccacagctctggctttcgtgacttcctgctcaagccagagttgctccgggccattgtcgactgtggctttgagcatccgtcagaagtccagcatgagtgcatccctcaggccattctgggaatggatgtcctgtgccaggccaagtcgggcatgggaaagacagcagtgtttgtcttggccacactgcaacagctggagccagttactgggcaggtgtctgtgctggtgatgtgtcacactcgggagttggcttttcagatcagcaaggaatatgagcgcttctctaaatacatgcccaatgtcaaggttgctgttttttttggtggtctgtctatcaagaaggatgaagaggtgctgaagaagaactgcccgcatatcgtcgtggggactccaggccgtatcctagccctggctcgaaataagagcctcaacctcaaacacattaaacactttattttggatgaatgtgataagatgcttgaacagctcgacatgcgtcgggatgtccaggaaatttttcgcatgaccccccacgagaagcaggtcatgatgttcagtgctaccttgagcaaagagatccgtccagtctgccgcaagttcatgcaagatccaatggagatcttcgtggatgatgagacgaagttgacgctgcatgggttgcagcagtactacgtgaaactgaaggacaacgagaagaaccggaagctctttgaccttctggatgtccttgagttcaaccaggtggtgatctttgtgaagtctgtgcagcggtgcattgccttggcccagctactagtggagcagaacttcccagccattgccatccaccgtgggatgccccaggaggagaggctttctcggtatcagcagtttaaagattttcaacgacgaattcttgtggctaccaacctatttggccgaggcatggacatcgagcgggtgaacattgcttttaattatgacatgcctgaggattctgacacctacctgcatcgggtggccagagcaggccggtttggcaccaagggcttggctatcacatttgtgtccgatgagaatgatgccaagatcctcaatgatgtgcaggatcgctttgaggtcaatattagtgagctgcctgatgagatagacatctcctcctacattgaacagacacggtagaagactcgcccattttggaatgtgaccgtctgtccttcaggagaggacaccagggtgggggtgaaggagacactactgcccccacccctgacagcccccaccccatggcttccatcttttgcatcaccaccactcctgaacccccatttctgatttgtcagaatttttttttaacaaaactaaaaatgaaacacatgtgtctgtggtatctaaaaaaaaaaaaaaaaaaaaaaaaa

SEQ ID NO: 1985 - protein, 428 aa, Homo sapiens
MAENDVDNELLDYEDDEVETAAGGDGAEAPAKKDVKGSYVSIHSSGFRDFLLKPELLRAIVDCGFEHPSEVQHECIPQAILGMDVLCQAKSGMGKTAVFVLATLQQLEPVTGQVSVLVMCHTRELAFQISKEYERFSKYMPNVKVAVFFGGLSIKKDEEVLKKNCPHIVVGTPGRILALARNKSLNLKHIKHFILDECDKMLEQLDMRRDVQEIFRMTPHEKQVMMFSATLSKEIRPVCRKFMQDPMEIFVDDETKLTLHGLQQYYVKLKDNEKNRKLFDLLDVLEFNQVVIFVKSVQRCIALAQLLVEQNFPAIAIHRGMPQEERLSRYQQFKDFQRRILVATNLFGRGMDIERVNIAFNYDMPEDSDTYLHRVARAGRFGTKGLAITFVSDENDAKILNDVQDRFEVNISELPDEIDISSYIEQTR

SEQ ID NO: 1986 - DNA, 1854 bp, Homo sapiens
acaggcattttccaaaggcaagcctggagcgcacggatctgtataaccgcggaaggccctgtttccggtcccttgcgcctgcgctcttgcagccaagaaggcgggaggctggagtagagggaagcctgcaaccggaagtgaaggcagatttccctccttcgtcgctgttgctgccgccatacgcgctctccctgtttagctcttctgttagaaatagtatctttgttttcctttgctgttcctcaatcccctactcttcaccccttgttttcacctattttgcgagaacccatccagatcccccttcccttcttcccctgccggcccagttatggcagagaacgatgtggacaatgagctcttggactatgaagatgatgaggtggagacagcagctgggggagatggggctgaggcccctgccaagaaggatgtcaagggctcctatgtctccatccacagctctggctttcgtgacttcctgctcaagccagagttgctccgggccattgtcgactgtggctttgagcatccgtcagaagtccagcatgagtgcatccctcaggccattctgggaatggatgtcctgtgccaggccaagtcgggcatgggaaagacagcagtgtttgtcttggccacactgcaacagctggagccagttactgggcaggtgtctgtgctggtgatgtgtcacactcgggagttggcttttcagatcagcaaggaatatgagcgcttctctaaatacatgcccaatgtcaaggttgctgttttttttggtggtctgtctatcaagaaggatgaagaggtgctgaagaagaactgcccgcatatcgtcgtggggactccaggccgtatcctagccctggctcgaaataagagcctcaacctcaaacacattaaacactttattttggatgaatgtgataagatgcttgaacagctcgacatgcgtcgggatgtccaggaaatttttcgcatgaccccccacgagaagcaggtcatgatgttcagtgctaccttgagcaaagagatccgtccagtctgccgcaagttcatgcaagatccaatggagatcttcgtggatgatgagacgaagttgacgctgcatgggttgcagcagtactacgtgaaactgaaggacaacgagaagaaccggaagctctttgaccttctggatgtccttgagttcaaccaggtggtgatctttgtgaagtctgtgcagcggtgcattgccttggcccagctactagtggagcagaacttcccagccattgccatccaccgtgggatgccccaggaggagaggctttctcggtatcagcagtttaaagattttcaacgacgaattcttgtggctaccaacctatttggccgaggcatggacatcgagcgggtgaacattgcttttaattatgacatgcctgaggattctgacacctacctgcatcgggtggccagagcaggccggtttggcaccaagggcttggctatcacatttgtgtccgatgagaatgatgccaagatcctcaatgatgtgcaggatcgctttgaggtcaatattagtgagctgcctgatgagatagacatctcctcctacattgaacagacacggtagaagactcgcccattttggaatgtgaccgtctgtccttcaggagaggacaccagggtgggggtgaaggagacactactgcccccacccctgacagcccccaccccatggcttccatcttttgcatcaccaccactcctgaacccccatttctgatttgtcagaatttttttttaacaaaactaaaaatgaaacacatgtgtctgtggtatctaaaaaaaaaaaaaaaaaaaaaaaaa

SEQ ID NO: 1987 - protein, 428 aa, Homo sapiens; identical to SEQ ID NO: 1985

SEQ ID NO: 1988 - DNA, 1311 bp, Homo sapiens
agacgccgagatgctggtcatggcgccccgaaccgtcctcctgctgctctcggcggccctggccctgaccgagacctgggccggctcccactccatgaggtatttcgacaccgccatgtcccggcccggccgcggggagccccgcttcatctcagtgggctacgtggacgacacgcagttcgtgaggttcgacagcgacgccgcgagtccgagagaggagccgcgggcgccgtggatagagcaggaggggccggagtattgggaccggaacacacagatcttcaagaccaacacacagactgaccgagagagcctgcggaacctgcgcggctactacaaccagagcgaggccgggtctcacaccctccagagcatgtacggctgcgacgtggggccggacgggcgcctcctccgcgggcataaccagtacgcctacgacggcaaggattacatcgccctgaacgaggacctgcgctcctggaccgcggcggacaccgcggctcagatcacccagcgcaagtgggaggcggcccgtgtggcggagcaggacagagcctacctggagggcacgtgcgtggagtggctccgcagatacctggagaacgggaaggacacgctggagcgcgcggaccccccaaagacacacgtgacccaccaccccatctctgaccatgaggccaccctgaggtgctgggccctgggcttctaccctgcggagatcacactgacctggcagcgggatggcgaggaccaaactcaggacactgagcttgtggagaccagaccagcaggagatagaaccttccagaagtgggcagctgtggtggtgccttctggagaagagcagagatacacatgccatgtacagcatgaggggctgccgaagcccctcaccctgagatgggagccgtcttcccagtccaccgtccccatcgtgggcattgttgctggcctggctgtcctagcagttgtggtcatcggagctgtggtcgctgctgtgatgtgtaggaggaagagctcaggtggaaaaggagggagctactctcaggctgcgtgcagcgacagtgcccagggctctgatgtgtctctcacagcttgaaaagcctgagacagctgtcttgtgagggactgagatgcaggatttcttcacgcctcccctttgtgacttcaagagcctctggcatctctttctgcaaaggcacctgaatgtgtctgcgtccctgttagcataatgtgaggaggtggagagacagcccacccttgtgtccactgtgacccctgttcccatgctgacctgtgtttcctccccag

SEQ ID NO: 1989 - protein, 362 aa, Homo sapiens
MLVMAPRTVLLLLSAALALTETWAGSHSMRYFDTAMSRPGRGEPRFISVGYVDDTQFVRFDSDAASPREEPRAPWIEQEGPEYWDRNTQIFKTNTQTDRESLRNLRGYYNQSEAGSHTLQSMYGCDVGPDGRLLRGHNQYAYDGKDYIALNEDLRSWTAADTAAQITQRKWEAARVAEQDRAYLEGTCVEWLRRYLENGKDTLERADPPKTHVTHHPISDHEATLRCWALGFYPAEITLTWQRDGEDQTQDTELVETRPAGDRTFQKWAAVVVPSGEEQRYTCHVQHEGLPKPLTLRWEPSSQSTVPIVGIVAGLAVLAVVVIGAVVAAVMCRRKSSGGKGGSYSQAACSDSAQGSDVSLTA

SEQ ID NO: 1990 - DNA, 369 bp, Homo sapiens
gcgtgatgtctcacagaaagttctccactcccagacatgggtccctcggcttcctgccttggaagcgcagcagcaggcattgtgggaaggtgaagagcttccctaaggatgacccgtccaagccggtccacctcacagccttcctgggatacaaggctggcatgacccacatcgtgcgggctctggagaagattgaccttaagttcattgacaccccctccaagtttggccatggccacttccagaccatggaggagaagaaagcattcatgggaccactcaagaaagaccgaattgcaaaggaagaaggagcttaatgctgggaacagatattgcaactggtgggatctcaataaaagttattttcca

SEQ ID NO: 1991 - protein, 103 aa, Homo sapiens
MSHRKFSTPRHGSLGFLPWKRSSRHCGKVKSFPKDDPSKPVHLTAFLGYKAGMTHIVRALEKIDLKFIDTPSKFGHGHFQTMEEKKAFMGPLKKDRIAKEEGA

SEQ ID NO: 1992 - DNA, 1556 bp, Homo sapiens
attctccccagaggccgagatgcgggtcatggcgccccgagccctcctcctgctgctctcgggaggcctggccctgaccgagacctgggcctgctcccactccatgaggtatttcgacaccgccgtgtcccggcccggccgcggagagccccgcttcatctcagtgggctacgtggacgacacgcagttcgtgcggttcgacagcgacgccgcgagtccgagaggggagccgcgggcgccgtgggtggagcaggaggggccggagtattgggaccgggagacacagaactacaagcgccaggcacaggctgaccgagtgagcctgcggaacctgcgcggctactacaaccagagcgaggacgggtctcacaccctccagaggatgtatggctgcgacctggggcccgacgggcgcctcctccgcgggtatgaccagtccgcctacgacggcaaggattacatcgccctgaacgaggacctgcgctcctggaccgccgcggacaccgcggctcagatcacccagcgcaagttggaggcggcccgtgcggcggagcagctgagagcctacctggagggcacgtgcgtggagtggctccgcagatacctggagaacgggaaggagacgctgcagcgcgcagaacccccaaagacacacgtgacccaccaccccctctctgaccatgaggccaccctgaggtgctgggccctgggcttctaccctgcggagatcacactgacctggcagcgggatggggaggaccagacccaggacaccgagcttgtggagaccaggccagcaggagatggaaccttccagaagtgggcagctgtggtggtgccttctggacaagagcagagatacacgtgccatatgcagcacgaggggctgcaagagcccctcaccctgagctgggagccatcttcccagcccaccatccccatcatgggcatcgttgctggcctggctgtcctggttgtcctagctgtccttggagctgtggtcaccgctatgatgtgtaggaggaagagctcagggcattttcttcccacaggtggaaaaggagggagctgctctcaggctgcgtgcagcaacagtgcccagggctctgatgagtctctcatcacttgtaaagcctgagacagctgcctgtgtgggactgagatgcaggatttcttcacacctctcctttgtgacttcaagagcctctggcatctctttctgcaaaggcgtctgaatgtgtctgcgttcctgttagcataatgtgaggaggtggagagacagcccacccccgtgtccaccgtgacccctgtccccacactgacctgtgttccctccccgatcatctttcctgttccagagaggtggggctggatgtctccatctctgtctcaaattcatggtgcactgagctgcaacttcttacttccctaatgaagttaagaacctgaatataaatttgtgttctcaaatatttgctatgaagcgttgatggattaattaaataagtcaattcctagaagttgagagagcaaataaagacctgagaaccttccag

SEQ ID NO: 1993 - protein, 372 aa, Homo sapiens
MRVMAPRALLLLLSGGLALTETWACSHSMRYFDTAVSRPGRGEPRFISVGYVDDTQFVRFDSDAASPRGEPRAPWVEQEGPEYWDRETQNYKRQAQADRVSLRNLRGYYNQSEDGSHTLQRMYGCDLGPDGRLLRGYDQSAYDGKDYIALNEDLRSWTAADTAAQITQRKLEAARAAEQLRAYLEGTCVEWLRRYLENGKETLQRAEPPKTHVTHHPLSDHEATLRCWALGFYPAEITLTWQRDGEDQTQDTELVETRPAGDGTFQKWAAVVVPSGQEQRYTCHMQHEGLQEPLTLSWEPSSQPTIPIMGIVAGLAVLVVLAVLGAVVTAMMCRRKSSGHFLPTGGKGGSCSQAACSNSAQGSDESLITCKA

SEQ ID NO: 1994 - DNA, 2824 bp, Homo sapiens
ggaaaggtgtacgcaggcgcagtggcgtctaaatttgggcccactaaatgcgtcggagcatctccgcgcccaggcggctcctcctcactgcggcaacccgggaaaacttgtgaactaatcagaaaaagtggaaggcgggagatcttggggcgctgtccaatggcgcggaagagaacaaatgagctggccaatcgggaacggcacgggggcgggctcgctcggcgcgaagttcgggcccgggaattccgaaggaggggtaggcgctgcccgcgcgcagaggccgcgcccctcctggccccggcttcttggctgtcaaacagatgcagcaacgtcggctcctgccgaggagcccaaggggtcccgggatccgccgcacaggctggcactgcttgaagaggaggctactcggagactgcgccgcgcgggtagatccgaaacggggctggggcggagtgggaaaaggccgggtatgccttgcatgatcgcggggagctccttcctgtttttatcccacctagagaagccgggaagtaggggtttaggtccaatttgttggagtacttaaggactcgtttgcactttcttttgggggatgacagtggattcattgccctcggaggttcaaccagttatgagtgagggattggccagaagatcggggcgcaggcaagcaggagtgctctattaggataagcaagtttgacaggaagaagctgctcttctccgaattacacagaggtgatgtgttcgtattgcacgtagacgtgtgtataacaggacctccttccccgcgccccgccaccccgacacacacaggagctgcctaaagtatccttgccttgcagattggaggctccccaaatattttgtgatctgaggatccagctcaagtgaggtgccataggacgtgttcctgagtttgcattgcacggagaccttcctggaatttttcatttgcaagtcggcttaaccaattttgcattgagtcctaggctgcttgcactctgaatttgggctattcaggtagtgtgctcaaagttgaaaccgcatacagcacaactcaagtttgcatcagactgggaagcgaacttaagccagcggtgcgtggcccaggagtgggaaaggaaatggatgcctgaagtggaagaggtggtgcagagggggcaccgcccatgctgccctgcttccaactgctgcgcatagggggcggcaggggcggtgatctctacaccttccacccccccgccggggctggctgcacctatcgcttgggccacagggccgacctgtgtgatgtggccctgcggccccagcaggagcctggcctcatctctgggatccacgccgaactgcatgccgagccccggggtgatgactggagggtcagcctggaagaccacagcagccaaggtgagcattaagcagggcagctttgcccctgggtggttgaagcgccaggctggaatgagtaaggtctccacaagaccctgctgcctgcctcccatactcccatcagattggatggatagtcgtggtccagaccttcatcttcccaccagaagtgtgcacagtcagaagctctctgccagactgaccctttttggtcccgtttagctcatacaggacctgggatatcatcagaaagatatcacagtggggatgttctgaggccactagaggccaagtttagacttgattcagtttccagctttgctgaggcactctgttcctgggttagggcagttctatgttgaataatgtttttaataatctgggcatgtctttctccgtgacttgaggcagttagcctcagaaagcctagattcacatttgagttttgccactgcctcttggtaaagtcagctgtaggagtgttatggttattagactatagtagccaacattcatctagtgcttactgttatgagccaggccctattttaagtgtattgaatgtaggtggtactaatattatcctcatttacagtaaaggaaaatgaggcacaaagaggttaaggaacttgtccagggctgggcatggtggtttacacctataatccagcactttgggaggctaaggcagggtggatcacttgagctcaggagttcgagaccagcctgggcaacatggtgaaaacctgtctctaccaaaaaattaattaattttttaaaaaaagcctgggcgcggtggctcacgcctgtaatcccagcactttgggaggccgagatgggcagatcacgaggtcaggagttcgagaccatcctgaccaacatgttgaaaccccatctgtgctgaaaaaaaaatacaaaaattagccaggtgtggtggcgtgcacctgtaaccccagctactcaggaggctgaagcagcagaatcacttgaacccgggaggcggaggttgcagtgagctgagatcgcaccactgcactccagcttgggcgacagagcgagactccatctcaaacaaacaaacaaaccaaaagcttgcccagggtcacataactggtaagtggtagagctaggatctgaacgagctggagctgggggagagtgagcatgtttgaaaactggaccttagggcggggcacggtggctcacgcctgtaatcccagcactttgggaggctgaggcgggcagatcaggaggtcaggagtatgagaccagcctggccaacatggtaaaaccctgtctctgctaaaaataaaaaaattagccagacgtggtggcacatgcctgtaatcccagctactcaggaggctgaggcaggagaattgcttgaacctgggaggcggttcaagcttgggcaatagagcaaaactccatc

SEQ ID NO: 1995 - DNA, 3531 bp, Homo sapiens
ttggtggattcctcagtccctgccgccgcggggcgccctgggatagcggcggggcctcctgaacagatctcggcccctttccaaacactcctgatgcctcatttgcctctcgcttcttttcgaccaccattttgggggctgaggcactcacggggcctccccaggtttcactccgtttctacacagtcggagccccatggatctcccatctcccggaggaaccgtgaagccaaacagaagcgcctgcgagagaagcaggctactctggaggctgagatagcaggggagagcaagtcacctgcagaatccattaaggcctggaggcctaaggagttagtattgtatgaaatccctacgaaacccggtgaaaagaaagatgtctctgggcccctgcctcctgcatacagcccccgatatgttgaggctgcctggtacccgtggtgggtacgagagggcttcttcaaaccagaatatcaggcccggctgccccaagctacaggggagaccttttccatgtgtatcccacctcccaatgtcactggctccctgcacattggccacgcactcacggtggccatacaggatgccctcgtgcgctggcaccggatgcgtggggatcaagtgctgtgggtccctggttcagatcatgcaggaattgctacacaagctgtggtggagaaacaactgtggaaggaacggggagtgaggagacatgagctgagccgggaggccttccttagggaggtgtggcagtggaaggaggcgaaaggtggagagatctgtgagcagctgcgagctctgggtgcctccctggactgggatcgagagtgttttaccatggatgttggctcctcagtggctgtgactgaagcttttgtgcggctctacaaggcggggttgctgtaccggaaccatcagcttgtcaactggtcatgtgctttaagatcagccatctcggacattgaggtggagaaccggcccctgcctggccacacacagcttcgactgcctggctgccccacccccgtgtcttttggcctcctattttctgttgccttccccgtggatggagagcctgatgcagaggttgtggtaggaaccacaaggccagagacgctgcctggagatgtggctgtggccgttcatccagacgactcgcgatacacacatctacacgggcgacagcttcgtcaccccttgatggggcagcctcttcccctcatcacagactatgctgttcagccacatgtgggcacgggggcagtgaaggtgactccagctcacagtcctgccgatgctgagatgggggcccgacatggcttgagccccttgaatgtcattgcggaggatgggaccatgacctccctctgcggggactggctgcagggtcttcaccggtttgtggcccgggaaaagataatgtctgtgctgagtgaatggggcctgttccggggcctccagaaccaccccatggtactgcccatctgcagccgttctggggatgtgatagaatacctgctgaagaaccagtggtttgtccgctgccaggaaatgggggcccgagctgccaaggctgtggagtcgggggccctggagctcagtccctccttccaccagaagaactggcagcactggttttcccatattggggactggtgtgtctcccggcagctgtggtggggccatcagattccagcctacctggttgtagaggaccatgcgcagggagaagaggactgttgggtggttgggcggtcagaggctgaggccagagaggtagcagcggaactgacagggaggccaggggcagagctgaccctggagagggatcctgatgtcctagacacatggttttcttctgccctgttccccttttctgccctgggctggccccaagagaccccagaccttgctcgtttctaccccctgtcacttttggaaacgggcagcgaccttctgctgttctgggtgggccgcatggtcatgttggggacccagctcacagggcagctgcccttcagcaaggtgcttcttcatcccatggttcgggacaggcagggccggaagatgagcaagtccctggggaatgtgctggacccaagagacatcatcagtggggtggagatgcaggtgctgcaggaaaagctgagaagcggaaatttggaccctgcagagctggccattgtggctgcagcacagaaaaaggactttcctcacgggatccctgagtgtgggacagatgccctgagattcacactctgctcccatggagttcaggcgggcgacttgcacctgtcagtctctgaggtccagagctgccgacatttctgcaacaagatctggaatgctcttcgctttatcctcaatgctttaggggagaaatttgtgccacagcctgctgaggagctgtctccctcctccccgatggatgcctggatcctgagccgccttgccctggctgcccaggagtgtgagcggggcttcctcacccgagagctctcgctcgtcactcatgccctgcaccacttctggcttcacaacctctgtgacgtctacctggaggctgtgaagcccgtgctgtggcactcgccccgccccctggggccccctcaggtcctgttctcctgcgctgacctcggcctccgcctcctggccccactgatgcccttcctggctgaagagctctggcagaggctgccccccaggcctggttgcccccctgcccccagcatctcggttgccccctaccccagcgcctgcagcttggagcactggcgccagccagagctggagcggcgcttctcccgggtccaagaggtcgtgcaggtgctaagggctctccgagccacgtaccagctcaccaaagcccggccccgagtgctgctgcagagctcagagcctggggaccagggcctcttcgaggccttcttggagcccctgggcaccctgggctactgtggggctgtgggcctgttacccccaggcgcagcagctccctccggctgggcccaggctccactcagtgacacggctcaagtctacatggagctgcagggcctggtggacccgcagatccagctacctctgttagccgcccgaaggtacaagttgcagaagcagcttgacagcctcacagccaggaccccatcagaaggggaggcagggactcagaggcaacaaaagctttcttccctccagctggaattgtcaaaactggacaaggcagcctctcacctccggcagctgatggatgagcctccagccccagggagcccggagctctaactcatcatccccatcagttttcctccctctcagacctgtctttgaggacaaacagatttgtcagctgtcagggtgcagtgggacgtcagagactatgtggtccatcgccttcattgtgtaaatgaggacacagactggcttggtcgcagtgactgtggtgtccttgagatgctcacattactgcccggcctgcctcccacctggaagtctgggaatgaggagattgagataaacttttgaaatccc

SEQ ID NO: 1996 - protein, 694 aa, Homo sapiens
MGQPLPLITDYAVQPHVGTGAVKVTPAHSPADAEMGARHGLSPLNVIAEDGTMTSLCGDWLQGLHRFVAREKIMSVLSEWGLFRGLQNHPMVLPICSRSGDVIEYLLKNQWFVRCQEMGARAAKAVESGALELSPSFHQKNWQHWFSHIGDWCVSRQLWWGHQIPAYLVVEDHAQGEEDCWVVGRSEAEAREVAAELTGRPGAELTLERDPDVLDTWFSSALFPFSALGWPQETPDLARFYPLSLLETGSDLLLFWVGRMVMLGTQLTGQLPFSKVLLHPMVRDRQGRKMSKSLGNVLDPRDIISGVEMQVLQEKLRSGNLDPAELAIVAAAQKKDFPHGIPECGTDALRFTLCSHGVQAGDLHLSVSEVQSCRHFCNKIWNALRFILNALGEKFVPQPAEELSPSSPMDAWILSRLALAAQECERGFLTRELSLVTHALHHFWLHNLCDVYLEAVKPVLWHSPRPLGPPQVLFSCADLGLRLLAPLMPFLAEELWQRLPPRPGCPPAPSISVAPYPSACSLEHWRQPELERRFSRVQEVVQVLRALRATYQLTKARPRVLLQSSEPGDQGLFEAFLEPLGTLGYCGAVGLLPPGAAAPSGWAQAPLSDTAQVYMELQGLVDPQIQLPLLAARRYKLQKQLDSLTARTPSEGEAGTQRQQKLSSLQLELSKLDKAASHLRQLMDEPPAPGSPEL

SEQ ID NO: 1997 - DNA, 1634 bp, Homo sapiens
tcccatcttttcctcgcattttttcaccatctttccctcaatctccaggagccaatgcgagacttttggctccgattaagcgacggcccgagacttggggtgcgcgaggaggatcgacagagtggtgatggagagcaccccttcaaggggactgaaccgagtacacctacaatgcaggaatctgcaggaattcttagggggcctgagccctggggtattggaccgattgtatgggcaccctgccacatgtctggctgtcttcagggagctcccatccttggctaagaactgggtgatgcggatgctctttctggagcagcctttgccacaggctgctgtagctctgtgggtaaagaaggaattcagcaaggctcaggaggaaagtacagggctgctgagcggcctccggatctggcacacccagctgctcccaggcgggctccagggcctcatcctcaaccccattttccgccagaacctccgcattgcccttctgggtggggggaaggcctggtctgatgacacaagtcagctgggaccagacaagcatgcccgggacgttccctcccttgacaagtacgccgaggagcgatgggaggtggtcttgcacttcatggtgggctcccccagtgcagctgtcagccaggacttggctcagctcctcagccaggctgggctcatgaagagtactgaacctggagagccgccctgcattacttccgctggcttccagttcctgttgctggacaccccggctcagctctggtactttatgttgcagtatttgcagacagcccagagccggggcatggacctggtagagattctctccttcctcttccagctcagcttctctactctgggcaaggattactctgtggaaggtatgagtgattctctgttgaacttcctgcaacatctgcgtgagtttgggcttgttttccagaggaagaggaaatctcggcgttactaccccacacgcctggccatcaatctctcatcaggtgtctctggagctgggggcactgtgcatcagccaggtttcattgtcgtggaaaccaattaccgactgtatgcctacacggagtcggagctgcagattgccctcattgccctcttctctgagatgctctatcggttccccaacatggtggtggcgcaggtgacccgggagagtgtgcagcaggcaatcgccagtggcatcacagcccagcagataatccatttcctaaggacaagagcccacccagtgatgctcaaacagacacctgtgctgccccccaccatcaccgaccagatccggctctgggagctggaaagggacagactccggttcactgagggtgtcctgtataaccagttcctgtcgcaagtggactttgagctgctgctggcccacgcgcgggagctgggcgtgctcgtgttcgagaactcggccaagcggctcatggtggtgaccccggccgggcacagcgacgtcaagcgcttttggaagcggcagaaacatagctcctgagagcgcgggacttggacacggacctcggcgggcgggactgggcggggcggggcatcagaactcaggtgttttttatttacgcgtcagggcttttcttgtttaataagttatgatagct

SEQ ID NO: 1998 - protein, 462 aa, Homo sapiens
MESTPSRGLNRVHLQCRNLQEFLGGLSPGVLDRLYGHPATCLAVFRELPSLAKNWVMRMLFLEQPLPQAAVALWVKKEFSKAQEESTGLLSGLRIWHTQLLPGGLQGLILNPIFRQNLRIALLGGGKAWSDDTSQLGPDKHARDVPSLDKYAEERWEVVLHFMVGSPSAAVSQDLAQLLSQAGLMKSTEPGEPPCITSAGFQFLLLDTPAQLWYFMLQYLQTAQSRGMDLVEILSFLFQLSFSTLGKDYSVEGMSDSLLNFLQHLREFGLVFQRKRKSRRYYPTRLAINLSSGVSGAGGTVHQPGFIVVETNYRLYAYTESELQIALIALFSEMLYRFPNMVVAQVTRESVQQAIASGITAQQIIHFLRTRAHPVMLKQTPVLPPTITDQIRLWELERDRLRFTEGVLYNQFLSQVDFELLLAHARELGVLVFENSAKRLMVVTPAGHSDVKRFWKRQKHSS

SEQ ID NO: 1999 - DNA, 3937 bp, Homo sapiens
ttaggaagttatttaactgatctctgccctagtttcttcatgtgttaaatatggatagtaatagtatctaccttatgaagtgactgtgaagataaaattatggattctgtttaagggtttaggccagtgtctggcacaggggaagcattctaaaaatatagctgatgctgttaaacaatgactgttgttgttgttttactgttattatccccaaagcggcccattctgtctgttgctgtcagctatgactcagtcccctgattaacttacgcaccacccattttatcccctgcagagatgctgcccccacccccttaggcccgagggatcaggagctatgggaccagaggccctgtcatctttactgctgctgctcttggtggcaagtggagatgctgacatgaagggacattttgatcctgccaagtgccgctatgccctgggcatgcaggaccggaccatcccagacagtgacatctctgcttccagctcctggtcagattccactgccgcccgccacagcaggttggagagcagtgacggggatggggcctggtgccccgcagggtcggtgtttcccaaggaggaggagtacttgcaggtggatctacaacgactgcacctggtggctctggtgggcacccagggacggcatgccgggggcctgggcaaggagttctcccggagctaccggctgcgttactcccgggatggtcgccgctggatgggctggaaggaccgctggggtcaggaggtgatctcaggcaatgaggaccctgagggagtggtgctgaaggaccttgggccccccatggttgcccgactggttcgcttctacccccgggctgaccgggtcatgagcgtctgtctgcgggtagagctctatggctgcctctggagggatggactcctgtcttacaccgcccctgtggggcagacaatgtatttatctgaggccgtgtacctcaacgactccacctatgacggacataccgtgggcggactgcagtatgggggtctgggccagctggcagatggtgtggtggggctggatgactttaggaagagtcaggagctgcgggtctggccaggctatgactatgtgggatggagcaaccacagcttctccagtggctatgtggagatggagtttgagtttgaccggctgagggccttccaggctatgcaggtccactgtaacaacatgcacacgctgggagcccgtctgcctggcggggtggaatgtcgcttccggcgtggccctgccatggcctgggagggggagcccatgcgccacaacctagggggcaacctgggggaccccagagcccgggctgtctcagtgccccttggcggccgtgtggctcgctttctgcagtgccgcttcctctttgcggggccctggttactcttcagcgaaatctccttcatctctgatgtggtgaacaattcctctccggcactgggaggcaccttcccgccagccccctggtggccgcctggcccacctcccaccaacttcagcagcttggagctggagcccagaggccagcagcccgtggccaaggccgaggggagcccgaccgccatcctcatcggctgcctggtggccatcatcctgctcctgctgctcatcattgccctcatgctctggcggctgcactggcgcaggctcctcagcaaggctgaacggagggtgttggaagaggagctgacggttcacctctctgtccctggggacactatcctcatcaacaaccgcccaggtcctagagagccacccccgtaccaggagccccggcctcgtgggaatccgccccactccgctccctgtgtccccaatggctctgcgttgctgctctccaatccagcctaccgcctccttctggccacttacgcccgtccccctcgaggcccgggcccccccacacccgcctgggccaaacccaccaacacccaggcctacagtggggactatatggagcctgagaagccaggcgccccgcttctgcccccacctccccagaacagcgtcccccattatgccgaggctgacattgttaccctgcagggcgtcaccgggggcaacacctatgctgtgcctgcactgcccccaggggcagtcggggatgggccccccagagtggatttccctcgatctcgactccgcttcaaggagaagcttggcgagggccagtttggggaggtgcacctgtgtgaggtcgacagccctcaagatctggttagtcttgatttcccccttaatgtgcgtaagggacaccctttgctggtagctgtcaagatcttacggccagatgccaccaagaatgccaggaatgatttcctgaaagaggtgaagatcatgtcgaggctcaaggacccaaacatcattcggctgctgggcgtgtgtgtgcaggacgaccccctctgcatgattactgactacatggagaacggcgacctcaaccagttcctcagtgcccaccagctggaggacaaggcagccgagggggcccctggggacgggcaggctgcgcaggggcccaccatcagctacccaatgctgctgcatgtggcagcccagatcgcctccggcatgcgctatctggccacactcaactttgtacatcgggacctggccacgcggaactgcctagttggggaaaatttcaccatcaaaatcgcagactttggcatgagccggaacctctatgctggggactattaccgtgtgcagggccgggcagtgctgcccatccgctggatggcctgggagtgcatcctcatggggaagttcacgactgcgagtgacgtgtgggcctttggtgtgaccctgtgggaggtgctgatgctctgtagggcccagccctttgggcagctcaccgacgagcaggtcatcgagaacgcgggggagttcttccgggaccagggccggcaggtgtacctgtcccggccgcctgcctgcccgcagggcctatatgagctgatgcttcggtgctggagccgggagtctgagcagcgaccacccttttcccagctgcatcggttcctggcagaggatgcactcaacacggtgtgaatcacacatccagctgcccctccctcagggagcgatccaggggaagccagtgacactaaaacaagaggacacaatggcacctctgcccttcccctcccgacagcccatcacctctaatagaggcagtgagactgcaggtgggctgggcccacccagggagctgatgccccttctccccttcctggacacactctcatgtccccttcctgttcttccttcctagaagcccctgtcgcccacccagctggtcctgtggatgggatcctctccaccctcctctagccatcccttggggaagggtggggagaaatataggatagacactggacatggcccattggagcacctgggccccactggacaacactgattcctggagaggtggctgcgcccccagcttctctctccctgtcacacactggaccccactggctgagaatctgggggtgaggaggacaagaaggagaggaaaatgtttccttgtgcctgctcctgtacttgtcctcagcttgggcttcttcctcctccatcacctgaaacactggacctgggggtagccccgccccagccctcagtcacccccacttcccacttgcagtcttgtagctagaacttctctaagcctatacgtttctgtggagtaaatattgggattggggggaaagagggagcaacggcccatagccttggggttggacatctctagtgtagctgccacattgatttttctataatcacttggggtttgtacatttttggggggagagacacagatttttacactaatatatggacctagcttgaggcaattttaatcccctgcactaggcaggtaataataaaggttgagttttccac

SEQ ID NO: 2000 - DNA, 844 bp, Homo sapiens
cgctgctccagcctctggggcgcattccaaccttccagcctgcgacctgcggagaaaaaaaattacttattttcttgccccatacataccttgaggcgagcaaaaaaattaaattttaaccatgagggaaatcgtgcacatccaggctggtcagtgtggcaaccagatcggtgccaagttctgggaggtgatcagtgatgaacatggcatcgaccccaccgctgtcttccgtggtcggatgtccatgaaggaggtcgatgagcagatgcttaacgtgcagaacaagaacagcagctactttgtggaatggatccccaacaatgtcaagacagccgtctgtgacatcccacctcgtggcctcaagatggcagtcaccttcattggcaatagcacagccatccaggagctcttcaagcgcatctcggagcagttcactgccatgttccgccggaaggccttcctccactggtacacaggcgagggcatggacgagatggagttcaccgaggctgagagcaacatgaacgacctcgtctctgagtatcagcagtaccaggatgccaccgcagaagaggaggaggatttcggtgaggaggccgaagaggaggcctaaggcagagcccccatcacctcaggcttctcagttcccttagccgtcttactcaactgcccctttcctctccctcagaatttgtgtttgctgcctctatcttgttttttgttttttcttctggggggggtctagaacagtgcctggcacatagtaggcgctcaataaatacttgtttgttgaatgtctcctctctctttccactctgggaaacctaggtttctgccattctgg

SEQ ID NO: 2001 - protein, 106 aa, Homo sapiens
MMAACDPRHGRYLTVAAVFHGRISMKEVDEQMLNVQNKNSSYFVEWIPNNVKTAVCDIPPRGLKMAVTFIGNSSAIQELFKRILEQFTAMFGRKAFLHWYTGEGMD

SEQ ID NO: 2002 - DNA, 1400 bp, Homo sapiens
atggcccctgcactgctcctgatccctgctgccctcgcctctttcatcctggcctttggcaccggagtggagttcgtgcgctttacctcccttcggccacttcttggagggatcccggagtctggtggtccggatgcccgccagggatggctggctgccctgcaggaccgcagcatccttgcccccctggcatgggatctggggctcctgcttctatttgttgggcagcacagcctcatggcagctgaaagagtgaaggcatggacatcccggtactttggggtccttcagaggtcactgtatgtggcctgcactgccctggccttgcagctggtgatgcggtactgggagcccatacccaaaggccctgtgttgtgggaggctcgggctgagccatgggccacctgggtgcccctcctctgctttgtgctccatgtcatctcctggctcctcatctttagcatccttctcgtctttgactatgctgagctcatgggcctcaaacaggtatactaccatgtgctggggctgggcgagcctctggccctgaagtctccccgggctctcagactcttctcccacctgcgccacccagtgtgtgtggagctgctgacagtgctgtgggtggtgcctaccctgggcacggaccgtctcctccttgctttcctccttaccctctacctgggcctggctcacgggcttgatcagcaagacctccgctacctccgggcccagctacaaagaaaactccacctgctctctcggccccaggatggggaggcagagtgaggagctcactctggttacaagccctgttcttcctctcccgctgaattctaaatccttaacatccaggccctggctgcttcatgccagaggcccaaatccatggactgaaggagatgccccttctactacttgagactttattctctgggtccagctccataccctaaattctgagtttcagccactgaactccaaggtccacttctcaccagcaaggaagagtggggtatggaagtcatctgtcccttcactgtttagagcatgacactctccccctcaacagcctcctgagaaggaaaggatctgccctgaccactcccctggcactgttacttgcctctgcgcctcaggggtccccttctgcaccgctggcttccactccaagaaggtggaccagggtctgcaagttcaacggtcatagctgtccctccaggccccaaccttgcctcaccactcccggccctagtctctgcacctccttaggccctgcctctgggctcagaccccaacctagtcaaggggattctcctgctcttaactcgatgacttggggctccctgctctcccgaggaagatgctctgcaggaaaataaaagtcagcctttttctac

SEQ ID NO: 2003 - protein, 262 aa, Homo sapiens
MAPALLLIPAALASFILAFGTGVEFVRFTSLRPLLGGIPESGGPDARQGWLAALQDRSILAPLAWDLGLLLLFVGQHSLMAAERVKAWTSRYFGVLQRSLYVACTALALQLVMRYWEPIPKGPVLWEARAEPWATWVPLLCFVLHVISWLLIFSILLVFDYAELMGLKQVYYHVLGLGEPLALKSPRALRLFSHLRHPVCVELLTVLWVVPTLGTDRLLLAFLLTLYLGLAHGLDQQDLRYLRAQLQRKLHLLSRPQDGEAE

SEQ ID NO: 2004 - DNA, 4015 bp, Homo sapiens
agacaaagcggtcgccgcccccgcccggccccctggtctctgtctccgtccctcctcctttgctgcctctttccctcctcctctccctccctcctcccctccctccagtctccggatctccctcggtccctctctcctcctcttcctctctctggacgcccggctcctccgcaccccctcccccgggggtcccgcggcctgtgagttgactgaggggctcagacttggggagtgggtgtctcctcgcccctgtccttgctcccgtccctggcccggaccttggctgtctcctctttgtgccgagattgtcagtctgtgcggctacagcggggtggagacggccggctctgtcacggcttcatgagagcggggacggggcgcaggacttgcaggcgccggggagaagagacatggagccggcccttggcactctggggtcgcgtggggcagtcggtgggggaggcaggcggtggtgacaggacagggtgggggtggacgccagggttctgggaacgcgctggcagccctgacgcccgggttccgaaagtctcgggggtgggtatttcccccgacccgcctcgggggcggagtgcggggcagaggggtgggggctggggagaggcgtggcccgagcggtgctggaagcggagccgggacctttggggcccgcgctgagacgcgcccggctgctgccgccgccctcctttcccctcttccctggtttcccttctcctctagacctgttcgctctccgcccctccttgcctccccaacaccccctcaggtcccgttgcctcctggtcctttcagggattcctggtccttccttcccacactagcctccctggggtatcgctgaggcagcctggcctgcacccaggttcccctcacccctgccacatttctctcttctccctcacgccaactttccttttcgcccttctctctctttctcacatcctagagacggtctttaatacgcattaaccctgtgctgccacatctggctcctgccctcattgcctccaatccggactcttcctctcacatcacccccaccacccccaacttgggctcacaacttctcttcactttttccatttccccagttctctgccttccgtctttccctctgtcctcatccttagcccctctgccctgctttgtgtcccacctctccccctccacttcctctcctcccaccctcagtctcacccccgggctgtctcactctctggagcctctccttcctgttctctgtccccagtgctccctaccctcacctcaagacgaccatggccaccatcccagactggaagctacagctgctagcccggcgccggcaggaggaggcgtccgttcgaggccgagagaaagcagaacgggagcgcctgtcccagatgccagcctggaaacgagggctcctggagcgccgccgggccaagcttgggctgtcccctggggagcctagccctgtgctagggactgtagaggctggacctccagacccggatgagtctgcggtccttctggaggccatcgggccagtgcaccagaaccgattcatccggcaggagcggcagcagcagcagcagcaacaacaacggagtgaagagctgctagcagagagaaagcctgggcctctggaggcccgggagcggagacccagccctggggagatgcgggatcagagccccaagggaagagagtcaagagaagagagactaagtccgagggagaccagagagaggaggctggggatagggggagcccaagagttgagcctgaggcctctggaggctcgggactggaggcaaagcccaggagaggtgggagacaggagctcccgactgtcagaggcatggaaatggaggctgagtcctggagaaactccagagcggagtctgagactagcagagtctcgagagcaaagccccaggagaaaagaggtggaaagtagactgagcccaggggaatctgcctaccagaagttgggcctgacagaggcccataaatggagacctgactccagagagtctcaggaacagagtttggtacaactggaggcaacagagtggaggctgaggtcaggagaagaaagacaagactactcggaagaatgtgggagaaaagaagagtggccagttccaggggtagctccaaaagagactgcagagctgtccgagaccctgacaagggaggcccaaggcaacagttccgcaggagtggaggcagcagagcagaggcctgtggaagatggcgagaggggcatgaagccaacagaagggtggaaatggaccctgaactccgggaaggctcgagaatggacacccagggacatagaggctcaaactcagaaactagaacctccagagtcagcagagaagcttctggaatctcccggtgtggaggctggagaaggggaggctgagaaggaggaggcgggggctcagggcaggcctctgagagccctgcagaactgctgctctgtgccctcccccctcccaccagaggacgctgggactggaggcctgagacagcaggaagaggaagcagtggagctccagcccccaccaccagcccctctgtctcccccacccccagccccaactgccccccaacctcctggggatcccctcatgagccgcctgttctatggggtgaaggcagggccaggggtgggggccccccgccgcagtggacacaccttcaccgtcaacccccggcggtctgtgccccctgcgaccccagccaccccaacctctccagccacagttgatgctgcagtcccgggggctgggaagaagcggtacccaactgccgaggagatcttggttctggggggctacctccgtctcagccgcagctgccttgccaaggggtcccccgaaagacaccacaaacagcttaagatctccttcagcgagacagccctggagaccacgtaccaatacccctccgagagttcggtactggaggagctgggcccggagcctgaggtccccagtgcccccaaccctccagcagcccaacccgacgacgaagaggatgaggaagagctgctgctgctgcagccagagctccagggcgggctgcgcaccaaggccctgattgtggatgagtcctgccggcggtgaccatcttccaacatagggatatacctccctccttcttataactgaagatcctggagcccggaagattcagggcagacagaccctgataatgagcctggcagggaagggcaaccaacatcttgtaacttgctttccccaccctgtttctgggggcagagccaattgcccaatttctaccctaatccaaagtccctggtgtgggtggggttaaacgtgctggtgcatcctaggtcatccaagagtgagcgccaagtcctgagaaggggcacagaactccctggagggtggagatggagcacctgccccccatggcagggtacactctccccacagccttcctccccaccatcccgtggggactctcgggatttaagcactcgtctctctgggaggcccagaccccactccatttataggcacatctccttcatttcctaggtcactgcccctttgtttacagctcctgcctcctcccttgaccacagcctggtttacaaattccatcagctcccagccccacctgccaaagtcccaggtttacaagccacgcttacttgctgtgtctgcgtggaattctctcctctgtcccctccagtctcctcattggagtgacctgaaggtgtggcttcctccactttttctcagtattactttgccttagttttccccaagagggaaggctggaactcttaactctgtaccccttgatagttatttaattctgtttctcctagtggttcacaattgaactgaattgagatggtgtcgggtggctaaggagacacctcacctctccttccccattgtgccgcctttatcaattgcctgttttgttttgtttgttttttaactttccataataaaatggagttctcttc

SEQ ID NO: 2005 - protein, 613 aa, Homo sapiens [sequence omitted]

SEQ ID NO: 2006 - DNA, 4500 bp, Homo sapiens
aggtttgaattttctcggagaaagacaggccggccacgaggaaaacagaaacaagccgcagcaacatctaagcccttgaaaggatcctgagagaggggggaaagggaaaacagcagccaccagcccaaccacttgtgtcttctgccccttcccacctatcttgcccaccccaccagcccacgctgcttgggacttgaaatctgtggccgaaggaccgtcactacataacttcaaaaataatcaaccaccctcccttcccaaaccacccaaattcactcatccagcgtttacttttttgaatccactcagaacttttttctgcgacccccctccctaaatggagttgggtgggggggaaatgaatactgagttggcctttattttttaaaagactttttgatccaatgaggccccctaaataattgagttttgggtcctggttggttgttttattttttttcctccaaaattttaccccctcccccctgagcccgaggtgctgacgtcgcaaaaaaattggataaaaccaccatcatgggttcgggtcccatagaccccaaagaacttctcaagggcctggacagcttccttaaccgagatggggaagtcaaaagtgtggatgggatttccaagatcttcagtttgatgaaggaagcacgaaagatggtgagtcgatgcacttacttgaacattctcctgcagacccgttcaccagaaatattggtcaaatttattgacgttggcggctacaaacttcttaacaattggctgacgtattcaaagacaaccaacaacattcccctcctccagcaaattctactgaccctgcagcatctaccgctcactgtagaccatctcaagcagaacaacacagctaaactggtgaagcagctgagcaagtcaagtgaggatgaagagctccggaaattggcctcagtccttgtcagcgactggatggctgtcatccgctctcagagcagtacccagcctgctgagaaagataagaagaaacgtaaagatgaaggaaaaagtcgaactacccttcctgagcgacctttgacagaggtgaaggctgagacccgggctgaggaggccccagagaagaagagggagaagcccaagtctcttcgcaccacagcacccagtcatgccaagttccgttccactggactagagctggagacaccatccttggtgcctgtgaagaagaatgccagcacagtggtggtttctgacaagtacaaccttaaacccatccccctcaaacgtcagagcaacgtagctgctccaggagatgccactccccctgcagagaagaaatacaagccactcaacacaacacctaatgccaccaaagagatcaaagtgaagatcatcccgccacagcctatggagggcctgggctttctggatgctcttaattcagcccctgttccaggcatcaaaattaagaagaaaaaaaaagtactgtcacctacggctgccaagccaagcccctttgaagggaaaacgagcacagaaccaagcacagccaaaccttcttccccagaaccagcaccaccttctgaggcaatggacgcagaccgtccaggcaccccggttccccctgttgaagtcccggagctcatggatacagcctctttggagccaggagctctggatgccaagccagtggagagtcctggagatcctaaccaactgacccggaaaggcaggaagaggaaaagtgtgacatggcctgaggaaggcaaactgagagaatatttctattttgaattggatgaaactgaacgagtaaatgtgaataagatcaaggactttggtgaggccgctaagcgagagatactgtcagaccgacatgcatttgagacagcgcggcgtctgagccatgataacatggaggagaaggtgccctgggtgtgcccccggcccctggttctgccctcacctcttgtcacccctggaagcaatagtcaggagcgatatatccaggctgagcgggagaagggaatccttcaggagctcttcctgaacaaggagagtcctcatgagcctgatcctgagccctacgagcccataccccctaaactcatccccctagatgaggagtgttccatggatgagactccgtatgttgagactctggaacctggggggtcaggtggctcacctgatggggcaggaggctccaagttgcctccagttctggccaatcttatgggaagcatgggtgctggaaagggcccccaaggccctggaggaggaggcattaatgtccaagagatcctcacctccatcatgggtagcccaaacagtcatccttcagaggaactactgaaacaaccagactattcggacaagatcaagcagatgctggtgccacatggactcctaggccctggcccaatagccaatggtttcccaccagggggtcctgggggccccaagggcatgcagcactttccccctggacctgggggacctatgccaggtccccatggaggccctggtgggccagtgggtccacgtcttctgggtcctccaccccctccccggggaggtgatcccttctgggatggcccgggcgaccctatgcggggtggcccaatgcgggggggtccaggaccaggtcctggaccataccatagaggccgaggtggccgaggaggaaacgaacctcctcctcctcctcctccattccgaggcgccagaggaggtcgctctggaggaggacccccaaatggacgagggggccctggtgggggcatggttggaggtggtgggcatcgtcctcacgaaggccctggtgggggcatgggcaacagcagtggacatcgtccccacgaaggccctggcggtggcatgggaagtgggcatcgcccccatgaaggccctggtggtagcatgggtgggggtggaggacatcgtccccacgaaggccctggcggtggcatcagtggtggcagtggccatcgtccccatgaaggccctggcggaggaatgggtgccggtggtggacatcgcccccacgaaggccctggcggaagcatgggtggaagtggtggacatcgtccccatgaaggccctggacacggggggccccatggccaccggcctcatgatgtccctggtcaccgaggccatgaccatcgagggccgccacctcatgagcaccgtggccatgatggtcctggccacgggggagggggccaccgagggcacgatggaggccacagccatggaggagacatgtcaaaccgccctgtctgccgacatttcatgatgaagggcaactgccgctatgagaacaactgtgccttctaccacccgggtgtcaatgggccccccctgccctagggaccatttgcctgccctgttcacacaacccctgtggactgcagcctcgctctttccaccctgttatggcttctgtgaggcccattttcccttttccccagctgatgaggagccggccccctcagttcccacttgcttgggttcctgggggttttctgatcactggtgcgcattgatgtacatattttcctccagtctggggaggagagagactggaaacgttcctggactgctgaagaggagacccagttggcttcactttttgagaagattcgccctgtaccccaaacccctttccagtattacccttaatgcttgagaacctaaagctggttatcctggcgaacacccctacccttctattgcgggtccccacatgcacacagaactctgacacaggatcagctgcacttaagaaatcatcccaactaagttcattattcctcatggggtggggagatgctgaaaggggtattgtatatcccactgcactgagagggctcaatcagctggatttgagttctggaacacacatcatccccacccctcccccagcgtgggctcaccattcttagtcctttctcaagtgggaccttcaactttctgtgaacacccagtctgcgtcctgggtctgctaggttcgatgatggcgaactcgtatctgcatccggtgcaagttttagctggcagaggtgagaccggtggtgctggtctgcctttgccaactatagccagtctggagacttgataaaatacttcagtgagaccagcttctcatcaacttgggcccggcgtgctgggcctgaaagtcacactacatgcactgcctttgggagtcagctcactccctgctcccacctggaaccttgccagcgtgaaggaggcttccaggtacttcaccctgtcaaccacctctgaatccccaccaggcgccttcctgggtggattcaacaagatgattttgccctttcccagttctctccttcactttggcatcagttgttttctatgaaaacagtggattggttgggttttgtgcagggtcttgggttagagccaaaatggatttgaggatgagtatttttttttttggttttgtatattttgtacattaataataaacagtggaaagagaagcagctt

SEQ ID NO: 2007 - DNA, 2261 bp, Homo sapiens
aacccaagcgggacaaggacttttggggggaggtcaaagggcacgaagttgtgcctacagctgttaccatagtaaccgaggaccggatgtggcgatcttggcggtgcgacagtcctcttctcaggccctctggcccgagagcctgttgactctgtgacacactctgaggagctggttgtggtgttttccagcgagggaagaaaagagtaattttttcaaagcatttatagaaacgcagcaaagggaaggtgtgaggttgccgccatgcctggcagaacggagggaggcagttggctccggaatgcggccgccgcagatgttctccgcaaccttccggaagtggaatggcgggagcctcagcattgctgcccaccgaccccccggaagcggaaacagaatccccgcgtgccccttcctcactaccctccaaatcccgctgcagccattgccgcagacacgatgccgaaacgaaagaagcagaatcatcaccagccaccgacacagcagcagcccccgctgcccgagcgggaagagactggagatgaggaggatgggagtcccatcggaccacccagccttctgggccctccccccatggccaatggaaaacctggcgaccctaagtcagctcttcacagaggtcctccaggatcaaggggaccactgattccaccactgctgagtctcccacctcctccttggggtagaggcccaattcggagagggcttggccccaggtctagcccatatggtcgtggttggtggggagtcaatgcagaacctccttttccggggccaggccatgggggtcccaccaggggaagctttcacaaggaacagagaaaccctcgaaggctcaaaagctggtctcttatcaagaatacctgcccgcccaaggatgacccccaggttatggaagacaaatccgaccgccctgtctgccgacattttgccaaaaagggccactgtcgatatgaggacctctgtgccttctaccatccaggcgtcaatggacctcctctgtgagactgtgccttcccatccaggctggaaggagctctctgtgacctagcggccatttatttctctgtagccctatgatggctactgtgaggctcttctaacaccctcagtcagtgacacacccatcccatccaccacttcccccgtgtggggtccagagtggtgttgcatcactggtgcgcggcatacgcgctttcttctgatccagcctgtagagactcgcctttgggacccatctttgcttcctttcagttgcctcctggatcttctttcccgtcatcaaatgactgctgaacaggaaacctctttggtgctgtttcttgtgcatctgtccacctgttccccagtattgccctcaattcctgagagccctggagcggtttcctaccattcccttcttttagctgcttgttttaagtcctttttatgtgacattccctacccccaatgttgtcagctgcttgtgaaactcagccaggttgtctaacctggggtcaagtttgggtgactggtgcagagttacttcctaaaaggccactctccctgcctttggatttcatagtttctctgtcagtagcatgatccccaccgctatggtctatctatgatcaccgtgctttgtgaaactgtgcatccccttgtagcctttctcagtgtccgtggcatttttgtgacttcccagcactagaataagttttcctgccaaaatgagtgaggcgcttggtgccctctggactttcccacttcccaacatgggagaattgtgaactttccatcagactgcctccctggccctccccattcttctcctgttggttattctgagtctgacacagacccatgacatgtcttataaagcctccaatggctttatcctacctagatcccttccagcccattttaattagactatgtcattgtgaggccaccagtccattcatttgaattctgtgaatctccaccttgcctatctttgggtagaagctggacagtactgttgccctcttccaatcctcttcccctacatccctggcactggttgttttctgtgaaaacagcagtgaacaggttcagttttgaactggccctgaggaaatgggtcaggagttgtattggcaagagggaggggtgagagctgttggagaactgagaatgaggttttttttttttttttctttttaactttttttatattagtaataaatgcagtggaaaccagcattttatttaaaaaaaaa

SEQ ID NO: 2008 - protein, 253 aa, Homo sapiens
MPGRTEGGSWLRNAAAADVLRNLPEVEWREPQHCCPPTPRKRKQNPRVPLPHYPPNPAAAIAADTMPKRKKQNHHQPPTQQQPPLPEREETGDEEDGSPIGPPSLLGPPPMANGKPGDPKSALHRGPPGSRGPLIPPLLSLPPPPWGRGPIRRGLGPRSSPYGRGWWGVNAEPPFPGPGHGGPTRGSFHKEQRNPRRLKSWSLIKNTCPPKDDPQVMEDKSDRPVCRHFAKKGHCRYEDLCAFYHPGVNGPPL

SEQ ID NO: 2009 - DNA, 2060 bp, Homo sapiens
gggagctcggcggagggcgggccaggtgactggtccgggccatgccgaggaagaagccattcagcgtgaagcagaagaagaagcagttgcaggacaaacgggagcggaagagagggcttcaagatgggctgcgctccagttccaacagccgcagcgggagccgggagcggcgagaggaacagaccgacacctcggacggggagtctgtgacccatcatatccgcaggcttaaccagcagccttctcaggggctgggtccacgaggctacgacccaaatcgataccgactgcattttgagagagacagcagggaggaggtagagaggagaaagagagcagcccgggagcaagttctacagccggtcagtgctgagttgttggagctggacatccgggaggtgtatcagcctggctcagttctggactttcctcgacgtcctccttggagctatgagatgtccaaggagcaactaatgagccaagaggaacggagcttccaagactatcttgggaagattcatggggcttactcctctgagaaactcagctactttgagcacaatctggagacatggaggcagctgtggcgggtgttagagatgtctgacatcgtcctgcttatcactgatatccgacatccagttgtgaatttcccgccagcactttatgagtatgtgactggagaacttggactggccctggtgctggttttgaacaaggtggatctggccccgccagctcttgtggttgcctggaagcattatttccatcaacactatccccagctccacgtcgtccttttcacctcttttcctcgggacccccgcaccccacaggatcctagtagtgtcttgaagaagagtcggaggcgggggagaggatggactcgggccctggggccagagcagttgctgagagcctgtgaagccatcactgtggggaaagtggacttgagcagctggcgggagaagattgctcgggatgtggctggggccacctggggtaatggctctggggaggaggaggaagaggaggatggcccagcagtcctggtggagcagcagactgattcagcaatggagccaactggcccaacccaagagcgctacaaggatggggtggtgaccatcggctgtgtgggtttccctaatgtgggaaagtcctcgctgatcaatgggctggtggggcggaaagtcgtgagtgtctccagaaccccgggccatacccgatactttcagacctactttcttaccccctctgtgaagctctgtgactgcccaggcctcatcttcccatctcttctgcctaggcagttgcaggttctggcagggatctaccctatcgcccagatccaggagccctacactgctgtgggctacctggcctcccgaattcccgtgcaggccctgctccacctgcgccacccagaggctgaggacccctcagcggaacacccctggtgtgcctgggacatctgtgaagcctgggcagagaaacgtggttacaagacagccaaggcggctcggaatgatgtgtacagagcagccaacagtctcttgcggctggcagtggacggccgcctcagcctgtgttttcatcccccaggctacagtgaacagaaaggcacctgggagtcccatccagagaccacggagctggtggttttgcagggcagggtggggccagcaggtgacgaggaggaggaggaagaggaagagctgagcagctcctgtgaggaggagggagaggaggaccgggatgcggatgaggagggagaaggggatgaggagaccccaacctcggctccagggtccagcctggctggccgaaacccttatgccctgctgggtgaggatgagtgctgagttcctcgcccagcgccatcttccctcccagtatctttgcttttggactgacctgggggtatctcccctctgccaccccaattgtgaataaagattgtttgctttgtagccccttccccagatgaactgaggtgagagcggctgttccaggctaacagctgtgggaggcttctctcctcttctcccttctttttt

SEQ ID NO: 2010 - protein, 607 aa, Homo sapiens
MPRKKPFSVKQKKKQLQDKRERKRGLQDGLRSSSNSRSGSRERREEQTDTSDGESVTHHIRRLNQQPSQGLGPRGYDPNRYRLHFERDSREEVERRKRAAREQVLQPVSAELLELDIREVYQPGSVLDFPRRPPWSYEMSKEQLMSQEERSFQDYLGKIHGAYSSEKLSYFEHNLETWRQLWRVLEMSDIVLLITDIRHPVVNFPPALYEYVTGELGLALVLVLNKVDLAPPALVVAWKHYFHQHYPQLHVVLFTSFPRDPRTPQDPSSVLKKSRRRGRGWTRALGPEQLLRACEAITVGKVDLSSWREKIARDVAGATWGNGSGEEEEEEDGPAVLVEQQTDSAMEPTGPTQERYKDGVVTIGCVGFPNVGKSSLINGLVGRKVVSVSRTPGHTRYFQTYFLTPSVKLCDCPGLIFPSLLPRQLQVLAGIYPIAQIQEPYTAVGYLASRIPVQALLHLRHPEAEDPSAEHPWCAWDICEAWAEKRGYKTAKAARNDVYRAANSLLRLAVDGRLSLCFHPPGYSEQKGTWESHPETTELVVLQGRVGPAGDEEEEEEEELSSSCEEEGEEDRDADEEGEGDEETPTSAPGSSLAGRNPYALLGEDEC

SEQ ID NO: 2011 - DNA, 1663 bp, Homo sapiens
gggatcatggtagatggaaccctccttttactcctctcggaggccctggcccttacccagacctgggcgggctcccactccttgaagtatttccacacttccgtgtcccggcccggccgcggggagccccgcttcatctctgtgggctacgtggacgacacccagttcgtgcgcttcgacaacgacgccgcgagtccgaggatggtgccgcgggcgccgtggatggagcaggaggggtcagagtattgggaccgggagacacggagcgccagggacaccgcacagattttccgagtgaacctgcggacgctgcgcggctactacaatcagagcgaggccgggtctcacaccctgcagtggatgcatggctgcgagctggggcccgacaggcgcttcctccgcgggtatgaacagttcgcctacgacggcaaggattatctcaccctgaatgaggacctgcgctcctggaccgcggtggacacggcggctcagatctccgagcaaaagtcaaatgatgcctctgaggcggagcaccagagagcctacctggaagacacatgcgtggagtggctccacaaatacctggagaaggggaaggagacgctgcttcacctggagcccccaaagacacacgtgactcaccaccccatctctgaccatgaggccaccctgaggtgctgggccctgggcttctaccctgcggagatcacactgacctggcagcaggatggggagggccatacccaggacacggagctcgtggagaccaggcctgcaggggatggaaccttccagaagtgggcagctgtggtggtgccttctggagaggagcagagatacacgtgccatgtgcagcatgaggggctacccgagcccgtcaccctgagatggaagccggcttcccagcccaccatccccatcgtgggcatcattgctggcctggttctccttggatctgtggtctctggagctgtggttgctgctgtgatatggaggaagaagagctcaggtggaaaaggagggagctactctaaggctgagtggagcgacagtgcccaggggtctgagtctcacagcttgtaaagcctgagacagctgccttgtgtgcgactgagatgcacagctgccttgtgtgcgactgagatgcaggatttcctcacgcctcccctatgtgtcttaggggactctggcttctctttttgcaagggcctctgaatctgtctgtgtccctgttagcacaatgtgaggaggtagagaaacagtccacctctgtgtctaccatgacccccttcctcacactgacctgtgttccttccctgttctcttttctattaaaaataagaacctgggcagagtgcggcagctcatgcctgtaatcccagcacttagggaggccgaggagggcagatcacgaggtcaggagatcgaaaccatcctggctaacacggtgaaaccccgtctctactaaaaaatacaaaaaattagctgggcgcagaggcacgggcctgtagtcccagctactcaggaggcggaggcaggagaatggcgtcaacccgggaggcggaggttgcagtgagccaggattgtgcgactgcactccagcctgggtgacagggtgaaacgccatctcaaaaaataaaaattaaaaaataaaaaaagaacc

SEQ ID NO: 2012 - protein, 358 aa, Homo sapiens [sequence omitted]

SEQ ID NO: 2013 - DNA, 1050 bp, Homo sapiens
cctgagtcagacgggcatggagacgcttctggaaggaacaccgcaatggctgcgcagggacagccccaggtccagttcaaacttgtattggttggtgatggtggtactggaaaaacgactttcgtgaaacatcatttgactggtgaatttgagaagaagtatgtagccaccttgggtgttgaggttcatcccctagtgttccataccaacagaggacctgttaagttcaatgtatgggacacagccggcctggagaaattcagtggactgagagatggctattatatccaagcccagagtaccatcatagtgtttgatgtaacatcgagagttacttacaagaatgtgcctaactggcatagagatctggtatgagtgtgtgaaaacacccccactgtgttgagtggcaacaaagtggatattaaggacaggaaagtgaaggcgaaatccattgtcttccaccgaaagaagaatcttcagtactacgacatttctgccaaaagtaactataactttgaaaagcccttcctctggcttgctaggaagctcattggagaccctaacttggaatttgttgccatgcctgctctcgccccaccagaagttgtcatggacccagctttggcagcacagtatgagcacgacttagaggttgctcagacaactgctctcccggacgaggatgatgacctgtgagaatgaagctggagcccagcgtcagaagtctagttttataggcagctgtcctgtgatgtcagttgtgcagcgtgtgtgccacctcattattatctagctaagcggaacatgtgcttcatctgtgggatgctgaaggagatgagtgggcttcgcagtgaatgtggcagttcaaaaaataccttcattgtttggacctgcatatttagctgttttggaacacagttgattccttgagtttcaaatatagactgctacagtcacatcacaatattcagcggtgaaatcttgtttgttactgtcattcccattccttttcgtttagaatcagaataaagttgtatttcaaatatctaa

SEQ ID NO: 2014 - protein, 216 aa, Homo sapiens
MAAQGQPQVQFKLVLVGDGGTGKTTFVKHHLTGEFEKKYVATLGVEVHPLVFHTNRGPVKFNVWDTAGLEKFSGLRDGYYIQAQSTIIVFDVTSRVTYKNVPNWHRDLVEVCENTPTVLSGNKVDIKDRKVKAKSIVFHRKKNLQYYDISAKSNYNFEKPFLWLARKLIGDPNLEFVAMPALAPPEVVMDPALAAQYEHDLEVAQTTALPDEDDDL

SEQ ID NO: 2015 - DNA, 680 bp, Homo sapiens
ggagacgcttctggaaggaacaccgcaatggctgcgcagggacagccccaggtccagttcaaacttgtattggttggtgatggtggtactggaaaaacgactttcgtgaaacatcatttgactggtgaatttgagaagaagtatgtagccaccttgggtgttgaggttcatcccctagtgttccataccaacagaggacctgttaagttcaatgtatgggacacagccggcctggagaaattcagtggactgagagatggctattatatccaagcccagagtaccatcatagtgtttgatgtaacatcgagagttacttacaagaatgtgcctaactggcatagagatctggtatgagtgtgtgaaaacacccccactgtgttgagtggcaacaaagtggatattaaggacaggaaagtgaaggcgaaatccattgtcttccaccgaaagaagaatcttcagtactacgacatttctgccaaaagtaactataactttgttgttgccatgcctgctctcgccccaccagaagttgtcatggacccagctttggcagcacagtatgagcacgacttagaggttgctcagacaactgctctcccggacgaggatgatgacctgtgagaatgaagctggagcccagcgtcagaagtctagttttataggcagctgtcctgtga

SEQ ID NO: 2016 - DNA, 1529 bp, Homo sapiens
ccccagacgccgaggatggccgtcatggcgccccgaaccctcctcctgctactctcgggggccctggccctgacccagacctgggcgggctcccactccatgaggtatttcttcacatccgtgtcccggcccggccgcggggagccccgcttcatcgccgtgggctacgtggacgacacgcagttcgtgcggttcgacagcgacgccgcgagccagaggatggagccgcgggcgccgtggatagagcaggaggggccggagtattgggaccaggagacacggaatgtgaaggcccagtcacagactgaccgagtggacctggggaccctgcgcggctactacaaccagagcgaggccggttctcacaccatccagataatgtatggctgcgacgtggggtcggacgggcgcttcctccgcgggtaccggcaggacgcctacgacggcaaggattacatcgccctgaacgaggacctgcgctcttggaccgcggcggacatggcggctcagatcaccaagcgcaagtgggaggcggcccatgaggcggagcagttgagagcctacctggatggcacgtgcgtggagtggctccgcagatacctggagaacgggaaggagacgctgcagcgcacggacccccccaagacacatatgacccaccaccccatctctgaccatgaggccaccctgaggtgctgggccctgggcttctaccctgcggagatcacactgacctggcagcgggatggggaggaccagacccaggacacggagctcgtggagaccaggcctgcaggggatggaaccttccagaagtgggcggctgtggtggtgccttctggagaggagcagagatacacctgccatgtgcagcatgagggtctgcccaagcccctcaccctgagatgggagctgtcttcccagcccaccatccccatcgtgggcatcattgctggcctggttctccttggagctgtgatcactggagctgtggtcgctgccgtgatgtggaggaggaagagctcagatagaaaaggagggagttacactcaggctgcaagcagtgacagtgcccagggctctgatgtgtccctcacagcttgtaaagtgtgagacagctgccttgtgtgggactgagaggcaagagttgttcctgcccttccctttgtgacttgaagaaccctgactttgtttctgcaaaggcacctgcatgtgtctgtgttcgtgtaggcataatgtgaggaggtggggagaccaccccacccccatgtccaccatgaccctcttcccacgctgacctgtgctccctccccaatcatctttcctgttccagagaggtggggctgaggtgtctccatctctgtctcaacttcatggtgcactgagctgtaacttcttccttccctattaaaattagaaccttagtataaatttactttctcaaattcttgccatgagaggttgatgagttaattaaaggagaagattcctaaaatttgagagacaaaataaatggaagacatgagaac

SEQ ID NO: 2017 - DNA, 1188 bp, Homo sapiens
atggcgccccgaagcctcctcctgctgctctcaggggccctggccctgaccgatacttgggcgggctcccactccttgaggtatttcagcaccgctgtgtcgcggcccggccgcggggagccccgctacatcgccgtggagtacgtagacgacacgcaattcctgcggttcgacagcgacgccgcgattccgaggatggagccgcgggagccgtgggtggagcaagaggggccgcagtattgggagtggaccacagggtacgccaaggccaacgcacagactgaccgagtggccctgaggaacctgctccgccgctacaaccagagcgaggctgggtctcacaccctccagggaatgaatggctgcgacatggggcccgacggacgcctcctccgcgggtatcaccagcacgcgtacgacggcaaggattacatctccctgaacgaggacctgcgctcctggaccgcggcggacaccgtggctcagatcacccagcgcttctatgaggcagaggaatatgcagaggagttcaggacctacctggagggcgagtgcctggagttgctccgcagatacttggagaatgggaaggagacgctacagcgcgcagatcctccaaaggcacacgttgcccaccaccccatctctgaccatgaggccaccctgaggtgctgggccctgggcttctaccctgcggagatcacgctgacctggcagcgggatggggaggaacagacccaggacacagagcttgtggagaccaggcctgcaggggatggaaccttccagaagtgggccgctgtggtggtgccttctggagaggaacagagatacacatgccatgtgcagcacgaggggctgccccagcccctcatcctgagatgggagcagtctccccagcccaccatccccatcgtgggcatcgttgctggccttgttgtccttggagctgtggtcactggagctgtggtcgctgctgtgatgtggaggaagaagagctcagatagaaacagagggagctactctcaggctgcagtcactgacagtgcccagggctctggggtgtctctcacagctaataaagtgtgagacagcttccttgtgtgggactgagaagcaagatatcaatgtagcagaattgcacttgtgcctcacgaacatacataaattttaaaaataaagaataaa

SEQ ID NO: 2018 - protein, 362 aa, Homo sapiens
MAPRSLLLLLSGALALTDTWAGSHSLRYFSTAVSRPGRGEPRYIAVEYVDDTQFLRFDSDAAIPRMEPREPWVEQEGPQYWEWTTGYAKANAQTDRVALRNLLRRYNQSEAGSHTLQGMNGCDMGPDGRLLRGYHQHAYDGKDYISLNEDLRSWTAADTVAQITQRFYEAEEYAEEFRTYLEGECLELLRRYLENGKETLQRADPPKAHVAHHPISDHEATLRCWALGFYPAEITLTWQRDGEEQTQDTELVETRPAGDGTFQKWAAVVVPSGEEQRYTCHVQHEGLPQPLILRWEQSPQPTIPIVGIVAGLVVLGAVVTGAVVAAVMWRKKSSDRNRGSYSQAAVTDSAQGSGVSLTANKV

SEQ ID NO: 2019 - DNA, 1037 bp, Homo sapiens
gagagcacgacgtgcgcgcaccctctccccttgtccactgctgccgcctccttcttctgccgctcctggtgctgcttgtgtgctcgtttggagcggacctggtacctcttttgtgaagcggcagctgaggagactccggcgctcgccatggccgaagaaaagcccaaggaaggagtcaagactgagaacaacgatcatattaatttgaaggtggcggggcaggatggttctgtggtgcagtttaagattaagaggcatacaccacttagtaaactaatgaaagcctattgtgaacgacagggattgtcaatgaggcagatcagattccgattcgacgggcaaccaatgaaacagacacacctgcacagttggaaatggaggatgaagatacaattgatgtgttccaacagcagacgggaggtgtctactgaaaagggaacctgcttctttactccagaactctgttctttaaagaccaagattacattctcaattagaaaactgcaatttgcttccaccacatcctgactactaccgtatagttttctctattctttcatttcccccttccccattcctttactgtacataaagtaactggtatatgtgcacaagcatattactttttttttttaaaactaaacagccaatggtatgttttgattgacatcaagtggagacggggcggaaaaatactgattctgtgaaaataccccctttctccattagtggcatgctcattcagctcttatctttatattccagtaagttattttgctctcactgttttaacaacaacaacaaaaaaacaacaacataaaaatccttgcataccttgttcaattggagaattttaatgtttttcatttatcattgtaaaaccaaggacaattttataacttttttgtacttagctgttacatgcagagcaatctgtctttaagtagggataaattactctaaaacaaaaaagaatcctagatagttttcccttcaagtcaagcgtcttgttgtttaaataaacttcttgtttaaaa

SEQ ID NO: 2020 - protein, 126 aa, Homo sapiens
MAEEKPKEGVKTENNDHINLKVAGQDGSVVQFKIKRHTPLSKLMKAYCERQGLSMRQIRFRFDGQPMKQTHLHSWKWRMKIQLMCSNSRREVSTEKGTCFFTPELCSLKTKITFSIRKLQFASTTS

SEQ ID NO: 2021 - DNA, 508 bp, Homo sapiens
gccgctcctggtgctgcttgtgtgctcgtttggagcggacctggtacctcttttgtgaagcggcagctgaggagactccggcgctcgccatggccgaagaaaagcccaaggaaggagtcaagactgagaacaacgatcatattaatttgaaggtggcggggcaggatggttctgtggtgcagtttaagattaagaggcatacaccacttagtaaactaatgaaagcctattgtgaacgacagggattgtcaatgaggcagatcagattccgattcgacgggcaaccaatgaaacagacacacctgcacagttggaaatggaggatgaagatacaattgatgtgttccaacagcagacgggaggtgtctactgaaaagggaacctgcttctttactccagaactctgttctttaaagaccaagattacattctcaattagtctttcatttcccccttccccattcctttactgtacataaagtaactggtatatgtgcacaagcatatt

SEQ ID NO: 2022 - protein, 129 aa, Homo sapiens [sequence omitted]

SEQ ID NO: 2023 - DNA, 948 bp, Homo sapiens
atgaaggccaactacagcgcagaggagcgctttctcctgctgggtttctccgactggccttccctgcagccggtcctcttcgcccttgtcctcctgtgctacctcctgaccttgacgggcaactcggcgctggtgctgctggcggtgcgcgacccgcgcctgcacacgcccatgtactacttcctctgccacctggccttggtagacgcgggcttcactactagcgtggtgccgccgctgctggccaacctgcgcggaccagcgctctggctgccgcgcagccactgcacggcccagctgtgcgcatcgctggctctgggttccgccgaatgcgtcctcctggcggtgatggctctggaccgcgcggccgcagtgtgccgcccgctgcgctatgcggggctcgtctccccgcgcctatgtcgcacgctggccagcgcctcctggctaagtggcctcaccaactcggttgcgcaaaccgcgctcctggctgagcggccgctgtgcgcgccccgcctgctggaccacttcatctgtgagctgccggcgttgctcaagctggcctgcggaggcgacggagacactaccgagaaccagatgttcgccgcccgcgtggtcatcctgctgctgccgtttgccgtcatcctggcctcctacggtgccgtggcccgagctgtctgttgcatgcggttcagcggaggccggaggagggcggtgggcacgtgtgggtcccacctgacagccgtctgcctgttctacggctcggccatctacacctacctgcagcccgcgcagcgctacaaccaggcacggggcaagttcgtatcgctcttctacaccgtggtcacacctgctctcaacccgctcatctacaccctcaggaataagaaagtgaagggggcagcgaggaggctgctgcggagtctggggagaggccaggctgggcagtga

SEQ ID NO: 2024 - protein, 401 aa, Homo sapiens
MEGTQEYDSSMQTVRFQGERRKSPSNATFSPFFWMPHSAKSLVADAGIHSRNQHSYAIASFIKYSQLHFKSRESRAGARDQPIIWKLKANYSAEERFLLLGFSDWPSLQPVLFALVLLCYLLTLTGNSALVLLAVRDPRLHTPMYYFLCHLALVDAGFTTSVVPPLLANLRGPALWLPRSHCTAQLCASLALGSAECVLLAVMALDRAAAVCRPLRYAGLVSPRLCRTLASASWLSGLTNSVAQTALLAERPLCAPRLLDHFICELPALLKLACGGDGDTTENQMFAARVVILLLPFAVILASYGAVARAVCCMRFSGGRRRAVGTCGSHLTAVCLFYGSAIYTYLQPAQRYNQARGKFVSLFYTVVTPALNPLIYTLRNKKVKGAARRLLRSLGRGQAGQ

SEQ ID NO: 2025 - DNA, 1284 bp, Homo sapiens
atggggagaaggtatgtgaggaaggaaagaaaaaggccagcaggtgaagaaaaagaagaaggtctggtgaggacaatggagacggccaatcgttccttaaaacggtctcctcctcctggttcctctctccaagatggcaagggagcctgcaaattcggtctccaaggatccctctgcccagagcaacgaactccctttggcaatataggaataatcttcattctccctgcaattgtgcacattaataggctgtttaatgaaagtacagtgtggagctcattattgcgaacagcagcccttagagatcgtagctggctggtaaaggcggctttagagcggacgcccaggcttcttcatcagcttaccagaaggttggaggcagaagacctcccatttgcagattcactcatttctccgcttatgcttccgttctttgaaagtgaaccactaggtttcagaaagcaccaggcagttaaaacagagtttactccctcggtcactgcactagaaatcaggaggcgaacactgtacctaaacataaaacgacattctcaaaaactgccctgcacaggcttgttgggacttcacgatccttcttggacctgcatccccctcttctctggtactcggaccaaaatcgaacaatcaagcaacaaagttggccttaaaattgaggccccagagatgaggttactgagcgggtatatgtcacagagccaaactttctgcaatgaattggaaaagaacatcaagacagagggaggagcgctgggggtgaacaccgccttgacctttgtaacctgctgcacaaataaggagtggttgctgtgccagttttccctgaagaggtgcctgaccagctggctctgtgaattcgaatacagttttcaggcaggctctgggagagttttggggaatcccgaaagacagcccagagatgctggactgcgaatgcaggcgcgctgcaggcgaggctgggagggccgccaggagcgctgcgggtatcgggagacacgcagagggaggggcaggcggcgggctccgcttcttcgcgtcctggctctgaaagcaaccacaggccagcggggcggtgctagaaaaacacaaccttcacggaagagttttgaaaagatttccggcaagaaaataatgttaccagagaccgttgaggcccggccagccttcaagatggatgcccctgctggccgcaaagtgggtctcattgctccccgccggactggacgtctccggggaacgaagactgtgcaggagaaagagagctag

SEQ ID NO: 2026 - protein, 427 aa, Homo sapiens
MGRRYVRKERKRPAGEEKEEGLVRTMETANRSLKRSPPPGSSLQDGKGACKFGLQGSLCPEQRTPFGNIGIIFILPAIVHINRLFNESTVWSSLLRTAALRDRSWLVKAALERTPRLLHQLTRRLEAEDLPFADSLISPLMLPFFESEPLGFRKHQAVKTEFTPSVTALEIRRRTLYLNIKRHSQKLPCTGLLGLHDPSWTCIPLFSGTRTKIEQSSNKVGLKIEAPEMRLLSGYMSQSQTFCNELEKNIKTEGGALGVNTALTFVTCCTNKEWLLCQFSLKRCLTSWLCEFEYSFQAGSGRVLGNPERQPRDAGLRMQARCRRGWEGRQERCGYRETRRGRGRRRAPLLRVLALKATTGQRGGARKTQPSRKSFEKISGKKIMLPETVEARPAFKMDAPAGRKVGLIAPRRTGRLRGTKTVQEKES

SEQ ID NO: 2027 - DNA, 2255 bp, Homo sapiens
tacggccgtcgtgccgctcgtgtcagtcaacatggaggcagaggaatcggagaaggccgcaacggagcaagagccgctggaagggacagaacagacactagatgcggaggaggagcaggaggaatccgaagaagcggcctgtggcagcaagaagcgggtagtgccaggtattgtgtacctgggccatatcccgccgcgcttccggcccctgcacgtccgcaaccttctcagcgcctatggcgaggtcggacgcgtcttctttcaggctgaggaccggttcgtgagacgcaagaagaaggcagcagcagctgccggaggaaaaaagcggtcctacaccaaggactacaccgagggatgggtggagttccgtgacaagcgcatagccaagcgcgtggcggccagtctacacaacacgcctatgggtgcccgcaggcgcagccccttccgttatgatctttggaacctcaagtacttgcaccgtttcacctggtcccacctcagcgagcacctcgcctttgagcgccaggtgcgcaggcagcgcttgagagcggaggttgctcaagccaagcgtgagaccgacttctatcttcaaagtgtggaacggggacaacgctttcttgcggccgatggggaccctgctcgcccagatggctcctggacatttgcccagcgtcctactgagcaggaactgagggcccgtaaagcagcacggccagggggacgtgaacgggctcgcctggcaactgcccaggacaaggcccgctccaacaaagggctcctggccaggatctttggagccccgccaccctcagagagcatggagggaccttcccttgtcagggactcctgagggcctgggtggccccttccatttcctggccctgctctgcttcctgtctacctcatactagaatgatcgtgactacccgggcagacattttactgtgtttctcagaccaagtgtctactgatggcccaaacatggagttttgtgggcttccactgtccccactccgaactcctgtatgtgcctggctgagtcacctaattcatactgtcatactagcataattatgactattgcatatgcttgttttgtttgactcttggctgcctacgtctgtagggtcccctgaaaatcccacttcctgcccccagaaagggcctttatttccaactaggaggataatgcctagtccaggcaatctttctctgtttagcagtcacaggtgagggtggtattagcatcttttttatgtagaaaaaattgagttaatggggtggactgggttgggaagaaatacatttcctaatgtatttatagaaaataaaaatatttttatgtgcctttttatttttgttggtggggaggtcattggacaagttccaactttcatcttgtgttcccttcaccttcatatcctgatcttagagcccccctccccctgccacccaccttactgtttaacctggatttttttttctatttaatttttgtctaatatcttagcccagtttatcaatcagttatcttaagtcagcattttctaagccattgtttgaggaaacagtgacaataggtaataacacatcttagtattaagagttttacaggccactagtataagataggcatcgtggtagatgcatataaagggtggaatgggagccatggcaggtcatagagtcctctcaatgggaacctgattgatgatcacagtcttcagtggtgagtcagtcctcaccaagttttccagatcattcctacaaagtaaactgggagaataataagtctgaaagagtgtggagtgctcccacaattacaaagaatgcttcctgggtggagtgttgagttggaaccattgtaaaggtgggcaaagcctagtagagaaccagtgcacctcaggtgcacttacatatggtggggctgaggcaaagcagccctgtaggcttcaaagaatcagtgtaagccactaaaaggaactgaaaacctaggtgtcacaataaacagtctacacagtctcacgtagaccaaaattctgatcattttccaggctgttgcatgaagtgatagagtatgattataatttctgtttgcttgtgctgtttgtttttgtttttcatctgtcaatgtgatgatctgtgttttatagggtagagtggatttgtctactttggctgtaaaataccctaatcacattatgatcttgacaggtgcactttactggggagaataaaaaggaccatacggtaaa

SEQ ID NO: 2028 - protein, 272 aa, Homo sapiens
MEAEESEKAATEQEPLEGTEQTLDAEEEQEESEEAACGSKKRVVPGIVYLGHIPPRFRPLHVRNLLSAYGEVGRVFFQAEDRFVRRKKKAAAAAGGKKRSYTKDYTEGWVEFRDKRIAKRVAASLHNTPMGARRRSPFRYDLWNLKYLHRFTWSHLSEHLAFERQVRRQRLRAEVAQAKRETDFYLQSVERGQRFLAADGDPARPDGSWTFAQRPTEQELRARKAARPGGRERARLATAQDKARSNKGLLARIFGAPPPSESMEGPSLVRDS

SEQ ID NO: 2029 - DNA, 1666 bp, Homo sapiens
atttgctttctctttttcctttcttccggatgagaggctaagccataatagaaagaatggagaattattgattgaccgtctttattctgtgggctctgattctccaatgggaataccaagggatggttttccatactggaacccaaaggtaaagacactcaaggacagacatttttggcagagcatagatgaaaatggcaagttccctggctttccttctgctcaactttcatgtctccctcctcttggtccagctgctcactccttgctcagctcagttttctgtgcttggaccctctgggcccatcctggccatggtgggtgaagacgctgatctgccctgtcacctgttcccgaccatgagtgcagagaccatggagctgaagtgggtaagttccagcctaaggcaggtggtgaacgtgtatgcagatggaaaggaagtggaagacaggcagagtgcaccgtatcgagggagaacttcgattctgcgggatggcatcactgcagggaaggctgctctccgaatacacaacgtcacagcctctgacagtggaaagtacttgtgttatttccaagatggtgacttctatgaaaaagccctggtggagctgaaggttgcagcactgggttctaatcttcacgtcgaagtgaagggttatgaggatggagggatccatctggagtgcaggtccaccggctggtacccccaaccccaaatacagtggagcaacgccaagggagagaacatcccagctgtggaagcacctgtggttgcagatggagtgggcctatatgaagtagcagcatctgtgatcatgagaggcggctccggggagggtgtatcctgcatcatcagaaattccctcctcggcctggaaaagacagccagcatttccatcgcagaccccttcttcaggagcgcccagccctggatcgcagccctggcagggaccctgcctatcttgctgctgcttctcgccggagccagttacttcttgtggagacaacagaaggaaataactgctctgtccagtgagatagaaagtgagcaagagatgaaagaaatgggatatgctgcaacagagcgggaaataagcctaagagagagcctccaggaggaactcaagaggaaaaaatccagtacttgactcgtggagaggagtcttcgtccgataccaataagtcagcctgatgctctaatggaaaaatggccctcttcaagcctggtgaggaaatgcttcagatgaggctccaccttgttaaataaattggatgtatggaaaaatagactgcagaaaaggggaactcatttagctcacgagtggtcgagtgaagattgaaaattaacctctgagggccagcacagcagctcatgcctgtaatcctagcactttggaaggctgaggagggcggatcacaaggtcaggagatcaagaccatcctggctaacacggtgaaaccccgtctctactaaaaatacaaaaaataaaaaattagccgggcatggtgacgggcacctgtagtcccagctactcgggaggctgaggcaggagaatggcatgaacccggaaggcagagcttgcagtgagccgagatcacgccactgcactccagcctgggagacagagcgagactctgtctcaagaaaaaaaaaaaaaaaaaaaaa

SEQ ID NO: 2030 - protein, 319 aa, Homo sapiens
MKMASSLAFLLLNFHVSLLLVQLLTPCSAQFSVLGPSGPILAMVGEDADLPCHLFPTMSAETMELKWVSSSLRQVVNVYADGKEVEDRQSAPYRGRTSILRDGITAGKAALRIHNVTASDSGKYLCYFQDGDFYEKALVELKVAALGSNLHVEVKGYEDGGIHLECRSTGWYPQPQIQWSNAKGENIPAVEAPVVADGVGLYEVAASVIMRGGSGEGVSCIIRNSLLGLEKTASISIADPFFRSAQPWIAALAGTLPILLLLLAGASYFLWRQQKEITALSSEIESEQEMKEMGYAATEREISLRESLQEELKRKKSST

SEQ ID NO: 2031 - DNA, 831 bp, Homo sapiens
atggacaggactgtcattcagaaataccacactgtgaatggccacagctgtgaagttaggaaagccctgtcaaagcaagagatggttagtgcttcatccagccaaagaggtcgaagtggttctggaaactttgctggtggtcttagaagtggtttcagtgggaataacaactttggtcgtggaggaaacttccgtggtcgtggggcctttggtggcagccgtggtggtggtggatatgatggcagtggggatggctataatggatatggcccagataaacagtctccacttgttcaggacttcaacggagatattccactcagtcctgcttatgccagacaccttgcacgagcctctcccaagatagctaggactcagggaacatgcaggctgacacaagcattgatgatctatattaatgcaagtgtaatatggaatggagaatttttacaaatggtgtcattaccagccattaatgccatagctttaatttgttcattaagtttagcagccagttacctaacaggtcatcaaaggagggacacagaagaggcaagcactgataatgaaaggtctatatcacaggtgtgctcagaaaaggcaagcacagatcacagtttccagggctgccagcagaatggatttaatattgccacgtgggaagaagaaaaagccacagggtgcagatatcaggaatctgaatttccggggcataacgtgtgcacagatgcagcttcaacagattcatcatatcatccccttcagagctgctgtgacagtttacaccagattaactctcagtttccagaaaaagaggaaactctggcctag

SEQ ID NO: 2032 - DNA, 2797 bp, Homo sapiens
ttccccagcattcgagaaactcctctctactttagcacggtctccagactcagccgagagacagcaaactgcagcgcggtgagagagcgagagagagggagagagagactctccagcctgggaactataactcctctgcgagaggcggagaactccttccccaaatcttttggggacttttctctctttacccacctccgcccctgcgaggagttgaggggccagttcggccgccgcgcgcgtcttcccgttcggcgtgtgcttggcccggggaaccgggagggcccggcgatcgcgcggcggccgccgcgagggtgtgagcgcgcgtgggcgcccgccgagccgaggccatggtgcagcaaaccaacaatgccgagaacacggaagcgctgctggccggcgagagctcggactcgggcgccggcctcgagctgggaatcgcctcctcccccacgcccggctccaccgcctccacgggcggcaaggccgacgacccgagctggtgcaagaccccgagtgggcacatcaagcgacccatgaacgccttcatggtgtggtcgcagatcgagcggcgcaagatcatggagcagtcgcccgacatgcacaacgccgagatctccaagcggctgggcaaacgctggaagctgctcaaagacagcgacaagatccctttcattcgagaggcggagcggctgcgcctcaagcacatggctgactaccccgactacaagtaccggcccaggaagaaggtgaagtccggcaacgccaactccagctcctcggccgccgcctcctccaagccgggggagaagggagacaaggtcggtggcagtggcgggggcggccatgggggcggcggcggcggcgggagcagcaacgcggggggaggaggcggcggtgcgagtggcggcggcgccaactccaaaccggcgcagaaaaagagctgcggctccaaagtggcgggcggcgcgggcggtggggttagcaaaccgcacgccaagctcatcctggcaggcggcggcggcggcgggaaagcagcggctgccgccgccgcctccttcgccgccgaacaggcgggggccgccgccctgctgcccctgggcgccgccgccgaccaccactcgctgtacaaggcgcggactcccagcgcctcggcctccgcctcctcggcagcctcggcctccgcagcgctcgcggccccgggcaagcacctggcggagaagaaggtgaagcgcgtctacctgttcggcggcctgggcacgtcgtcgtcgcccgtgggcggcgtgggcgcgggagccgaccccagcgaccccctgggcctgtacgaggaggagggcgcgggctgctcgcccgacgcgcccagcctgagcggccgcagcagcgccgcctcgtcccccgccgccggccgctcgcccgccgaccaccgcggctacgccagcctgcgcgccgcctcgcccgccccgtccagcgcgccctcgcacgcgtcctcctcggcctcgtcccactcctcctcttcctcctcctcgggctcctcgtcctccgacgacgagttcgaagacgacctgctcgacctgaaccccagctcaaactttgagagcatgtccctgggcagcttcagttcgtcgtcggcgctcgaccgggacctggattttaacttcgagcccggctccggctcgcacttcgagttcccggactactgcacgcccgaggtgagcgagatgatctcgggagactggctcgagtccagcatctccaacctggttttcacctactgaagggcgcgcaggcagggagaagggccggggggggtaggagaggagaaaaaaaaagtgaaaaaaagaaacgaaaaggacagacgaagagtttaaagagaaaagggaaaaaagaaagaaaaagtaagcagggctcgttcgcccgcgttctcgtcgtcggatcaaggagcgcggcggcgttttggacccgcgctcccatcccccaccttcccgggccggggacccactctgcccagccggagggacgcggaggaggaagagggtagacaggggcgacctgtgattgttgttattgatgttgttgttgatggcaaaaaaaaaaagcgacttcgagtttgctcccctttgcttgaagagaccccctcccccttccaacgagcttccggacttgtctgcacccccagcaagaaggcgagttagttttctagagacttgaaggagtctcccccttcctgcatcaccaccttggttttgttttattttgcttcttggtcaagaaaggaggggagaacccagcgcacccctccccccctttttttaaacgcgtgatgaagacagaaggctccggggtgacgaatttggccgatggcagatgttttgggggaacgccgggactgagagactccacgcaggcgaattcccgtttggggcctttttttcctccctcttttccccttgccccctctgcagccggaggaggagatgttgaggggaggaggccagccagtgtgaccggcgctaggaaatgacccgagaaccccgttggaagcgcagcagcgggagctaggggcgggggcggaggaggacacgaactggaagggggttcacggtcaaactgaaatggatttgcacgttggggagctggcggcggcggctgctgggcctccgccttcttttctacgtgaaatcagtgaggtgagacttcccagaccccggaggcgtggaggagaggagactgtttgatgtggtacaggggcagtcagtggagggcgagtggtttcggaaaaaaaaaaagaaaaaaaggg

SEQ ID NO: 2033 - protein, 474 aa, Homo sapiens
MVQQTNNAENTEALLAGESSDSGAGLELGIASSPTPGSTASTGGKADDPSWCKTPSGHIKRPMNAFMVWSQIERRKIMEQSPDMHNAEISKRLGKRWKLLKDSDKIPFIREAERLRLKHMADYPDYKYRPRKKVKSGNANSSSSAAASSKPGEKGDKVGGSGGGGHGGGGGGGSSNAGGGGGGASGGGANSKPAQKKSCGSKVAGGAGGGVSKPHAKLILAGGGGGGKAAAAAAASFAAEQAGAAALLPLGAAADHHSLYKARTPSASASASSAASASAALAAPGKHLAEKKVKRVYLFGGLGTSSSPVGGVGAGADPSDPLGLYEEEGAGCSPDAPSLSGRSSAASSPAAGRSPADHRGYASLRAASPAPSSAPSHASSSASSHSSSSSSSGSSSSDDEFEDDLLDLNPSSNFESMSLGSFSSSSALDRDLDFNFEPGSGSHFEFPDYCTPEVSEMISGDWLESSISNLVFTY

SEQ ID NO: 2034 - DNA, 2699 bp, Homo sapiens
  unsure 1740: unknown base
ggcccgcggcggccgaaatccgcggttcacagcatgtccgcctcggcccctgctgcggagggggagggaacccccacccagcccgcgtccgagaaagaacccgaaatgcccggtcccagagaggagagcgaggaggaagaggacgaggacgacgaggaggaggaggaggaggaaaaagaaaagagtctcatcgtggaaggcaagagggaaaagaaaaaagtagagaggttgacaatgcaagtctcttccttacagagagagccatttacaattgcacaaggaaaggggcagaaactttgtgaaattgagaggatacatttttttctaagtaagaagaaaaccgatgaacttagaaatctacacaaactgctttacaacaggccaggcactgtgtcctcattaaagaagaatgtgggtcagttcagtggctttccatttgaaaaaggaagtgtccaatataaaaagaaggaagaaatgttgaaaaaatttagaaatgccatgttaaagagcatctgtgaggttcttgatttggagagatcaggtgtaaatagtgaactagtgaagaggatcttgaatttcttaatgcatccaaagccttctggcaaaccattgccgaaatctaaaaaaacttgtagcaaaggcagtaaaaaggaacggaacagttctggaatggcaaggaaggctaagcgaaccaaatgtcctgaaattctgtcagatgaatctagtagtgatgaagatgaaaagaaaaacaaggaagagtcttcagatgatgaagataaagaaagtgaagaggagccaccaaaaaagacagccaaaagagaaaaacctaaacagaaagctacttctaaaagtaaaaaatctgtgaaaagtgccaatgttaagaaagcagatagcagcaccaccaagaagaatcaaaacagttccaaaaaagaaagtgagtctgaggatagttcagatgatgaacctttaattaaaaagttgaagaaaccccctacagatgaagagttaaaggaaacaataaagaaattactggccagtgctaacttggaagaagtcacaatgaaacagatttgcaaaaaggtctatgaaaattatcctacttatgatttaactgaaagaaaagatttcataaaaacaactgtaaaagagctaatttcttgagatagaggacagagaagatgactcgttcccatagatttgaagatctgatttataccattataccagcaaagagaatgtatttccttttctaaatccttgttaagcaacgttagtagaacttactgctgacctttttatcttgagtgttatgtgaatttgagtttgctgttttaaattgcatttctatgccatttttagtttaaaatcttgcatggcattaattgttccttgcttttatagttgtattttgtacattttggatttctttatataaggtcatagattcttgagctgttgtggtttttagtgcacttaatattagcttgcttaaggcatacttttaatcaagtagaacaaaaactattatcaccaggatttatacatacagagattgtagtatttagtatatgaaatattttgaatacacatctctgtcagtgtgaaaattcagcggcagtgtgtccatcatattaaaaatatacaagctacagttgtccagatcactgaattggaacttttctcctgcatgtgtatatatgtcaaattgtcagcatgacaaaagtgacagatgttattttngtatttttaaaaaacaattggttgtatataaagtttttttatttcttttgtgcagatcactttttaaactcacataggtaggtatctttatagttgtagactatggaatgtcagtgttcagccaaacagtatgatggaacagtgaaagtcaattcagtgatggcaacactgaaggaacagttaccctgctttgcctcgaaagtgtcatcaatttgtaattttagtattaactctgtaaaagtgtctgtaggtacgttttatattatataaggacagaccaaaaatcaacctatcaaagcttcaaaaactttgggaaagggtgggattaagtacaagcacatttggcttacagtaaatgaactgatttttattaactgcttttgcccatataaaatgctgatatttactggaaacctagccagcttcacgattatgactaaagtaccagattataatgccagaatataatgtgcaggcaatcgtggatgtctctgacaaagtgtgtctcaaaaataatatacttttacattaaagaaatttaatgtttctctggagttggggctcttggctttcagagtttggttaatcagtgttgattctagatgatcaacataatggaccactcctgaatgagacttaattttgtctttcaaatttactgtcttaaatcagtttattaaatctgaattttaaaacatgctgtttatgacacaatgacacatttgttgcaccaattaagtgttgaaaaatatctttgcatcatagaacagaaatatataaaaatatatgttgaatgttaacaggtattttcacaggtttgtttcttgatagttactcagacactagggaaaggtaaatacaagtgaacaaaataagcaactaaatgagacctaataattggccttcgattttaaatatttgttcttataaaccttgtcaataaaaataaatctaaatca

SEQ ID NO: 2035 - protein, 375 aa, Homo sapiens
MSASAPAAEGEGTPTQPASEKEPEMPGPREESEEEEDEDDEEEEEEEKEKSLIVEGKREKKKVERLTMQVSSLQREPFTIAQGKGQKLCEIERIHFFLSKKKTDELRNLHKLLYNRPGTVSSLKKNVGQFSGFPFEKGSVQYKKKEEMLKKFRNAMLKSICEVLDLERSGVNSELVKRILNFLMHPKPSGKPLPKSKKTCSKGSKKERNSSGMARKAKRTKCPEILSDESSSDEDEKKNKEESSDDEDKESEEEPPKKTAKREKPKQKATSKSKKSVKSANVKKADSSTTKKNQNSSKKESESEDSSDDEPLIKKLKKPPTDEELKETIKKLLASANLEEVTMKQICKKVYENYPTYDLTERKDFIKTTVKELIS

SEQ ID NO: 2036 - DNA, 4676 bp, Homo sapiens
gggggagggaaacggagcagtgacaggtatcccagagggtgctgctgaggcgacgatggccgaggggcccgaggaagcccgaggccaccctcccgggcaggacgatggcggaggggaccacgagcccgtcccttccctgagaggccctcctaccaccgccgtcccatgcccccgcgacgacccccaggccgaaccccaggccccgggccggcccacagccccgggcctcgcggctgccgccgcagccgacaaattggagccgccgcgcgagctcaggaagcgcggggaggcggcctccggctccggtgcagagctgcaggagcaggcgggctgcgaggcgcccgaagccgcggcgccacgagagagaccagctcggctgagcgcccgcgagtactcccggcaagtgcacgagtggctgtggcagtcctactgcggctacctcacctggcacagcggcctggccgccttcccagcctactgcagcccccagccctccccgcagagcttcccttcgggcggcgctgcagtcccccaggccgcggcgccgccgcccccgcagctgggctattacaaccccttctacttcctgagccccggggccgcggggcctgacccgcggacagctgccggcatcagcacccctgctccagtcgcgggcctgggaccccgggctcctcacgtgcaggcgtcggtccgggccactccagtgacgagggtaggatccgcagccccttcgcgaagcccgagcgagaccgggcgacaggcaggcagagaatatgttattccatccttggcccacagatttatggcagagatggtggatttctttattctcttctttataaaagcaaccattgtcttaagcattatgcacctcagtgggataaaggatatctctaagtttgctatgcattatataatagaagaaatagatgaagacacatcaatggaagacttgcagaaaatgatggttgtggcacttatatacagattattagtttgtttctatgagataatttgcatttggggagcaggtggagctaccccagggaagttcctgctggggcttcgagttgtgacatgtgatacatcagtgcttattgcaccaagtcgggttttagtgattccttcctcaaatgttagcattacaacgtccactatccgagctttgatcaagaatttttcaattgcttcttttttccctgctttcatcacactgctgttttttcagcataatcgaacagcttatgacattgtagcaggaaccattgtggtaaaaagaaatggggtcagatgatgccccccaaaaccctgatttccacacactaagactaaattatgtatcaaggccatcagtatccctgggttacactaattgatgatttagaaattaaagcagtcactccagtgtgatgcaggtgactactctgaaagtattgattatacttgaatgccaaagaacttgtccagaagaaaaacctgttaaattcaagtattaaaatttttagatcaaaaaggcaaatgattttataaacaatggacaatatatactttcttaagatctaaggtactttcttaagatctaagaatttgctgaaagcattttcagctttgaaatctccaaatgaaactttaaaatttattttggtttatcccaaaataatggaaaatgtccagttgtgttttgtaaacacctatgtaactcatcttttagtttacacttcctggggaaattgtctttggtgtttagaggagggaatgagaacacaaattggataatccactgtctcccatcccaggaggtggtgagttggctacaagagaaagggacaagtgaggcaggcctagcagttcccttacctgaagttttcaaatccatactgcagttccctctcgtaatgatgtaactttacaactattcttaatgcttgaacatgtatttaggggcaagtttctcatgatgatgaaaaagtatcaagtcatattgctatgttaattggtttttttttttaaaaggtaagttagtgattactgttaatggtgggggagtaagttttcactgtaaattgaacttataatttatgtgcaagtgttttcagtgccctgaatcaaactataaatgtggggagaaatcacctccatcaaacagttgcatatttactgtaaaagtattcccagtatgtgtgcagcatgaagaaagtattagtgcttctcagtgttctcagtgtaaattctatttatatacagcatattcacatactactttccttatattttatatagttctatgactgttgaaacatcaaggagttaaaaaaatcttaatatttcatgattaactctaagtactattaattaatagcttgcgaaatattagcaattttcccattatggactattctctctaaagcaagagagactagcattcccagacatcattctagggtctttaagctcattttgggtctgctaaagtttggggggaaatgttacgcaaagtgatactgtgtatgttgccattttgctttattcttctgttgaagcaaaattgtggggttttattatgtgtgtgtgcttttcctagatgtcccagttagctgtgctgagatatacctgtactatttatggtttaagttttgattcttaggtattttctccagctctgacattgttttccaaagacacactaaactgcattgcacagttcaaaatttgattacttaagggatcaatctaggtggtgttcttggtcttaaatttaacagcaaacacagcacatatctattatcactatattaattttcaaaggtttttctttgacgtttaaaactgtgacaacagatattcacatttgattatagaaacttaatgtctattaataattttagtacaaaatttcataaaccgtgtttttcaaaataagtttatgtcaaatccagcttcccagaaacactaataattaagtacatcaatgtactaaataaatcattcagttgcacccatggggaagattgtgttactgcccttcacagtgaaaaaaagaaaaatctttcatttttaaaattaggagatgttacgtaacttggcactttagtagtgtatacactagcattagtttatacaccacttttgccgctggggaattcaagttgaaatgtccctcaatcatataggtctggaatacatctttcattcataatttctgctcagataattgaatagtttgccatcgagattattttcatttatactataaaacaaaagcaaactagtccagtttaattttttgtacttagaatattgcacattttctatatatgagttattcagattagtatctatgtaggttcagtcagatccaaccatggattcgaggtattatactgtataaccctacaaaatacatagaagtattatttgccttcataatagaacccaagagtctgtttcaatttatgaattcagtatttgcaccgagattttgattcccaaagtttggaaaaaaatgacaaaacaacgagggaagaaggaaccagaccttagtgccacatatttttctcttggggttgtaaggtagtctcctgctttccagaacactttattatatttcacttatagacctgattttctgtgtcaaagtataattctcatgctgaagctgtagcctaaaaagccaaaagaaagttgtcttcattgtacaaacatattcatcactttaacaataagggaacaaaatttagtattcaagctgagtgagaatactgtttcaatgagcatgtccctaagataaaccagaattggcagttaatttaggcgtctagaaaatctcagttcccaccagtaaaattatcctgagtagctaatgcaccttgagaaaaatctggcatactgaataaataacattaacttgggagccaagagctgggtaagccttacctttagactactctgtgactacagaaataaagccagcacttttggaactaataagccttcacttgtcagtatcataaagagtattgcccaactgaactttgctcccactggtttaatagttacttatttctgcctaagcactcaccttccgattttacccaagtatatatataggatagaaaaaaatgcattatatttgagagctacttcgcccaaattacaaaatgagtgtttttagattcaagtgacagtaaaaggatttgttcccttcagtgacttgagtgttttagttatgcataagtatttctagcaaaggaagggtagaaaggaattgaaaattaatttacactagttgctacttgggaataaagggctttttgaggggggtatggatattaaatgttttcgttatatacttatccctattaaaacaggcagttgtttctttgaatatgcctaaataacagtattcttaaaatctgacagacaagtaacatgtcaattacttgatattccttgtctccagtaccacaggccactcttgacatcccatgtttgcctggataaagttcctcatttcaaacagtatacatacttctttgcagttcattatagtaaggcttaacctgtaaacagtatctgatggcccacctataaataaaattcagcattctatttttaataatttgtatgccaccaatttgtattatttgtctcaataaatacttagtcatcaatgc

SEQ ID NO: 2037 - DNA, 1463 bp, Homo sapiens
ctccccgcgccgccccgcgcaggcgcccccgccccgccgtcgccgccgccgcagccaggagccgctgcaccatgccccgcatagatgcggacctcaagctcgacttcaaggatgtcctgctccgacctaagcggagcagcctcaagagccgagccgaggtggatcttgaacgcaccttcacgtttcgaaattcaaagcagacctactcagggattcccatcatcgtggccaacatggacactgtgggcacgtttgagatggcagccgtgatgtcacagcactccatgtttacagcaattcataagcattactccctggatgactggaagctctttgccacaaatcacccagaatgcctgcagaatgtagccgtgagttcaggcagtgggcagaatgatctggaaaagatgaccagcatcctggaagctgtgccacaggttaagtttatttgcctggatgtggccaatgggtattcagaacattttgtggaattcgtgaaacttgtccgtgccaaatttcctgaacacaccattatggcagggaacgtggtgacaggagaaatggtagaagagcttattctttccggagcagatatcatcaaagtgggagttggaccaggttctgtgtgcaccacccgcaccaagacgggagtggggtacccccagctgagtgccgtcattgagtgtgccgactctgcccatggcctgaagggccacatcatctctgatggaggctgtacgtgtccaggggatgtcgccaaagcctttggagctggagcagattttgtcatgctgggaggaatgttttcgggtcatacggagtgtgctggagaagtgtttgagaggaacggacggaagctcaagctcttctacgggatgagctctgacaccgccatgaacaagcacgcaggaggagttgctgagtacagagcctctgagggtaagactgtggaagttccttacaaaggagatgtggaaaacactatcctggatattctcgggggactgaggtccacgtgcacctacgtgggggccgccaaactcaaggagctcagcaggagggcaacattcatccgggtgacccagcagcacaacaccgtgttcagctaaccctggggacaaagcagcgtctggctcgagtggaagcgtccaaacctgcttttcccatctccccccaagtctgttccgtcagagcttctggctgctcctgaatggtggaatgctgtgtcctctcttctgtctcctgctgcctggaggcttcggggctctcccgcctgccttctcggggcccagacgcaaggcaccgattgggccaacatcagagccctgctgcccagaactcataacctcattgttcaaaccaacacttgcacctttctctttttctctttctctctccctttctttgtttttctttcttttttaaaagaagatggtttcactttaatataatgctattatctt

SEQ ID NO: 2038 - protein, 345 aa, Homo sapiens
MPRIDADLKLDFKDVLLRPKRSSLKSRAEVDLERTFTFRNSKQTYSGIPIIVANMDTVGTFEMAAVMSQHSMFTAIHKHYSLDDWKLFATNHPECLQNVAVSSGSGQNDLEKMTSILEAVPQVKFICLDVANGYSEHFVEFVKLVRAKFPEHTIMAGNVVTGEMVEELILSGADIIKVGVGPGSVCTTRTKTGVGYPQLSAVIECADSAHGLKGHIISDGGCTCPGDVAKAFGAGADFVMLGGMFSGHTECAGEVFERNGRKLKLFYGMSSDTAMNKHAGGVAEYRASEGKTVEVPYKGDVENTILDILGGLRSTCTYVGAAKLKELSRRATFIRVTQQHNTVFS

SEQ ID NO: 2039 - DNA, 5756 bp, Homo sapiens
gttttactaaagtgaatttttttttgtttgcttcgttcgtctttggctctttttttttccttcccaatttcggatttatttcaaggcgaatctggctttgggggaagaggaagaaaagtcggattacaagatcaaccaccaccaacaacaataaaaaccaccaggatatttttttgcaaatttctgacggctttaaattcatgaagcaattgtccccttttgcaatcagcatttggatctcagaatgagcaaggaaagacccaagaggaatatcattcagaagaaatacgatgacagtgatgggattccgtggtcagaagaacgggtggtacgtaaagtcctttatttgtctctgaaggagttcaagaattcccagaagaggcagcatgcggaaggcattgctgggagcctgaaaactgtgaatgggctccttggtaatgaccagtctaagggattaggaccagcatcagaacagtcagagaatgaaaaggacgatgcatcccaagtgtcctccactagcaacgatgttagttcttcagattttgaagaagggccgtcgaggaaaaggcccaggctgcaagcacaaaggaagtttgctcagtctcagccgaatagtcccagcacaactccagtaaagatagtggagccattgctaccccctccagctactcagatatcagacctctctaaaaggaagcctaagacagaagattttcttacctttctctgccttcgaggttctcctgcgctgcccaacagcatggtgtattttggaagctctcaggatgaggaggaagtcgaggaggaagatgatgagacagaagacgtcaaaacagccaccaacaatgcttcatcttcatgccagtcgacccccaggaaaggaaaaacccacaaacatgttcacaacgggcatgttttcaatggttccagcaggtcaacacgggagaaggaacctgttcaaaaacacaaaagcaaagaggccactcccgcaaaggagaagcacagcgatcaccgggctgacagccgccgggagcaggcttcagctaaccaccccgcagcggccccctccacgggttcctcggccaaggggcttgctgccacccatcaccacccccctctgcatcggtcggctcaggacttacggaaacaggtttctaaggtaaacggagtcactcgaatgtcatctctgggtgcaggtgtaaccagtgccaaaaagatgcgcgaggtcagaccttcaccatccaaaactgtgaagtacactgccacggtgacgaagggggctgtcacatacaccaaagccaagagagaactggtcaaggacaccaaacccaatcaccacaagcccagttccgctgtcaaccacacaatctcagggaaaactgaaagtagcaatgcaaaaacccgcaaacaggtgctatccctcgggggggcgtccaagtccactgggcccgccgtcaatggcctcaaggtcagtggcaggttgaacccaaagtcatgcactaaggaggtgggggggcggcagctgcgggagggcctgcagctgcgggaggggctgcggaactccaagaggagactggaagaggcacaccaggcggagaagccgcagtcgccccccaagaagatgaaaggggcggctggccccgccgaaggccctggcaagaaggccccggccgagagaggtctgctgaacggacacgtgaagaaggaagtgccggagcgcagtctggagaggaatcggccgaagcgggccacggccgggaagagcacgccaggcagacaagcacatggcaaggcggacagcgcctcctgtgaaaatcgttctacctcgcaaccggagtccgtgcacaagccgcaggactcgggcaaggccgagaagggcggcggcaaggccgggtgggcggccatggacgagatccccgtcctcaggccctccgccaaggagttccacgatccgctcatctacatcgagtcggtccgcgctcaggtggagaagttcgggatgtgcagggtgatcccccctccggactggcggcccgagtgcaagctcaacgatgagatgcggtttgtcacgcagattcagcacatccacaagctgggccggcgctggggccccaacgtgcagcggctggcctgcatcaagaagcacctcaaatctcagggcatcaccatggacgagctcccgctcatagggggctgtgagctcgacctggcctgctttttccggctgattaatgagatgggcggcatgcagcaagtgactgacctcaaaaaatggaacaaactagcagacatgctgcgcatccccagaactgcccaggaccggctggccaagctgcaggaggcctactgccagtacctactctcctacgactccctgtccccagaggagcaccggcggctggagaaggaggtgctgatggagaaggagatcctggagaagcgcaaggggccgctggaaggccacacagagaacgaccaccacaagttccaccctctgccccgcttcgagcccaagaatgggctcatccacggcgtggcccccaggaacggcttccgcagcaagctcaaggaggtgggccaggcccagttgaagactggccggcggcgactcttcgctcaggaaaaagaagtggtcaaggaagaggaggaggacaaaggcgtcctcaatgacttccacaagtgcatctataagggaaggtctgtttctctaacaactttttatcgaacagcgaggaatatcatgagcatgtgtttcagcaaggagcctgccccagccgaaatcgagcaagagtactggaggctagtggaagagaaggactgccacgtggcagtgcactgcggcaaggtggacaccaacactcacggcagtggattcccagtaggaaaatcagaacccttttcgaggcatggatggaacctcaccgtcctccccaataacacagggtccatcctgcgtcacctcggtgctgtgcctggagtgactattccctggctaaatattggcatggtcttttctacctcatgctggtctcgagaccaaaatcaccttccatacattgactacttacacactggtgctgactgcatttggtattgcattcctgctgaggaggagaacaagctggaagatgtggtccacaccctgctgcaagccaatggcaccccagggctgcagatgctggaaagcaacgtcatgatctccccggaggtgctgtgcaaagaggggatcaaggtgcacaggaccgtgcagcagagtggccagtttgtcgtctgcttcccgggatcctttgtgtccaaagtgtgctgtgggtacagcgtgtctgaaaccgtgcactttgctaccacccagtggacaagtatgggctttgagaccgccaaggaaatgaagcgtcgccatatagctaagccattctccatggagaagttactctaccagattgcacaagcagaagcaaaaaaagaaaacggtcccactctcagtaccatctcagccctcctggatgagctcagggatacagagctgcggcagcgcaggcagctgttcgaggctggcctccactcctccgcacgctatggcagccacgatggcagcagcacggtggcggacgggaagaaaaagcctcgaaagtggctgcagttggagacgtcagagaggaggtgtcagatctgccagcacctgtgctacctgtccatggtggtacaagagaacgaaaacgtcgtgttctgtctggagtgtgctctgcgccacgtggagaaacagaagtcctgccgagggctgaagttgatgtaccgctacgatgaggaacagattatcagtctggtcaatcagatctgcggcaaagtgtctggtaaaaacggcagcattgagaactgtctcagtaaacccacaccaaaaagaggtccccgcaagagagcgacagtggacgtgcccccctcccgtctgtcagcctccagttcatccaaaagtgcttcgagctcatcatgaagatgccaacgcccgtggtcgatttatatatatttttttgtaattattatattctagtttggagtacttgctgtaggattcaagctgtctttgcactagctctaaagaagattttcttctggttttagagaactaattttgttttagcattaaactgttgaacttttttttgtacttagaaaacctagatactgcagtcagattttggaaactgccgtatagtcactgttttaaaaaccccggaggggctgtattaatttgtattgccccatggctgacaaaagcctttttttttggttttgatttttttttttttgtaactgttggggggaaaaaggctttttaacccatttttgaagagggtgaagtttggagaacaaatttaaaaaccatcagtcatgtgagcagattttttagaagggataggagacacacgcgcacacacacacacacacgaaacttgaaatggctttgctttggctgtcgtcttctgccgtgtgccagatgagcttgtgatctgggaagccggggcacccccgttttgtttctctgggcggttgtggcagctgaaggcggacgttgtttcctaaccataggtggaacgaggagacgggagcgagtgggctctccaccagcacatcactatgcatctgttccaggaaagaagaaaagcgagcgaggaagacggaaaagactgcctgccttggaggggtcacatgagggagacctgtgcctgatttcattaggaaatccattctgttattttttggtgctgttggctactttatcaaaaaacccttcaatagcatccttaagatttaaaaaaaaaaaaaaaaaaaaggaaaaaaaagtgatggaagccgtaagtgcttctttgtcatcgacgtgcaatctttctaacattccatctccatctcaccgcttcttgtttgacaccttcacaagtcagcattaatctttcttttaaaacttgtttcatttatgatcatgtagagagccactaggaggcctgcagttatttttgaatgtgaaaatgcatttgcgttcatcttgtctattttttctcttcatgttgtaacaaaaaggaaaaaagaaaaaaaaatcccatcccttttgtacatatgcctgtaaattgttttaaatacttgagcctttttctcggtggggggtggggaggggggtgagaagacaagatgaagaaaagccttacatttcagtttcttcatcggttggattggatgcttacagggtttttcttgtaacatttataagtgctgcttacatcactgaacaacaacaaaaaaataataatggagtagctgttgcccttctccggttgtgtgtacagtatgtgtggaataaaaaagggaaactgttttcacaagctgttctttgtttcataattggattcatcaatcccgtagctacccatattgcactgagcttgccagtggtgactgccaggaacgtcctatgatccactttgttggttgttgttgcagaagactgaactgttttggaatatttaacaattacagaaacagtcaagtgttttccaatgtggttgtccggtttctatggccttgctgtgtactttccctctttttgacagtaaacttctgcctatggcttacagtttgacatttaatttattagcgctgctctgcacccctcccttgggagggagacttcatgtggtttattgcgagttttttgtttacttttcaggtttgtactacaaggtttaataataaaaacaaagttttttgga

SEQ ID NO: 2040 - protein, 1246 aa, Homo sapiens [sequence omitted]

SEQ ID NO: 2041 - DNA, 651 bp, Homo sapiens
gcccatgcccgcccccgcgtagacgctgtggtgtgtacggccgcagcggggcagggggtctccgaggccgctgcggcacgtaatcagagagctttcaaaagcatcactcatgaaactgacttgtttagagccctcccctgctccctgcgctgcactgacaatgccatctatacccctcagcatgacccaggaggaacatattttcatttcaatcactcttggaaggcacccagaattgctaaccaaattctggctccctttgaaatgaggcctgtatttgtggaggtcacgggacatacaggtgttcacatcatcctctgtgagatgaagaagagttgcatgcagcagttcattaagatcgatggcaaggtccgaactgacaaaacctaccctgctggattcatggatgtcatcagcattgacaagatgggagagaatttttgtctgatctatgacaccaagggtcactttgctgtacattgtattacacctgaggaagccaaaattggtgtgatcaccaacagagagaggcaccctggatcttttgacgtgtttcacatgaaagatgccaatggccacagctttgccactcaactttccaacatttttgttattggcaagggcaacaaaccatggatttctcttccctga

SEQ ID NO: 2042 - DNA, 632 bp, Homo sapiens
cctttccgtctggcggcagccatcaggtaagccaagatgggtgcatacaagtacatccaggagctatggagaaagaagcagtctgatgtcatgcgctttcttctgagggtccgctgctggcagtaccgccagctctctgctctccacagggctccccgccccacccggcctgataaagcgcgccgactgggctacaaggccaagcaaggttacgttatatataggattcgtgttcgccgtggtggccgtaaccagctaaagtttgctcgaagccttcagtccgttgcagaggagcgagttggacgccactgtggggctctgagggtcctgaattcttactgggttggtgaagattccacatacaaattttttgaggttatcctcattgatccattccataaagctatcagaagaaatcctgacacccagtggatcaccaaaccagtccacaagcacagggagatgcgtgggctgacatctgcaggccgaaagagccgtggccttggaaagggccataagttccaccacactattggtggctctcgccgggcagcttggagaaggcgcaatactctccagctccaccgttaccgctaatataagtaaagtctgtaaaattcatacttaataaa

SEQ ID NO: 2043 - protein, 186 aa, Homo sapiens
MGAYKYIQELWRKKQSDVMRFLLRVRCWQYRQLSALHRAPRPTRPDKARRLGYKAKQGYVIYRIRVRRGGRNQLKFARSLQSVAEERVGRHCGALRVLNSYWVGEDSTYKFFEVILIDPFHKAIRRNPDTQWITKPVHKHREMRGLTSAGRKSRGLGKGHKFHHTIGGSRRAAWRRRNTLQLHRYR

SEQ ID NO: 2044 - DNA, 9588 bp, Homo sapiens
ccgaccaacaccaacacccagctccgacgcagctcctctgcgcccttgccgccctccgagccacagctttcctcccgctcctgcccccggcccgtcgccgtctccgcgctcgcagcggcctcgggagggcccaggtagcgagcagcgacctcgcgagccttccgcactcccgcccggttccccggccgtccgcctatccttggccccctccgctttctccgcgccggcccgcctcgcttatgcctcggcgctgagccgctctcccgattgcccgccgacatgagctgcaacggaggctcccacccgcggatcaacactctgggccgcatgatccgcgccgagtctggcccggacctgcgctacgaggtgaccagcggcggcgggggcaccagcaggatgtactattctcggcgcggcgtgatcaccgaccagaactcggacggctactgtcaaaccggcacgatgtccaggcaccagaaccagaacaccatccaggagctgctgcagaactgctccgactgcttgatgcgagcagagctcatcgtgcagcctgaattgaagtatggagatggaatacaactgactcggagtcgagaattggatgagtgttttgcccaggccaatgaccaaatggaaatcctcgacagcttgatcagagagatgcggcagatgggccagccctgtgatgcttaccagaaaaggcttcttcagctccaagagcaaatgcgagccctttataaagccatcagtgtccctcgagtccgcagggccagctccaagggtggtggaggctacacttgtcagagtggctctggctgggatgagttcaccaaacatgtcaccagtgaatgtttggggtggatgaggcagcaaagggcggagatggacatggtggcctggggtgtggacctggcctcagtggagcagcacattaacagccaccggggcatccacaactccatcggcgactatcgctggcagctggacaaaatcaaagccgacctgcgcgagaaatctgctatctaccagttggaggaggagtatgaaaacctgctgaaagcgtcctttgagaggatggatcacctgcgacagctgcagaacatcattcaggccacgtccagggagatcatgtggatcaatgactgcgaggaggaggagctgctgtacgactggagcgacaagaacaccaacatcgctcagaaacaggaggccttctccatacgcatgagtcaactggaagttaaagaaaaagagctcaataagctgaaacaagaaagtgaccaacttgtcctcaatcagcatccagcttcagacaaaattgaggcctatatggacactctgcagacgcagtggagttggattcttcagatcaccaagtgcattgatgttcatctgaaagaaaatgctgcctactttcagttttttgaagaggcgcagtctactgaagcatacctgaaggggctccaggactccatcaggaagaagtacccctgcgacaagaacatgcccctgcagcacctgctggaacagatcaaggagctggagaaagaacgagagaaaatccttgaatacaagcgtcaggtgcagaacttggtaaacaagtctaagaagattgtacagctgaagcctcgtaacccagactacagaagcaataaacccattattctcagagctctctgtgactacaaacaagatcagaaaatcgtgcataagggggatgagtgtatcctgaaggacaacaacgagcgcagcaagtggtacgtgacgggcccgggaggcgttgacatgcttgttccctctgtggggctgatcatccctcctccgaacccactggccgtggacctctcttgcaagattgagcagtactacgaagccatcttggctctgtggaaccagctctacatcaacatgaagagcctggtgtcctggcactactgcatgattgacatagagaagatcagggccatgacaatcgccaagctgaaaacaatgcggcaggaagattacatgaagacgatagccgaccttgagttacattaccaagagttcatcagaaatagccaaggctcagagatgtttggagatgatgacaagcggaaaatacagtctcagttcaccgatgcccagaagcattaccagaccctggtcattcagctccctggctatccccagcaccagacagtgaccacaactgaaatcactcatcatggaacctgccaagatgtcaaccataataaagtaattgaaaccaacagagaaaatgacaagcaagaaacatggatgctgatggagctgcagaagattcgcaggcagatagagcactgcgagggcaggatgactctcaaaaacctccctctagcagaccagggatcttctcaccacatcacagtgaaaattaacgagcttaagagtgtgcagaatgattcacaagcaattgctgaggttctcaaccagcttaaagatatgcttgccaacttcagaggttctgaaaagtactgctatttacagaatgaagtatttggactatttcagaaactggaaaatatcaatggtgttacagatggctacttaaatagcttatgcacagtaagggcactgctccaggctattctccaaacagaagacatgttaaaggtttatgaagccaggctcactgaggaggaaactgtctgcctggacctggataaagtggaagcttaccgctgtggactgaagaaaataaaaaatgacttgaacttgaagaagtcgttgttggccactatgaagacagaactacagaaagcccagcagatccactctcagacttcacagcagtatccactttatgatctggacttgggcaagttcggtgaaaaagtcacacagctgacagaccgctggcaaaggatagataaacagatcgactttaggttatgggacctggagaaacaaatcaagcaattgaggaattatcgtgataactatcaggctttctgcaagtggctctatgatgctaaacgccgccaggattccttagaatccatgaaatttggagattccaacacagtcatgcggtttttgaatgagcagaagaacttgcacagtgaaatatctggcaaacgagacaaatcagaggaagtacaaaaaattgctgaactttgcgccaattcaattaaggattatgagctccagctggcctcatacacctcaggactggaaactctgctgaacatacctatcaagaggaccatgattcagtccccttctggggtgattctgcaagaggctgcagatgttcatgctcggtacattgaactacttacaagatctggagactattacaggttcttaagtgagatgctgaagagtttggaagatctgaagctgaaaaataccaagatcgaagttttggaagaggagctcagactggcccgagatgccaactcggaaaactgtaataagaacaaattcctggatcagaacctgcagaaataccaggcagagtgttcccagttcaaagcgaagcttgcgagcctggaggagctgaagagacaggctgagctggatgggaagtcggctaagcaaaatctagacaagtgctacggccaaataaaagaactcaatgagaagatcacccgactgacttatgagattgaagatgaaaagagaagaagaaaatctgtggaagacagatttgaccaacagaagaatgactatgaccaactgcagaaagcaaggcaatgtgaaaaggagaaccttggttggcagaaattagagtctgagaaagccatcaaggagaaggagtacgagattgaaaggttgagggttctactgcaggaagaaggcacccggaagagagaatatgaaaatgagctggcaaaggtaagaaaccactataatgaggagatgagtaatttaaggaacaagtatgaaacagagattaacattacgaagaccaccatcaaggagatatccatgcaaaaagaggatgattccaaaaatcttagaaaccagcttgatagactttcaagggaaaatcgagatctgaaggatgaaattgtcaggctcaatgacagcatcttgcaggccactgagcagcgaaggcgagctgaagaaaacgcccttcagcaaaaggcctgtggctctgagataatgcagaagaagcagcatctggagatagaactgaagcaggtcatgcagcagcgctctgaggacaatgcccggcacaagcagtccctggaggaggctgccaagaccattcaggacaaaaataaggagatcgagagactcaaagctgagtttcaggaggaggccaagcgccgctgggaatatgaaaatgaactgagtaaggtaagaaacaattatgatgaggagatcattagcttaaaaaatcagtttgagaccgagatcaacatcaccaagaccaccatccaccagctcaccatgcagaaggaagaggataccagtggctaccgggctcagatagacaatctcacccgagaaaacaggagcttatctgaagaaataaagaggctgaagaacactctaacccagaccacagagaatctcaggagggtggaagaagacatccaacagcaaaaggccactggctctgaggtgtctcagaggaaacagcagctggaggttgagctgagacaagtcactcagatgcgaacagaggagagcgtaagatataagcaatctcttgatgatgctgccaaaaccatccaggataaaaacaaggagatagaaaggttaaaacaactgatcgacaaagaaacaaatgaccggaaatgcctggaagatgaaaacgcgagattacaaagggtccagtatgacctgcagaaagcaaacagtagtgcgacggagacaataaacaaactgaaggttcaggagcaagaactgacacgcctgaggatcgactatgaaagggtttcccaggagaggactgtgaaggaccaggatatcacgcggttccagaactctctgaaagagctgcagctgcagaagcagaaggtggaagaggagctgaatcggctgaagaggaccgcgtcagaagactcctgcaagaggaagaagctggaggaagagctggaaggcatgaggaggtcgctgaaggagcaagccatcaaaatcaccaacctgacccagcagctggagcaggcatccattgttaagaagaggagtgaggatgacctccggcagcagagggacgtgctggatggccacctgagggaaaagcagaggacccaggaagagctgaggaggctctcttctgaggtcgaggccctgaggcggcagttactccaggaacaggaaagtgtcaaacaagctcacttgaggaatgagcatttccagaaggcgatagaagataaaagcagaagcttaaatgaaagcaaaatagaaattgagaggctgcagtctctcacagagaacctgaccaaggagcacttgatgttagaagaagaactgcggaacctgaggctggagtacgatgacctgaggagaggacgaagcgaagcggacagtgataaaaatgcaaccatcttggaactaaggagccagctgcagatcagcaacaaccggaccctggaactgcaggggctgattaatgatttacagagagagagggaaaatttgagacaggaaattgagaaattccaaaagcaggctttagaggcatctaataggattcaggaatcaaagaatcagtgtactcaggtggtacaggaaagagagagccttctggtgaaaatcaaagtcctggagcaagacaaggcaaggctgcagaggctggaggatgagctgaatcgtgcaaaatcaactctagaggcagaaaccagggtgaaacagcgcctggagtgtgagaaacagcaaattcagaatgacctgaatcagtggaagactcaatattcccgcaaggaggaggctattaggaagatagaatcggaaagagaaaagagtgagagagagaagaacagtcttaggagtgagatcgaaagactccaagcagagatcaagagaattgaagagaggtgcaggcgtaagctggaggattctaccagggagacacagtcacagttagaaacagaacgctcccgatatcagagggagattgataaactcagacagcgcccatatgggtcccatcgagagacccagactgagtgtgagtggaccgttgacacctccaagctggtgtttgatgggctgaggaagaaggtgacagcaatgcagctctatgagtgtcagctgatcgacaaaacaaccttggacaaactattgaaggggaagaagtcagtggaagaagttgcttctgaaatccagccattccttcggggtgcaggatctatcgctggagcatctgcttctcctaaggaaaaatactctttggtagaggccaagagaaagaaattaatcagcccagaatccacagtcatgcttctggaggcccaggcagctacaggtggtataattgatccccatcggaatgagaagctgactgtcgacagtgccatagctcgggacctcattgacttcgatgaccgtcagcagatatatgcagcagaaaaagctatcactggttttgatgatccattttcaggcaagacagtatctgtttcagaagccatcaagaaaaatttgattgatagagaaaccggaatgcgcctgctggaagcccagattgcttcagggggtgtagtagaccctgtgaacagtgtctttttgccaaaagatgtcgccttggcccgggggctgattgatagagatttgtatcgatccctgaatgatccccgagatagtcagaaaaactttgtggatccagtcaccaaaaagaaggtcagttacgtgcagctgaaggaacggtgcagaatcgaaccacatactggtctgctcttgctttcagtacagaagagaagcatgtccttccaaggaatcagacaacctgtgaccgtcactgagctagtagattctggtatattgagaccgtccactgtcaatgaactggaatctggtcagatttcttatgacgaggttggtgagagaattaaggacttcctccagggttcaagctgcatagcaggcatatacaatgagaccacaaaacagaagcttggcatttatgaggccatgaaaattggcttagtccgacctggtactgctctggagttgctggaagcccaagcagctactggctttatagtggatcctgttagcaacttgaggttaccagtggaggaagcctacaagagaggtctggtgggcattgagttcaaagagaagctcctgtctgcagaacgagctgtcactgggtataatgatcctgaaacaggaaacatcatctctttgttccaagccatgaataaggaactcatcgaaaagggccacggtattcgcttattagaagcacagatcgcaaccggggggatcattgacccaaaggagagccatcgtttaccagttgacatagcatataagaggggctatttcaatgaggaactcagtgagattctctcagatccaagtgatgataccaaaggattttttgaccccaacactgaagaaaatcttacctatctgcaactaaaagaaagatgcattaaggatgaggaaacagggctctgtcttctgcctctgaaagaaaagaagaaacaggtgcagacatcacaaaagaataccctcaggaagcgtagagtggtcatagttgacccagaaaccaataaagaaatgtctgttcaggaggcctacaagaagggcctaattgattatgaaaccttcaaagaactgtgtgagcaggaatgtgaatgggaagaaataaccatcacgggatcagatggctccaccagggtggtcctggtagatagaaagacaggcagtcagtatgatattcaagatgctattgacaagggccttgttgacaggaagttctttgatcagtaccgatccggcagcctcagcctcactcaatttgctgacatgatctccttgaaaaatggtgtcggcaccagcagcagcatgggcagtggtgtcagcgatgatgtttttagcagctcccgacatgaatcagtaagtaagatttccaccatatccagcgtcaggaatttaaccataaggagcagctctttttcagacaccctggaagaatcgagccccattgcagccatctttgacacagaaaacctggagaaaatctccattacagaaggtatagagcggggcatcgttgacagcatcacgggtcagaggcttctggaggctcaggcctgcacaggtggcatcatccacccaaccacgggccagaagctgtcacttcaggacgcagtctcccagggtgtgattgaccaagacatggccaccaggctgaagcctgctcagaaagccttcataggcttcgagggtgtgaagggaaagaagaagatgtcagcagcagaggcagtgaaagaaaaatggctcccgtatgaggctggccagcgcttcctggagttccagtacctcacgggaggtcttgttgacccggaagtgcatgggaggataagcaccgaagaagccatccggaaggggttcatagatggccgcgccgcacagaggctgcaagacaccagcagctatgccaaaatcctgacctgccccaaaaccaaattaaaaatatcctataaggatgccataaatcgctccatggtagaagatatcactgggctgcgccttctggaagccgcctccgtgtcgtccaagggcttacccagcccttacaacatgtcttcggctccggggtcccgctccggctcccgctcgggatctcgctccggatctcgctccgggtcccgcagtgggtcccggagaggaagctttgacgccacagggaattcttcctactcttattcctactcatttagcagtagttctattgggcactagtagtcagttgggagtggttgctataccttgacttcatttatatgaatttccactttattaaataatagaaaagaaaatcccggtgcttgcagtagagtgataggacattctatgcttacagaaaatatagccatgattgaaatcaaatagtaaaggctgttctggctttttatcttcttagctcatcttaaataagcagtacacttggatgcagtgcgtctgaagtgctaatcagttgtaacaatagcacaaatcgaacttaggatttgtttcttctcttctgtgtttcgatttttgatcaattctttaattttggaagcctataatacagttttctattcttggagataaaaattaaatggatcactgatattttagtcattctgcttctcatctaaatatttccatattctgtattaggagaaaattaccctcccagcaccagcccccctctcaaacccccaacccaaaaccaagcattttggaatgagtctcctttagtttcagagtgtggattgtataacccatatactcttcgatgtacttgtttggtttggtattaatttgactgtgcatgacagcggcaatcttttctttggtcaaagttttctgtttattttgcttgtcatattcgatgtactttaaggtgtctttatgaagtttgctattctggcaataaacttttagactttt

SEQ ID NO: 2045 - DNA, 616 bp, Homo sapiens
tccaagaagaggaagtttgtcactgatggcatcttctaagctgaaatgaatgagtttcttactcaggagctggctgaagatggctactctggagttgagatgcgagttacaccaaccaggacagaaatcattgtcttagccaccagaacacagaatgttcttggtgagaagggccggcggattcgggaactgactgctgtagttcagaagaggtttggctctccagagggcagtgtagagctttatgctgaagaggtggccactaggggtctgtgtgccattgcccaggcagagtctctgccttacaaactcctaggagggcttgctgtgcggagggcctgctatggtgtgtcgcggttcatcatggaaactggggccaaaggctgtgaggtcgtggtgtctgggaaactctgaggacagagagctaaatccatgaagtttgtggacggcctgatgatccacagcagagaccctgttaactactacgttgacactgctgtgcgccatgtgttgctcagacagagtgtgctgggcatcaaggtgaagatcatgctgccctgggacccaaagatgagataactgcccaccacccccatctcagaacagaagggtggga

SEQ ID NO: 2046 - protein, 122 aa, Homo sapiens [sequence omitted]

SEQ ID NO: 2047 - DNA, 1251 bp, Homo sapiens
atgaccaggttcatcatcgcctctctcctcccctctacctttctccctggtttccatagagcagaaatctgggtcaaggtggagtgcattggatcaagagttgctatgatttgggaaaagctctgcaggataagtcgaataaaatcagaccttgcagaaactcaatctggcccctgggaactctccggtgtggagctggaggaaaaaccagtacagtactctctcaggaaaacaagctcagaggcggaatcaacaagacagctgacgaacacatcctcttcaagagaggccagggtctcaagctcaagtggccaaggcaagacgggtcaaagtcagagtggtggtcacagtcctggaggtggcaagaaggatgacaaggacaagaaaaagaaatatgaacctcctgtaccaactggagtggggaaaaagaagaaaacaaaaggatcagatgttgccagcaaactgccactggaatcgggaacaaatggaaccattagaagaaaagcaagaggaggaaagatcaaaggtggacgatctgaggggaccccgatgtcagtaggaaccttggaagagatcaatgacagtcatgccatcgtgtctacatctgtgggctcaggacactacgccaacattctttcatttgtagacaaggatctgctggcaactggctgctcagtcctgctcaatcacaaggtgcatgccatgagaggggtgctgatggatgacgtggatcccctggtcacagtgatgaaggtggaaaaggtcccccaggagacctatgccaatactgggaggttggataatcaaattcaggaaattaaggaatctgtggagcttcctctcacccatgctgaacattatgaagagatgggtataaagcctcctaagggggtcattctctatggtccacctggcatagttaaaaccttgctagccaaagcggtagcaaaccaaacctcagccactttcttgaaagtggttggctctgaacttattcagaagtacctaggtgatgggcccaaacttgtacgggaattgtttcaagttgctggagaacatgcaccatccatcgtgtttactgatgaaactgacgccattgggacaaaaagatatgactcaaattctggtgaagctggtctgatggccttaagagaacgtagaatgaaagcaacaaatgaagacttcaaaaaatctaaagaaaatgttctttataagaaacaggaaggcacccctgaggggctgtctctctag

SEQ ID NO: 2048 - protein, 233 aa, Homo sapiens
MSVGTLEEINDSHAIVSTSVGSGHYANILSFVDKDLLATGCSVLLNHKVHAMRGVLMDDVDPLVTVMKVEKVPQETYANTGRLDNQIQEIKESVELPLTHAEHYEEMGIKPPKGVILYGPPGIVKTLLAKAVANQTSATFLKVVGSELIQKYLGDGPKLVRELFQVAGEHAPSIVFTDETDAIGTKRYDSNSGEAGLMALRERRMKATNEDFKKSKENVLYKKQEGTPEGLSL

SEQ ID NO: 2049 - DNA, 1783 bp, Homo sapiens
ggggggctcgggctgggggcgcggcctgtgccggccgccccaccctccttgcataaaagccggagcccgcggggccggcgctctcagcccgtcggttcccgagcgccttcccggtgaccccgcagtgggtgtgtgaggggaggacggacagacccagacgccgccggaccaggaggacgctgacgaggcaccatgcgtgagatcgtgcacatccaggcgggccagtgcggcaaccagatcggcgccaagttttgggaggtcatcagtgatgagcatgggattgaccccactggcagttaccatggagacagtgatttgcagctggagagaatcaatgtttactacaatgaagccactggtaacaaatatgttcctcgggccatcctcgtggatctggagccaggcacgatggattcggttaggtctggaccattcggccagatcttcagaccagacaatttcgtgtttggccagagtggagccgggaataactgggccaagggccactacacagagggagccgagctggtcgactcggtcctggatgtggtgaggaaggagtcagagagctgtgactgtctccagggcttccagctgacccactctctggggggcggcacggggtccgggatgggcaccctgctcatcagcaagatccgggaagagtacccagaccgcatcatgaacaccttcagcgtcatgccctcacccaaggtgtcagacacggtggtggagccctacaacgccaccctctcggtccaccagctggtggaaaacacagatgaaacctactgcattgacaacgaggccctgtatgacatctgcttccgcaccctgaagctgaccacccccacctacggggacctcaaccacctggtgtcggccaccatgagcggggtcaccacctgcctgcgcttcccgggccagctgaacgcagacctgcgcaagctggcggtgaacatggtgcccttccctcgcctgcacttcttcatgcccggcttcgcgcccctgaccagccggggcagccagcagtaccgggcgctcacggtgcccgagctcacccagcagatgttcgactccaagaacatgatggccgcctgcgacccgcgccacggccgctacctgacggtggctgccatcttccggggccgcatgtccatgaaggaggtggacgagcagatgctcaacgtgcagaacaagaacagcagctacttcgtggagtggatccccaacaacgtgaagacggccgtgtgcgacatcccgccccgcggcctgaagatgtcggccaccttcatcggcaacagcacggccatccaggagctgttcaagcgcatctccgagcagttcacggccatgttccggcgcaaggccttcctgcactggtacacgggcgagggcatggacgagatggagttcaccgaggccgagagcaacatgaacgacctggtgtccgagtaccagcagtaccaggacgccacggccgacgaacaaggggagttcgaggaggaggagggcgaggacgaggcgtagatgcccccgcgagacgggttagggaaagcggaggaggaaagcgagggggtggggggcttcccgggacgataacctggcagtggaaggaaagaagcatggtctactttaggtgtgcgctgggtctctggtgctcttcactgttgcctgtcactttttttttccttttttgtaatattgatgacatcaatgtaacatttgagatatttctgaattactgttgtaatggctaaaatcacataaacgtttgtgtcgg

SEQ ID NO: 2050 - DNA, 1594 bp, Homo sapiens
gcccgccggtccacgccgcgcaccgctccgagggccagcgccacccgctccgcagccggcaccatgcgcgagatcgtgcacatccaggcgggccagtgcggcaaccagatcggcgccaagttttgggaggtcatcagcgatgagcatgggatcgaccccacaggcagttaccatggagacagtgacttgcagctggagagaatcaacgtgtactacaatgaggctgctggtaacaaatatgtacctcgggccatcctggtggatctggagcctggcaccatggactctgtcaggtctggacccttcggccagatcttcagaccagacaacttcgtgttcggccagagtggagccgggaataactgggccaagggccactacacagagggagccgagctggtcgactcggtcctggatgtggtgaggaaggagtcagagagctgtgactgtctccagggcttccagctgacccactctctggggggcggcacggggtccgggatgggcaccctgctcatcagcaagatccgggaagagtacccagaccgcatcatgaacaccttcagcgtcatgccctcacccaaggtgtcagacacggtggtggagccctacaacgccaccctctcggtccaccagctggtggaaaacacagatgaaacctactccattgataacgaggccctgtatgacatctgcttccgcaccctgaagctgaccacccccacctacggggacctcaaccacctggtgtcggccaccatgagcggggtcaccacctgcctgcgcttcccgggccagctgaacgcagacctgcgcaagctggcggtgaacatggtgcccttccctcgcctgcacttcttcatgcccggcttcgcgcccctgaccagccggggcagccagcagtaccgggcgctcacggtgcccgagctcacccagcagatgttcgactccaagaacatgatggccgcctgcgacccgcgccacggccgctacctgacggtggctgccatcttccggggccgcatgtccatgaaggaggtggacgagcagatgctcaacgtgcagaacaagaacagcagctacttcgtggagtggatccccaacaacgtgaagacggccgtgtgcgacatcccgccccgcggcctgaagatgtcggccaccttcatcggcaacagcacggccatccaggagctgttcaagcgcatctccgagcagttcacggccatgttccggcgcaaggccttcctgcactggtacacgggcgagggcatggacgagatggagttcaccgaggccgagagcaacatgaacgacctggtgtccgagtaccagcagtaccaggacgccacggccgacgaacaaggggagttcgaggaggaggagggcgaggacgaggcttaaaaacttctcagatcaatcgtgcatccttagtgaacttctgttgtcctcaagcatggtctttctacttgtaaactatggtgctcagttttgcctctgttagaaattcacactgttgatgtaatgatgtggaactcctctaaaaattacagtattgtctgtgaaggtatctatactaataaaaaagcatgtgtag

SEQ ID NO: 2051 - protein, 445 aa, Homo sapiens
MREIVHIQAGQCGNQIGAKFWEVISDEHGIDPTGSYHGDSDLQLERINVYYNEAAGNKYVPRAILVDLEPGTMDSVRSGPFGQIFRPDNFVFGQSGAGNNWAKGHYTEGAELVDSVLDVVRKESESCDCLQGFQLTHSLGGGTGSGMGTLLISKIREEYPDRIMNTFSVMPSPKVSDTVVEPYNATLSVHQLVENTDETYSIDNEALYDICFRTLKLTTPTYGDLNHLVSATMSGVTTCLRFPGQLNADLRKLAVNMVPFPRLHFFMPGFAPLTSRGSQQYRALTVPELTQQMFDSKNMMAACDPRHGRYLTVAAIFRGRMSMKEVDEQMLNVQNKNSSYFVEWIPNNVKTAVCDIPPRGLKMSATFIGNSTAIQELFKRISEQFTAMFRRKAFLHWYTGEGMDEMEFTEAESNMNDLVSEYQQYQDATADEQGEFEEEEGEDEA

SEQ ID NO: 2052 - DNA, 1520 bp, Homo sapiens
ccgcgttcctgccggcaccgcgcctgccctctgccgcgctccgccctgccgccgaccgcacgcccgccgcgggacatggcacacgcaccggcacgctgccccagcgcccggggctccggggacggcgagatgggcaagcccaggaacgtggcgctcatcaccggtatcacaggccaggatggttcctacctggctgagttcctgctggagaaaggctatgaggtccatggaattgtacggcggtccagttcatttaatacgggtcgaattgagcatctgtataagaatccccaggctcacattgaaggaaacatgaagttgcactatggcgatctcactgacagtacctgccttgtgaagatcattaatgaagtaaagcccacagagatctacaaccttggagcccagagccacgtcaaaatttcctttgacctcgctgagtacactgcggacgttgacggagttggcactctacgacttctagatgcagttaagacttgtggccttatcaactctgtgaagttctaccaagcctcaacaagtgaactttatgggaaagtgcaggaaataccccagaaggagaccacccctttctatccccggtcaccctatggggcagcaaaactctatgcctattggattgtggtgaacttccgtgaggcgtataatctctttgcagtgaacggcattctcttcaatcatgagagtcccagaagaggagctaatttcgttactcgaaaaattagccggtcagtagctaagatttaccttggacaactggaatgtttcagtttgggaaatctggatgccaaacgagattggggccatgccaaggactatgtggaggctatgtggttgatgttgcagaatgatgagccggaggacttcgttatagctactggggaggtccatagtgtccgggaatttgtcgagaaatcattcttgcacattggaaaaaccattgtgtgggaaggaaagaatgaaaatgaagtgggcagatgtaaagagaccggcaaagttcacgtgactgtggatctcaagtactaccggccaactgaagtggactttctgcagggcgactgcaccaaagcgaaacagaagctgaactggaagccccgggtcgctttcgatgagctggtgagggagatggtgcacgccgacgtggagctcatgaggacaaaccccaatgcctgagcagcgcctcggagcccggcccgccctccggctacaatccccgcagagtctccggtgcagacgcgctgcggggatggggagcggcgtgccaatctgcgggtcccctgcggcccctgctgccgctgcgctgtcccggccgcaagagcggggccgccccgccgaggtttgtagcagccgggatgtgaccctccagggtttgggtcgctttgcgtttgtcgaagcctcctctgaatggctttgtgaaatcaagatgttttaatcacattcactttacttgaaattatgttgttacacaacaaattgtggggccttcaaattgtttttcc

SEQ ID NO: 2053 - protein, 372 aa, Homo sapiens
MAHAPARCPSARGSGDGEMGKPRNVALITGITGQDGSYLAEFLLEKGYEVHGIVRRSSSFNTGRIEHLYKNPQAHIEGNMKLHYGDLTDSTCLVKIINEVKPTEIYNLGAQSHVKISFDLAEYTADVDGVGTLRLLDAVKTCGLINSVKFYQASTSELYGKVQEIPQKETTPFYPRSPYGAAKLYAYWIVVNFREAYNLFAVNGILFNHESPRRGANFVTRKISRSVAKIYLGQLECFSLGNLDAKRDWGHAKDYVEAMWLMLQNDEPEDFVIATGEVHSVREFVEKSFLHIGKTIVWEGKNENEVGRCKETGKVHVTVDLKYYRPTEVDFLQGDCTKAKQKLNWKPRVAFDELVREMVHADVELMRTNPNA

SEQ ID NO: 2054 - DNA, 5247 bp, Homo sapiens
cgccgcggcccggtaccaacgggtggtctcgccgagggagctgtcgtgcctcgtggtcccgggactgcagtggtgtgcgctctcggcgcgtggcgctaggcatggcgatggatcaagtaaacgcgctgtgcgagcagctggtgaaagcggtgacggtcatgatggaccccaactccacccagcgctaccggctggaagccctcaagttttgtgaggagtttaaagaaaagtgtcctatctgtgtcccctgtggcttgaggttggctgagaaaacacaagttgccatcgtcagacattttggccttcagatcctggaacacgttgtcaagtttcggtggaacggcatgtctcgattggagaaggtgtatctgaagaacagtgtcatggagctgattgcaaatggaacattgaacattttggaagaggagaaccatattaaagatgctctgtctcgaattgtagtggaaatgatcaagcgagagtggccacagcattggcctgacatgctaatagaattggacactctttccaaacaaggggaaacacagacagaattggtgatgtttatccttttgcgactggcagaggatgtagtgacttttcagacacttccccctcaaagaagaagggacatccagcaaacattaacccagaacatggaaaggatcttcagttttctgcttaacacacttcaagaaaatgtaaacaagtatcagcaagtgaagacagatacttctcaggagtcaaaggcgcaagcaaactgtcgagtaggagttgcagcactgaatactctagcaggctatattgactgggtgtctatgagtcacatcactgctgaaaactgtaaactcctggagatactgtgtttgctgttgaatgaacaggaacttcagttgggagccgctgagtgtcttctcattgcagtcagcagaaaaggcaagttggaagaccggaagcccttgatggtcttatttggagatgttgccatgcattatatactctccgccgcacagactgctgatggaggaggtttggtagaaaaacactacgtctttctgaagaggctctgtcaggtgttgtgtgcgctgggcaatcagctgtgtgcattgctgggtgcagattctgatgtagaaacaccatcaaactttggaaaatacctggaatcttttcttgctttcacaacccatccaagtcagtttctacgctcttcaactcagatgacttggggagccctcttcaggcatgaaatcctgtcccgtgatcctttgctattagcaataataccaaaatatcttcgtgcttccatgactaacttggtcaagatgggctttccttctaaaacagacagccctagctgtgaatattctcggtttgattttgatagcgatgaggacttcaatgctttcttcaactcctcccgagcacaacaaggagaggtgatgaggttggcatgtcgtttggatcccaaaactagcttccagatggctggggagtggctaaagtatcaactatcaacttttcttgatgctggttctgtgaattcttgttctgcagttggaactggagaaggaagcctctgttccgtcttctcaccttcattcgtgcagtgggaagccatgactctttttttggaaagtgttatcacccagatgtttcgaacactaaatagagaagaaattcctgttaatgatggaatagagctattgcagatggttctgaactttgataccaaggatcccctcatcctgtcctgcgtccttactaatgtctctgcactctttccatttgtcacctacagaccagagttcctgccccaggtcttctctaagctattttcatctgtcacttttgaaactgttgaagaaagtaaggcccccagaacccgggcagtgaggaatgtgaggaggcatgcttgttcctccatcatcaagatgtgtcgtgactacccccagcttgtgctgcccaattttgacatgctttataaccatgtgaagcaactcctctccaatgagctactcctgacacaaatggagaagtgtgccctcatggaagccctggttctcattagcaaccaatttaagaactacgagcgtcagaaggtgttcctagaggagctgatggcaccagtggccagcatctggctttctcaagacatgcacagagtgctgtcagatgttgatgctttcattgcgtatgtgggtacagatcagaagagctgtgacccaggcctggaggatccgtgtggcttaaaccgtgcacgaatgagcttttgtgtatacagcattctgggtgtggtgaaacgaacttgctggcccactgacctagaagaggccaaagctgggggatttgtggtgggttatacatccagtggaaatccaatcttccgtaacccctgcacagagcagattctgaaacttcttgacaatttgcttgcgcttataagaacccacaatacattatatgcaccagaaatgctagccaaaatggcagagcctttcaccaaggctctggatatgcttgacgcggaaaaatctgctatattaggattacctcaacctctcttggaactcaatgactctcctgtcttcaaaaccgtcttggaaagaatgcagcgtttcttctctaccctctatgaaaactgttttcatatcctagggaaggcaggcccttccatgcagcaagacttctatactgtggaggaccttgctacccagcttctcagctcagcctttgtcaacttgaacaatattcctgactaccgactcagacccatgcttcgggtctttgtaaagcctctggtgctcttctgtcccccagagcactatgaagccctggtatcccccatcctcggacctcttttcacctacctccatatgaggctttctcagaaatggcaagttatcaaccaaaggagcctgctgtgtggagaagatgaggctgcagatgaaaacccagagtctcaagagatgctggaggagcaactggtgaggatgttaacccgagaagtcatggacctaatcacggtttgctgtgtttcaaagaagggtgctgaccacagtagtgctcccccagcagatggagacgatgaagaaatgatggccacagaggtcaccccctcagctatggcagagcttacagacctgggcaaatgtctgatgaagcatgaggatgtttgtacagcgctattaattacagccttcaattccctggcctggaaagatactctgtcctgccagaggacaacctcacagctctgctggcctctcctcaaacaagtgctgtcagggacactgctcgcagatgcagttacgtggcttttcaccagtgtgctgaaaggcttacagatgcacgggcagcacgacgggtgcatggcttccctggtccatctggccttccagatatacgaggcactgcgccccaggtacctggagataagagctgtaatggagcaaatccctgaaatacagaaggactcactggaccagtttgactgcaagcttttaaacccctccctgcagaaagtggctgacaagcgccgaaaggaccaattcaaacgcctcattgctggttgcattgggaaacccttgggagagcagttccgaaaagaagttcacattaagaatcttccctcacttttcaaaaaaacaaagccaatgctggagacggaggtgctggacaatgatgggggtggcctggccaccatctttgaaccctgaatcaagcttttgggcatccttcctcggcctttcttgtcatctcttctttccctttgtagccgatctctaggcccttcttgcactgccacctcactttccaccactgtcagcctggaaagagatccaggtctggagctggagagaacaggccctgtgcaggaccagaagtaattatactaaagtatcaagaaagggagttagggcttaaactattctgtctagatgtcccagatagttcccattctacttggagatttggcttttccaagaaaagctagagcagagcagcccttctcccacaagccctcccacccccgtgcagccacatacctgtacagaatggtaactaagggtgctgtgcccaaccctgcgactagcaaggctcgcagcaagagcacagccctcaactacttgtgccagagtttctcttggaccactccaactcccactgagcccttttgctgctgggctggcaggaaactttccccactccctaaggggcatgtctgggttaggtgctaagtgctgaagagaacttggtcagttctctcaactttgctttgggcaagaatctggtcacctgatgggatccatggtacaggctactgctaaacttggcacagtatcaagtatagtacctccaaggaccagggctgggcagtctttagtgctaacatcccctttagagttcacacatcttgcccttccatgaatgacccctcagtctggcctccccagcctcaaggtccactcaggcacaagagccacagtaccctagatagtgtcacatgacaccgttgtcatccaaggataatacagaccaactaggctacatctgtgatgagcagctagcaaagccgctggtcttctcctaggactaagtccaggtgccttccacaatctcatggtctttcaggtccctggttacttttctcaaaggccatttccaaaagaatacatgccttcacatcacaacctgtactgtgagtccattctagaggtcactgaaaggccctgtaaagagaggacatggatacgggacctggccctgaggttattactggccgtaaggcagagttaatccatacagaaaccagtgtgtccatgtgctctgcacaaaaacagacctgttgtccatccagtccactgacaagagggtttccccgagagccgaagtggactgaagctacagtttttagctggtgcgggccacaggcagggtcagattgagaagaagcaaagctggggaagcagaagttgggagtcttgtgttgctccctcttcctgtgtggtgctctgggtttctgtggatcgtgaaggcgatctcaagagtgtttccctccaaacctgatagctgcctattcctgtctggttggggctgtggaggatgtagttgtatttattgcattgtaatatttttaacatcctgtgacttcatgctagaaattttctattgtttatagaaactttttgtagaaacattaactctaaagcacatctgcatgtcagtaaaaatctcagtttcgtacag

SEQ ID NO: 2055 - protein, 1204 aa, Homo sapiens
MAMDQVNALCEQLVKAVTVMMDPNSTQRYRLEALKFCEEFKEKCPICVPCGLRLAEKTQVAIVRHFGLQILEHVVKFRWNGMSRLEKVYLKNSVMELIANGTLNILEEENHIKDALSRIVVEMIKREWPQHWPDMLIELDTLSKQGETQTELVMFILLRLAEDVVTFQTLPPQRRRDIQQTLTQNMERIFSFLLNTLQENVNKYQQVKTDTSQESKAQANCRVGVAALNTLAGYIDWVSMSHITAENCKLLEILCLLLNEQELQLGAAECLLIAVSRKGKLEDRKPLMVLFGDVAMHYILSAAQTADGGGLVEKHYVFLKRLCQVLCALGNQLCALLGADSDVETPSNFGKYLESFLAFTTHPSQFLRSSTQMTWGALFRHEILSRDPLLLAIIPKYLRASMTNLVKMGFPSKTDSPSCEYSRFDFDSDEDFNAFFNSSRAQQGEVMRLACRLDPKTSFQMAGEWLKYQLSTFLDAGSVNSCSAVGTGEGSLCSVFSPSFVQWEAMTLFLESVITQMFRTLNREEIPVNDGIELLQMVLNFDTKDPLILSCVLTNVSALFPFVTYRPEFLPQVFSKLFSSVTFETVEESKAPRTRAVRNVRRHACSSIIKMCRDYPQLVLPNFDMLYNHVKQLLSNELLLTQMEKCALMEALVLISNQFKNYERQKVFLEELMAPVASIWLSQDMHRVLSDVDAFIAYVGTDQKSCDPGLEDPCGLNRARMSFCVYSILGVVKRTCWPTDLEEAKAGGFVVGYTSSGNPIFRNPCTEQILKLLDNLLALIRTHNTLYAPEMLAKMAEPFTKALDMLDAEKSAILGLPQPLLELNDSPVFKTVLERMQRFFSTLYENCFHILGKAGPSMQQDFYTVEDLATQLLSSAFVNLNNIPDYRLRPMLHVFVKPLVLFCPPEHYEALVSPILGPLFTYLHMRLSQKWQVINQRSLLCGEDEAADENPESQEMLEEQLVRMLTREVMDLITVCCVSKKGADHSSAPPADGDDEEMMATEVTPSAMAELTDLGKCLMKHEDVCTALLITAFNSLAWKDTLSCQRTTSQLCWPLLKQVLSGTLLADAVTWLFTSVLKGLQMHGQHDGCMASLVHLAFQIYEALRPRYLEIRAVMEQIPEIQKDSLDQFDCKLLNPSLQKVADKRRKDQFKRLIAGCIGKPLGEQFRKEVHIKNLPSLFKKTKPMLETEVLDNDGGGLATIFEP

SEQ ID NO: 2056 - DNA, 929 bp, Homo sapiens
aaaacaccaaatggcggatgacgccggtgcagtgggggggcctggaggccctggtggccctgggatggggaaccgcggtggcttccgcagaggtttcgccagtggcatccggggccggggtcgcagccgtggaccgggccggggctgaggccgcggagctcgcggaggcaaggccaaagataaggagtggatgcccgtcaccaagctgggccgcttggtcaaggacatgaagatcaagtccctggaggagatctatctcttctccctgcccattaaggaatcagagatcattgactttttcctgggggcctctctcaaggatgaggttttgaagattatgccagtgcagaagcagacccgtgctggccagcgcaccaggttcaaggcgtttgttgctatcggggactacagtggccacgtcggtctgggtgttaagtgctccaaggaggtggccaccgccacccgtggggccatcatcctggccaagctctccattgtccccgtgcacagaggctactaggggaacaagatcggcaagccccacaccgtcccctgcaaggtgacaggccgccgtggctctgtgctggtgcgcctcatccctgcacccaggggcactggcattgtctccgcacctgtgcccaagaagctgctcatgatggctggtatcgatgactgctacacctcagcccagggctgcactgccaccctgggcaacttcgccaaggccacctttgatgccatttctaagacctacagctacctgacccccgacctctggaaggagactgtatttaccaagtctccctatcaggaattcactgaccacctcgtcaagacccacaccagagtctctgtgcagcagacccaggctccagctgtggctacaacatagggtttttatacaagaaaaataaagtgaattaagcgtg

SEQ ID NO: 2057 - DNA, 2162 bp, Homo sapiens
gggctgcgctctccagctgtggctatggccccagccccgagatgaggagggagagaactaggggcccgcaggcctgggaatttccgtcccccaccaagtccggatgctcactccaaagtctcagcaggcccctgagggagggagctgtcagccagggaaaaccgagaacaccatcaccatgacaaccagtcaccagcctcaggacagatacaaagctgtctggcttatcttcttcatgctgggtctgggaacgctgctcccgtggaattttttcatgacggccactcagtatttcacaaaccgcctggacatgtcccagaatgtgtccttggtcactgctgaactgagcaaggacgcccaggcgtcagccgcccctgcagcacccttgcctgagcggaactctctcagtgccatcttcaacaatgtcatgaccctatgtgccatgctgcccctgctgttattcacctacctcaactccttcctgcatcagaggatcccccagtccgtacggatcctgggcagcctggtggccatcctgctggtgtttctgatcactgccatcctggtgaaggtgcagctggatgctctgcccttctttgtcatcaccatgatcaagatcgtgctcattaattcatttggtgccatcctgcagggcagcctgtttggtctggctggccttctgcctgccagctacacggcccccatcatgagtggccagggcctagcaggcttctttgcctccgtggccatgatctgcgctattgccagtggctcggagctatcagaaagtgccttcggctactttatcacagcctgtgctgttatcattttgaccatcatctgttacctgggcctgccccgcctggaattctaccgctactaccagcagctcaagcttgaaggacccggggagcaggagaccaagttggacctcattagcaaaggagaggagccaagagcaggcaaagaggaatctggagtttcagtctccaactctcagcccaccaatgaaagccactctatcaaagccatcctgaaaaatatctcagtcctggctttctctgtctgcttcatcttcactatcaccattgggatgtttccagccgtgactgttgaggtcaagtccagcatcgcaggcagcagcacctgggaacgttacttcattcctgtgtcctgtttcttgactttcaatatctttgactggttgggccggagcctcacagctgtattcatgtggcctgggaaggacagccgctggctgccaagcctggtgctggcccggctggtgtttgtgccactgctgctgctgtgcaacattaagccccgccgctacctgactgtggtcttcgagcacgatgcctggttcatcttcttcatggctgcctttgccttctccaacggctacctcgccagcctctgcatgtgcttcgggcccaagaaagtgaaaccagctgaagcaaaaaccgcaggagccatcatggcctccttcctgtgtctgggtctggcactgggggctgttttctccttcctgttccgggcaattgtgtgacaaaggatggacagaaggactgcctgcctccctccctgtctgcctcctgccccttccttctgccaggggtgatcttgagtggtctggcggttttttcttctaactgacttctgctttccacggcgtgtgctgggcccggatctccaggccctggggagggagcctctggacggacagtggggacattgtgggtttggggctcagagtcgagggacggggtgtagcctcggcatttgcttgagtttctccactcttggctctgactgatccctgcttgtgcaggccagtggaggctcttgggcttggagaacacgtgtgtctctgtgtatgtgtctgtgtgtctgcgtccgtgtctgtcagactgtctgcctgtcctggggtggctaggagctgggtctgaccgttgtatggtttgacctgatatactccattctcccctgcgcctcctcctctgtgttctctccatgtccccctcccaactccccatgcccagttcttacccatcatgcaccctgtacagttgccacgttactgccttttttaaaaatatatttgacagaaaccaggtgccttcagaggctctctgatttaaataaacctttcttgttttttt

SEQ ID NO: 2058 - DNA, 2026 bp, Homo sapiens
gcgcggcacttccgctggccgctggctcgctggccgctcctggaggcggcggcgggagcgcagggggcgcgcggcccggggactcgcattccccggttccccctccaccccacgcggcctggaccatggacgccagatggtgggcagtggtggtgctggctgcgttcccctccctaggggcaggtggggagactcccgaagcccctccggagtcatggacccagctatggttcttccgatttgtggtgaatgctgctggctatgccagctttatggtacctggctacctcatggtgcagtacttcaggcggaagaactacctggagaccggtaggggcctctgctttcccctggtgaaagcttgtgtgtttggcaatgagcccaaggcctctgatgaggttcccctggcgccccgaacagaggcggcagagaccaccccgatgtggcaggccctgaagctgctcttctgtgccacagggctccaggtgtcttatctgacttggggtgtgctgcaggaaagagtgatgacccgcagctatggggccacagccacatcaccgggtgagcgctttacggactcgcagttcctggtgctaatgaaccgagtgctggcactgattgtggctggcctctcctgtgttctctgcaagcagccccggcatggggcacccatgtaccggtactcctttgccagcctgtccaatgtgcttagcagctggtgccaatacgaagctcttaagttcgtcagcttccccacccaggtgctggccaaggcctctaaggtgatccctgtcatgctgatgggaaagcttgtgtctcggcgcagctacgaacactgggagtacctgacagccaccctcatctccattggggtcagcatgtttctgctatccagcggaccagagccccgcagctccccagccaccacactctcaggcctcatcttactggcaggttatattgcttttgacagcttcacctcaaactggcaggatgccctgtttgcctataagatgtcatcggtgcagatgatgtttggggtcaatttcttctcctgcctcttcacagtgggctcactgctagaacagggggccctactggagggaacccgcttcatggggcgacacagtgagtttgctgcccatgccctgctactctccatctgctccgcatgtggccagctcttcatcttttacaccattgggcagtttggggctgccgtcttcaccatcatcatgaccctccgccaggcctttgccatccttctttcctgccttctctatggccacactgtcactgtggtgggagggctgggggtggctgtggtctttgctgccctcctgctcagagtctacgcgcggggccgtctaaagcaacggggaaagaaggctgtgcctgttgagtctcctgtgcagaaggtttgagggtggaaagggcctgaggggtgaagtgaaataggaccctcccaccatccccttctgctgtaacctctgagggagctggctgaaagggcaaaatgcaggtgttttctcagtatcacagaccagctctgcagcaggggattggggagcccaggaggcagccttcccttttgccttaagtcacccatcttccagtaagcagtttattctgagccccgggggtagacagtcctcagtgaggggttttggggagtttggggtcaagagagcataggtaggttccacagttactcttcccacaagttcccttaagtcttgccctagctgtgctctgccaccttccagactcactcccctctgcaaatacctgcatttcttaccctggtgagaaaagcacaagcggtgtaggctccaatgctgctttcccaggagggtgaagatggtgctgtgctgaggaaaggggatgcagagccctgcccagcaccaccacctcctatgctcctggatccctaggctctgttccatgagcctgttgcaggttttggtactttagaaatgtaactttttgctcttataattttattttattaaattaaattactgca

SEQ ID NO: 2059 - DNA, 2353 bp, Homo sapiens
cagaatcggtagacattgcgaaccaggttatgaagtgcaaggctgcagttgcttgggaggctggaaagcctctctccatagaggagatagaggtggcacccccaaaggctcatgaagttcgaatcaagatcattgccactgcggtttgccacaccgacgcctataccctgaggggagctgatcctgagggttgttttccagtgatcttgggacatgaaggtgccggaattgaggaaagtgttggcgagggagttactaagctgaaggcgggtgacactgtcatcccactttacatcccacagtgtggagaatgcaaattttgtctatatcctaaaactaacctttgccagaagataagagtcactcaagggaaaggattaatgccagatggtaccagcagatttacttgcaaaggaaagacaattttgcgttacatgggaaccagcacattttctgaatacacagttgtagctgatatctctgttgctaaaatagatcctttagcacctttggataaactctgccttctaggttgtggcatttcagctggtgatggtgctgctgtgaacactgccaaggtggaacctggctctgtttgtgccgtctttggtctgggaggagttggattggcagttatcaagggctgtaaagtggctggtgcatcccggatcattggtgtggacatcaataaagataaatttgcaagggccaaagagtttggagccactgaatgtattaaccctcagggttttagtaaacccatccaggaagggctcattgagacgactgatggaggagtggactattcctttgaatgtattggtaatgtgaaggtcatgagagcagcacttgaggcttatcacaagggctggggagtcagcgtggtggttggagtagctgcttcaggtgaagaaattgccactcgtccattccagctggtaacaggtcgcacatggaaaggaactgcctttggaggatggaagagtgtagaaagtgtcccaaagttggtgtctgaatatatgtccaaaaaaataaaagttgatgaatttgtgactcacaatctgtcttttggtgaaattaacaaagcctttcaactgatgcattctggaaagagcattcgaactgttgtaaagatttaattcaaaagagaaaaataatgtccaacctgtcgtgatgtgatgggagcagcttaacaggcagggagaagcgcctccaaactcacagcctcgtagagcttcgcagctaccccagagaatagtgttatgagtgtaattcatgaatctctataatcaacgacaaggataattcagtcatggacctgttttctggacgctcctccacataaataattgctagcttattaaggaatattttaacataataaaagtaatttctacatttgtgtagaaattgtctttgttttatgctgtaatcattgtcatggtttgtctgcccattatcttcattctgtaagggaaatgtaaaggaagcagggcagtggtgggtgtctgaaacctcagaaacattcgttgaagttttaagggtctcagtcccgttgattgaagaacagatcctagccatcagtgacaaagttaatcaggagccaagtctgcttctgtgatattatcttgaagggaggtactgtgccttgttcgtgcctgtaccccaaattcctagtatggcatctgcccctcaggggacactaaaatgtattattgaaacagcattctggacttaaataggtgtatgtgtgtgttggttgtggctgtactatttctagtatagtgaattacatactgaatatccaagttctcagcacctacttttgtcaaatcttaacattttgccacttccacatcacattgccattcctcccctccagaggtaacaattatccaaaatttgatgtttgtcattcctgtgttgttgtactttcactgtgtataacctaaaccatctactctttagtactgttttatatatttttaagccttatacttgctcattctacagcttttctttttttcactcattattgtataattatatgtgaagctttcattcattaattttagtactgtgtagcagtattcaattacgcgaactatcttaattcatctgttctccagttgaaggcatgaagttgttgccagtttctgtattacaacactgtagtggaacattcttctgcattgggctcactacattagttacttaagatgtgtatcacagaataaacacatttagccttatagacattgccaaatttatcttcaaagtaaatgtgagtttttgtgaattacgtgagtgtagaatggtgttttattatgagtttagtttgcattttccacaa

SEQ ID NO: 2060 - DNA, 342 bp, Homo sapiens
atgatcaagggtgttacactaggcttccattacaagatgagatctgtgtatgctcacttccccatcaacgtcgttatccaggagaatgggtctcttgttgaaatccgaaatttcttgggtaaaaaatacatccgcagggtttggatgagagcaggtgttgtttgttcagtatctcaagcccagaaagatgaattaatccttgaaggaaatgacattgagcttgtttcaaattcagcggctttgattcaacaagccacaacagttaaaaagaaggatatcagggaatttttggatggtatctatgtctctgaaaaaggaactggtcagcaggctgatgaataa

SEQ ID NO: 2061 - protein, 113 aa, Homo sapiens [sequence omitted]

SEQ ID NO: 2062 - DNA, 608 bp, Homo sapiens
gctgtcggtccacgccgcccgtcgcgctgcccgcccgctcggcgtcggccgccgccatgggagtgcacgtggaaaccatctccccaggagactggcgcaccttcccgaagcgcagccagacctgcgtgatgcactacaccgggatgcttgaagatggaaagaaatttgattcctcccgggacagaaacaagccctttaagtttatgctaggcaagcaggaggtgatccgaggctgggaagaaggggttgtccagatgagtgtgggtcagagagccaaactgactatatctccagattatgcctatggtgccactgggcacccaggcatcatcccaccacatgccactctcgtcttcgatgtggagcttctaaaactggaatgacaggaatggcctcctcccttagctccctgttcttggatctgccatggagggatctggtgcctccagacgtgtgcacataaatccatatggagcttttcctgatgttccactccactttgtatagacatctgccccaactgaattattctccaagttgagagatgtccttgggttaaattaaaagccctacctaaaactgaggtggggatggggagaggctttgcc

SEQ ID NO: 2063 - protein, 108 aa, Homo sapiens
MGVHVETISPGDWRTFPKRSQTCVMHYTGMLEDGKKFDSSRDRNKPFKFMLGKQEVIRGWEEGVVQMSVGQRAKLTISPDYAYGATGHPGIIPPHATLVFDVELLKLE

SEQ ID NO: 2064 - DNA, 1924 bp, Homo sapiens
cgccttggccatttgccagccacacaacccaggacctccaatggggacgcccactgaggatcctagtggttgctcttttccttgtctctttctttccccccagtctttccttgttctatcatgggcaatttcccgccttccatccctctttcttctgtctggcttgtgtcctcagaaacctcaaacctcttcaccttgcacccaatctaaaggctaaacgtctaatttttttctgtaacacgtcctggccccagtataaattagaaaatggcgctcagtggccagaaaacagcacttccaatttctctattttgtgggacttagacaacttctatggaaaaatgggcaaatgggtctgaggtaccctacttccaggcattttttacatacgatctctccctagcctatgcttccaatgtaatccatccccaattttccttatttcccttctgtctacccctccttcttccactggcgatgctgactcctctttgtctgttgacccctccgatctttctcccccaccacctatccgaacctgcttctaattctcccccagaacctatttctacccacaatccaccctcttatgcccctcccattaccacccttcctcacatcctctatggcttacagtttgggcctgcgaccaacccccaggcccctgcctagcaatttcccctcggagaggtggcaggaaccaaaggaatagttcgggttcaggtccctttctccctgttcgacctttcccaaattagtgaacatctaggctctttcccatctgaccccaccaaatatatacgagaattccaatacttaacccagtcctataatcttacttggaatgacttaaatgtcatccttacctctaccctcgctcctgaggagtgagagtgggtttggatcctagctcaatcttaggctgataaccgccggtgccgtaagcctggcctccagtaaggtgctagggcagtaccctgtgaagaccccggatggacttaccaggccctgggacccatgcatagccaggcgggactacatgatctcttgcctagttaaagggcttcagaaggctgcatataaagccgtcaattatgacaaactaaaaaacaaaaacaaaaacaaaaaaaaccactcagaacaaagataaaaatccagctcagtttatggcctgtctacctgccaccctcaggcgatatacagcactagaccctgaagggatagaaggccgccttattcttaacatgcattttattacccagtcagtttctgacagtagaaagaaacttcaaaaattagagtctggctctcagatcccacaacaggaattaatcaacctcgccttcaaggtgttcaataatagggaagagactgcccggcgacagcgcatttcagaactacagatgcttgcctccgccataagacaaaccccagctgcactgcctacctgcaagaacttcaaggcatctaaacgcaacatccaacagcccctctgggactttgcttcaagcgatgaaaacctggccactgggcaaggaatgcctgcagcctgggattcctcctaagccatgccccgcctgtgcgtccctcactggaagtctgactgcccgactctcatcgccacttccggagctcctggagctcaaacccaaagctccccaccgactccttcccagatctcctcggcttggcggctgaagactgacgctgcccgaacgtctcggaggccccttagacaatcgcggatgccgagcttcgggtaactcttagggtggaggcataaaaagacaggaatgtaaggtcctctgagcaggcggcgccatggtcaagccatcgtgacccctgtgactcacacgtacacatccagaaggtctcctggagccagaaagtctgggacgacaggaaaaccacaaaagaagaaaaa

SEQ ID NO: 2065 - DNA, 2555 bp, Homo sapiens
gggcctggacgctttggcaaccgctactcccgggggtgctttttctgcagggacgaagtgccacctatgctagtggcgggtctggaagcctagaggggaaccaggctgcagagccgggccaagggattagcggcgggcggcgggcatggcctggactgcgcgggaccgcggggccctggggctgctgctgttggggctctgcttgtgcgcggctcaaagaggtcccccgggtgagcagggtcctcccgggcctccgggcccccctggagttccaggcatcgatggcatcgacggtgaccgaggtcctaagggccccccgggccccccgggtcctgcaggtgaaccgggaaagccaggagctccaggcaagcctggcacacctggcgctgatggattaacaggacctgatggatcccctggctccattgggtcaaagggacaaaaaggagaacctggtgtgcctggatcgcgtggatttccaggccgtggtattcctggaccccctggtcctcctgggacagcaggactccctggagagcttggccgtgtaggacctgttggtgaccctgggagaagaggaccacctggcccccctggccccccaggacccagaggaacaattggctttcatgatggagatccattgtgtcccaatgcctgtccaccaggtcgctcaggatatccaggcctaccaggcatgaggggtcataaaggggctaaaggagaaattggtgaaccaggaagacaaggacacaagggtgaagaaggtgaccagggagaactcggagaagttggagctcaaggacctccaggagcccagggtttgcgaggcatcaccggcatagttggggacaaaggggaaaaaggtgctcggggcttagatggtgaacctgggcctcagggtcttcctggtgcacctggtgatcaaggacagcgaggacctccaggagaagcaggtcccaaaggagatagaggggctgaaggtgctagaggaattcctggtctccctgggcccaaaggagacacgggtttgccaggtgtggatggccgtgatgggatccctggaatgcctggaacaaagggtgaaccaggaaaacctgggcctcctggtgatgcaggattgcaggggttaccaggtgtacctggaattcctggtgcaaagggtgttgctggtgaaaagggtagcacaggtgctccagggaagcctggtcagatgggaaattcaggcaaaccgggccaacaggggcctccaggagaggtgggaccccgaggaccccaggggcttcctggcagtagaggagaattaggaccagtgggatccccaggcctaccaggtaaactgggttctctgggtagccctggcctccctggcttgcctgggccccctggacttcctggaatgaaaggtgacaggggtgtagtcggtgaaccgggtccaaagggtgaacagggtgcctctggtgaagaaggtgaagcaggagaaaggggggaacttggagatataggattacctggcccaaagggatctgcaggtaatcctggggaacctggcttgagagggcctgagggaagtcgggggcttcctggagtggaaggaccaagaggaccacctggaccccggggtgtgcagggagaacagggtgccaccggcctgcctggtgtccagggccctccgggtagagcaccgacagatcagcacattaagcaggtttgcatgagagtcatacaagaacattttgctgagatggctgccagtcttaagcgtccagactcaggtgccactgggcttcctggaaggcctggccctcctggtccccccggccctcctggagagaatggtttcccaggccagatgggaattcgtggccttccgggcattaaggggccccctggtgctcttggtttgaggggacctaaaggtgacttgggagaaaagggggagcgtggccctccaggaagaggtcccaacggtttgcctggagctataggtctcccaggtgacccaggccctgccagctatggcagaaatggccgagacggtgagcgaggccccccaggggtggcaggaattcctggagtgcctggacccccgggacctcctgggcttcccggtttctgtgagccagcctcctgcaccatgcaggctggtcagcgagcatttaacaaagggcctgacccttgaaaggcttactgctgcatggctgtctgcatgaaccacgcctggtgaaggagcctgggtgagaaacaccatccaaagctggggcaaagatgattaccttcagcatgattacaatgtattaccttcagtatgattacagaagtcctacttgacaatcacatatagaagaacggtgctattcagtaagttctctttcctttcccttggagggaagacagcagagtcatcagttaaaaaaaaaaaaagaaaaccaaacacctcccttgaataaatttatactcctgttcccaggatcttgagctttagtgtgctatacctatgtgtcttatcgtgggccactgtgccaataaacaaaaacaactgtttggtttacctc

SEQ ID NO: 2066 - DNA, 2961 bp, Homo sapiens
ggccgcgccctgcagattgtctcttgttgcgtaagtttttttgaccgtcactcgtgtcagcttcaaagtcagatagatttttctcccagcatgttctacttccgaggctgtggccgttgggtcgcggtttccttcaccaagcagcaatttccgttggcacggttgagcagtgacagcgcggcgccccggactccgcacttcgacgtgatagtcattggtggaggacatgccgggactgaggcagccaccgccgccgctcggtgcggctctcggactctgctcctcactcaccgcgtggacacgatcggtcagatgtcatgtaatccttcctttggtggcatcggaaagggacatttaatgagggaagtagatgccttggatggcctgtgttctcgcatctgtgaccagtctggtgtacattataaagtattaaaccggcgtaagggaccagctgtgtggggtctgagagctcagattgataggaaactctacaaacagaacatgcagaaagaaatcttgaatacaccactgcttactgttcaggagggagctgtagaagatcttattcttacagaaccagagcctgaacacactgggaaatgccgtgtcagtggggttgttttggtggatggaagcacagtatatgcagagagtgtgattctgactactgggacatttctgagaggcatgattgtaattggattggagacgcatccagcaggacgtttaggggatcagccttctataggattggctcagacactggagaagttagggtttgtggtgggaaggttgaagactgggactccaccccgaattgccaaagagtccattaatttcagtattctaaacaagcatataccggacaatccatccataccattcagctttaccaatgagacagtatggattaagccagaagatcagctgccatgttacttgactcacaccaaccctagagtggatgagattgtccttaagaaccttcaccttaatagtcatgttaaagaaacgacaagaggacctcgatactgtccctccattgaatcaaaagttttgcgttttccaaaccgtctacatcaggtttggttggaacctgaaggaatggattctgaccttatctacccacaggggttatctatgacgctaccagctgagttacaagagaaaatgatcacatgcatcagaggcttggagaaagctaaagtgattcagccagacggagttttgctcttgttgcccaggatggagtgcaatggtgcgatctcggctcaccacaacctccccctgccaggctacggtgttcagtatgattacttagatccccgtcagatcaccccttccttggagactcatttggttcaacgactcttctttgctggacagatcaatggcaccactggttatgaggaagctgcagctcaaggtgtgatagccggaatcaacgccagtcttcgggtcagtcgcaagcctccctttgtggttagccgaacagaaggttacataggagtcttgattgatgacctcactactctgggcaccagtgaaccataccgcatgtttaccagccgagtagagttccgtttgtcactgcgccctgataatgctgacagccggctcacactgcgagggtataaagacgctggctgtgtgtcccaacaacgatatgaaagagcttgttggatgaagtcttctttagaagaaggcatttctgtgttgaaatctattgagtttttgagctctaaatggaaaaaattaatcccagaggcttctataagtactagtagaagtctgcctgtcagagctctcgatgttctgaagtatgaggaagttgacatggattcattagccaaggctgttccagagcccttgaagaagtatactaaatgtagagagctggctgaaagactgaaaatagaagccacttatgaatcagtgttgttccatcaactacaagaaataaagggagttcagcaagatgaagctctccaactgccaaaagacctagattatttgactatcagggatgtgtctttgtcccatgaagttcgagagaaactacattttagtcgtccacagacgatcggggctgctagtcgcatacccggagtaacacctgccgccatcatcaatctgctgagatttgtgaagaccactcaacgaagacagtcggctatgaatgaatcatccaagactgatcaatacttatgtgatgcagacagacttcaagagagagagttatagctttcaattcataaaagatttttaaagagcatataaataatttgatcaatacaacagtatagataaaagaattatttagcacatgttaaaatagctttattaggttactatgggtttgccattaatttctgagtgggacagaaattataattgtgctttttcgtgtatatgaaaaaactagtcgtaaacaatttgtactctttctttaaggagctgtaatacaaataactttgtgcagtgttcatcaaagagagagacagtgaacctaaaactgaacctggaataaaactcaacatgcagatttgcctactcatagggactttgcctattaagtctaccaaattaaaagtcttatcattcagcgtgttttgagagttaataatcttttgcttggttatactaggctaggaagcaatatcaaagcccttaaattctcaagactaaagacttgagattatataaaattatccagaatcattcagctaatactattggaatatagtatgtagggtgaaagttgacagaaatctgtacttcttcaggaaatcctcactggtaattgttttgaacattaatgaaagccctataaaatagaaagattggaaatcaccattgtttcctattatccacagtgtggatggatacttatttggtgacctagttatgggagaattgagtaacgttagttattttatatcataccataaaaatattttc

SEQ ID NO: 2067 - protein, 717 aa, Homo sapiens
MFYFRGCGRWVAVSFTKQQFPLARLSSDSAAPRTPHFDVIVIGGGHAGTEAATAAARCGSRTLLLTHRVDTIGQMSCNPSFGGIGKGHLMREVDALDGLCSRICDQSGVHYKVLNRRKGPAVWGLRAQIDRKLYKQNMQKEILNTPLLTVQEGAVEDLILTEPEPEHTGKCRVSGVVLVDGSTVYAESVILTTGTFLRGMIVIGLETHPAGRLGDQPSIGLAQTLEKLGFVVGRLKTGTPPRIAKESINFSILNKHIPDNPSIPFSFTNETVWIKPEDQLPCYLTHTNPRVDEIVLKNLHLNSHVKETTRGPRYCPSIESKVLRFPNRLHQVWLEPEGMDSDLIYPQGLSMTLPAELQEKMITCIRGLEKAKVIQPDGVLLLLPRMECNGAISAHHNLPLPGYGVQYDYLDPRQITPSLETHLVQRLFFAGQINGTTGYEEAAAQGVIAGINASLRVSRKPPFVVSRTEGYIGVLIDDLTTLGTSEPYRMFTSRVEFRLSLRPDNADSRLTLRGYKDAGCVSQQRYERACWMKSSLEEGISVLKSIEFLSSKWKKLIPEASISTSRSLPVRALDVLKYEEVDMDSLAKAVPEPLKKYTKCRELAERLKIEATYESVLFHQLQEIKGVQQDEALQLPKDLDYLTIRDVSLSHEVREKLHFSRPQTIGAASRIPGVTPAAIINLLRFVKTTQRRQSAMNESSKTDQYLCDADRLQEREL

SEQ ID NO: 2068 - DNA, 1733 bp, Homo sapiens
ctcatttaacttttttaatgggtctcaaaattctgtgacaaatttttggtcaagttgtttccattaaaaagtactgattttaaaaactaataacttaaaactgccacacgcaaaaaagaaaaccaaagtggtccacaaaacattctcctttccttctgaaggttttacgatgcattgttatcattaaccagtcttttactactaaacttaaatggccaattgaaacaaacagttctgagaccgttcttccaccactgattaagagtggggtggcaggtattagggataatattcatttagccttctgagctttctgggcagacttggtgaccttgccagctccagcagccttcttgtccactgctttgatgacacccaccgcaactgtctgtctcatatcacgaacagcaaagcgacccaaaggtggatagtctgagaagctctcaacacacatgggcttgccaggaaccatatcaacaatggcagcatcaccagacttcaagaatttagggccatcttccagctttttaccagaacggcgatcaatcttttccttcagctcagcaaacttgcatgcaatgtgagccgtgtggcaatccaatacaggggcatagccggcgcttatttggcctggatggttcaggataatcacctgagcagtgaagccagctgcttccattggtgggtcatttttgctgtcaccagcaacgttgccacgacgaacatccttgacagacacattcttgacattgaagcccacattgtccccaggaagagcttcactcaaagcttcatggtgcatttcgacagattttacttccgttgtaacgttgactggagcaaaggtgaccaccataccgggtttgagaacaccagtctccactcggccaacaggaacagtaccaataccaccaattttgtagacatcctggagaggcaggcgcaagggcttgtcagttggacgagttggtggtaggatgcagtccagagcctcaagcagcgtggttccactggcattgccatccttacgggtgactttccatcccttgaaccaaggcatgttagcacttggctccagcatgttgtcaccattccaaccagaaattggcacaaatgctactgtgtcggggttgtagccaattttcttaatgtaagtgctgacttccttaacaatttcctcatatctcttctggctgtagggtggctcagtggaatccattttgttaacaccgacaattagttgtttcacacccagtgtgtaagccagaagggcatgctctcgggtctgcccattcttggagataccagcttcaaattcaccaacaccagcagcaacaatcaggacagcacagtcaacctgagatgtccctgtaatcatgtttttgataaagtctctgtgtcctggggcatcaatgatagtcacatagtacttgctggtctcaaatttccacaaggagatatcaatggtgataccacgttcacgctcagctttcagtttatccaagacccaggcatacttgaaggagccctttcccatctcagcagcctccttctcaaatttttcaatggttcttttgtcgatgccaccgcatttatagatcagatggccagtagtggtggacttgcccgaatctacgtgtccaatgacgacaatgttgatatgagtcttttcctttcccattttggcttttaggggtagttttcacgacacctgtgttctggcggcaaacccg

SEQ ID NO: 2069 - DNA, 1506 bp, Homo sapiens
acgggtttgccgccagaacacaggtgtcgtgaaaactacccctaaaagccaaaatgggaaaggaaaagactcatatcaacattgtcgtcattggacacgtagattcgggcaagtccaccactactggccatctgatctataaatgcggtggcatcgacaaaagaaccattgaaaaatttgagaaggaggctgctgagatgggaaagggctccttcaagtatgcctgggtcttggataaactgaaagctgagcgtgaacgtggtatcaccattgatatctccttgtggaaatttgagaccagcaagtactatgtgactatcattgatgccccaggacacagagactttatcaaaaacatgattacagggacatctcaggctgactgtgctgtcctgattgttgctgctggtgttggtgaatttgaagctggtatctccaagaatgggcagacccgagagcatgcccttctggcttacacactgggtgtgaaacaactaattgtcggtgttaacaaaatggattccactgagccaccctacagccagaagagatatgaggaaattgttaaggaagtcagcacttacattaagaaaattggctacaaccccgacacagtagcatttgtgccaatttctggttggaatggtgacaacatgctggagccaagtgctaacatgccttggttcaagggatggaaagtcacccgtaaggatggcaatgccagtggaaccacgctgcttgaggctctggactgcatcctaccaccaactcgtccaactgacaagcccttgcgcctgcctctccaggatgtctacaaaattggtggtattggtactgttcctgttggccgagtggagactggtgttctcaaacccggtatggtggtcacctttgctccagtcaacgttacaacggaagtaaaatctgtcgaaatgcaccatgaagctttgagtgaagctcttcctggggacaatgtgggcttcaatgtcaagaatgtgtctgtcaaggatgttcgtcgtggcaacgttgctggtgacagcaaaaatgacccaccaatggaagcagctggcttcactgctcaggtgattatcctgaaccatccaggccaaataagcgccggctatgcccctgtattggattgccacacggctcacattgcatgcaagtttgctgagctgaaggaaaagattgatcgccgttctggtaaaaagctggaagatggccctaaattcttgaagtctggtgatgctgccattgttgatatggttcctggcaagcccatgtgtgttgagagcttctcagactatccacctttgggtcgctttgctgttcgtgatatgagacagacagttgcggtgggtgtcatcaaagcagtggacaagaaggctgctggagctggcaaggtcaccaagtctgcccagaaagctcagaaggctaaatgaatattatccctaatacctgccaccccactcttaatcagtggtggaagaacggtctcagaactgt

SEQ ID NO: 2070 - DNA, 2053 bp, Homo sapiens
ccggctcgcgccctccgggcccagcctcccgagccttcggagcgggcgccgtcccagcccagctccggggaaacgcgagccgcgatgcctggggggtgctcccggggccccgccgccggggacgggcgtctgcggctggcgcgactagcgctggtactcctgggctgggtctcctcgtcttctcccacctcctcggcatcctccttctcctcctcggcgccgttcctggcttccgccgtgtccgcccagcccccgctgccggaccagtgccccgcgctgtgcgagtgctccgaggcagcgcgcacagtcaagtgcgttaaccgcaatctgaccgaggtgcccacggacctgcccgcctacgtgcgcaacctcttccttaccggcaaccagctggccgtgctccctgccggcgccttcgcccgccggccgccgctggcggagctggccgcgctcaacctcagcggcagccgcctggacgaggtgcgcgcgggcgccttcgagcatctgcccagcctgcgccagctcgacctcagccacaacccactggccgacctcagtcccttcgctttctcgggcagcaatgccagcgtctcggcccccagtccccttgtggaactgatcctgaaccacatcgtgccccctgaagatgagcggcagaaccggagcttcgagggcatggtggtggcggccctgctggcgggccgtgcactgcaggggctccgccgcttggagctggccagcaaccacttcctttacctgccgcgggatgtgctggcccaactgcccagcctcaggcacctggacttaagtaataattcgctggtgagcctgacctacgtgtccttccgcaacctgacacatctagaaagcctccacctggaggacaatgccctcaaggtccttcacaatggcaccctggctgagttgcaaggtctaccccacattagggttttcctggacaacaatccctgggtctgcgactgccacatggcagacatggtgacctggctcaaggaaacagaggtagtgcagggcaaagaccggctcacctgtgcatatccggaaaaaatgaggaatcgggtcctcttggaactcaacagtgctgacctggactgtgacccgattcttcccccatccctgcaaacctcttatgtcttcctgggtattgttttagccctgataggcgctattttcctcctggttttgtatttgaaccgcaaggggataaaaaagtggatgcataacatcagagatgcctgcagggatcacatggaagggtatcattacagatatgaaatcaatgcggaccccagattaacaaacctcagttctaactcggatgtctgagaaatattagaggacagaccaaggacaactctgcatgagatgtagacttaagctttatccctactaggcttgctccactttcatcctccactatagatacaacggactttgactaaaagcagtgaaggggatttgcttccttgttatgtaaagtttctcggtgtgttctgttaatgtaagacgatgaacagttgtgtatagtgttttaccctcttctttttcttggaactcctcaacacgtatggagggatttttcaggtttcagcatgaacatgggcttcttgctgtctgtctctctctcagtacagttcaaggtgtagcaagtgtacccacacagatagcattcaacaaaagctgcctcaactttttcgagaaaaatactttattcataaatatcagttttattctcatgtacctaagttgtggagaaaataattgcatcctataaactgcctgcagacgttagcaggctcttcaaaataactccatggtgcacaggagcacctgcatccaagagcatgcttacattttactgttctgcatattacaaaaaataacttgcaacttcataacttctttgacaaagtaaattacttttttgattgcagtttatatgaaaatgtactgatttttttttaataaactgcatcgagatccaaccgactgaattgttaaaaaaaaaaaaaaataaagattcttaaaagaa

SEQ ID NO: 2071 - protein, 420 aa, Homo sapiens
MPGGCSRGPAAGDGRLRLARLALVLLGWVSSSSPTSSASSFSSSAPFLASAVSAQPPLPDQCPALCECSEAARTVKCVNRNLTEVPTDLPAYVRNLFLTGNQLAVLPAGAFARRPPLAELAALNLSGSRLDEVRAGAFEHLPSLRQLDLSHNPLADLSPFAFSGSNASVSAPSPLVELILNHIVPPEDERQNRSFEGMVVAALLAGRALQGLRRLELASNHFLYLPRDVLAQLPSLRHLDLSNNSLVSLTYVSFRNLTHLESLHLEDNALKVLHNGTLAELQGLPHIRVFLDNNPWVCDCHMADMVTWLKETEVVQGKDRLTCAYPEKMRNRVLLELNSADLDCDPILPPSLQTSYVFLGIVLALIGAIFLLVLYLNRKGIKKWMHNIRDACRDHMEGYHYRYEINADPRLTNLSSNSDV

SEQ ID NO: 2072 - DNA, 780 bp, Homo sapiens
cctggaggccggcttggcggccaggcgcaagttcgcgacgtcacccgatccgaccctggtacccggagcggccctggcgcggctgtcggctggcaccagctccctgcaggaagagtggagaggttgttcccggcggggagcgggtaccggccgcatcccggccggaccagggagcctgggcgccggcagttcggctgctggtgtttaatgtgtgtttttggtcttctccccaagcaatggaaacagagttgctgcttcagtggtagtagtacttgcaattcaagtaacactaacttaaaatctactttagacacagtgggcgatagtatgaaagaaccaagaaggatttcggctgtcctggagctgataatgctgcaaacaagccatgatgagatgttctcccacatttacaaaatccgggagactgcggatgggctgtgcctggaggtggaggggaaattggtaagtaggacagagggtaacattgatgacttgctcattggtggaaatgcctccgctgaaggcactgaaagcgaaggcaaacttgaagaacagagaccagaaagagtaaaaccttttatgacaggggctgcagaacaaatcaaacacatccttgctaatttcaaaagctaccacttctttattggtgaaaacatgaatccagatggcatggttgctccacaggactaccaaatagaagttcaagcttcggatgacactgaaaggtgttcaggagattttggttccactagaaataatgaaaatttatgccaagaatag

SEQ ID NO: 2073 - protein, 190 aa, Homo sapiens [sequence omitted]

SEQ ID NO: 2074 - DNA, 2932 bp, Homo sapiens
agagaggagccgactcggcagggactgggggaccgggccgagagtgcgagcgagcgagggagggagtgagggagcgtgcgagccagaaggggaaaggcggccactcgtgcctgagcgaccgcagaggggagtgggagcagtggggtaaaggagcggggggcgggaataagaaaggccgagagaaggcggacagaggctagtggtggtggtggtggtagggggagaaggaggagctggaggagggcaggggctgagggagtgagtgaagcggacgcgcgagggaggggagggaagggaagggaagggaagggggggtcacgcgggggcgcgcgcgcgcaccgggagcgcgctcggaggcgagtggaactggatcgggtttgctgccagcggcgtgagcttcggccgccattttacaacagctccactcgcgccggacacagggagcagcgagcacgcgtttcccgcaacccgataccatcggacaggatttctccgcctcagcccaacggggagatctctggaaacatggctacagaacatgttaatggaaatggtactgaagagcccatggatactacttctgcagttatccattcagaaaattttcagacattgcttgatgctggtttaccacagaaagttgctgaaaaactagatgaaatttacgttgcagggctagttgcacatagtgatttagatgaaagagctattgaagctttaaaagaattcaatgaagacggtgcattggcagttcttcaacagtttaaagacagtgatctctctcatgttcagaacaaaagtgcctttttatgtggagtcatgaagacttacaggcagagagaaaaacaagggaccaaagtagcagattctagtaaaggaccagatgaggcaaaaattaaggcactcttggaaagaacaggctacacacttgatgtgaccactggacagaggaagtatggaggaccacctccagattccgtttattcaggtcagcagccttctgttggcactgagatatttgtgggaaagatcccaagagatctatttgaggatgaacttgttccattatttgagaaagctggacctatatgggatcttcgtctaatgatggatccactcactggtctcaatagaggttatgcgtttgtcactttttgtacaaaagaagcagctcaggaggctgttaaactgtataataatcatgaaattcgttctggaaaacatattggtgtctgcatctcagttgccaacaataggctttttgtgggctctattcctaagagtaaaaccaaggaacagattcttgaagaatttagcaaagtaacagagggtcttacagacgtcattttataccaccaaccggatgacaagaaaaaaaacagaggcttttgctttcttgaatatgaagatcacaaaacagctgcccaggcaaggcgtaggttaatgagtggtaaagtcaaggtctgggggaatgttggaactgttgaatgggctgatcctatagaagatcctgatcctgaggttatggcaaaggtaaaagtgctgtttgtacgcaaccttgccaatactgtaacagaagagattttagaaaaggcatttagtcagtttgggaaactggaacgagtgaagaagttaaaagattatgcgttcattcattttgatgagcgagatggtgctgtcaaggctatggaagaaatgaatggcaaagacttggagggagaaaatattgaaattgtttttgccaagccaccagatcagaaaaggaaagaaagaaaagctcagaggcaagcagcaaaaaatcaaatgtatgacgattactactattatggtccacctcatatgccccctccaacaagaggtcgagggcgtggaggtagaggtggttatggatatcctccagattattatggatatgaagattattatgattattatggttatgattaccataactatcgtggtggatatgaagatccatactatggttatgaagattttcaagttggagctagaggaaggggtggtagaggagcaaggggtgctgctccatccagaggtcgtggggctgctcctccccgcggtagagccggttattcacagagaggaggtcctggatcagcaagaggcgttcgaggtgcgagaggaggtgcccaacaacaaagaggccgcggggtacgtggtgcgaggggtggccgcggtggaaatgtaggaggaaagcgcaaagctgatgggtacaaccagccagattccaagcggcgccagaccaataatcagaactggggctcccaacccattgctcagcaaccgctccaaggtggtgatcattctggtaactatggttacaaatctgaaaaccaggagttttatcaggatacttttgggcaacagtggaagtagaaacagtagggcctctgtaaaattggagactgataggttgatcagaaactcaccctaaatctgaacgggtgccgctataatttgtgacatctggcaagatttccctttatgtatatattttaacaatccgcttggacacgaacaaagccacacttctaactgcttctggcgaactgattttatttttaatttttttcaataaagatattcttagatactgaaagaaatagttaatgagtttgcatttgtgcttgagaaaatttggctcaagtccatttggctgtagtgtcaacgatgtttccagtagtgtttagatttggtgtcttcaaaggtagttgattaaaaccaagtgtgtctttaatatcttgtatcagaataactttgtatgttaccaacttaaattgctagaataaggtaaattgatacacaactgctatttttaatttagaactttgacctaatttgggttttcaaaaccattttggctacttgtattctttatgctgttgtttatttcaataaaaaattcacacct

SEQ ID NO: 2075 - DNA, 1737 bp, Homo sapiens
atggcgtgcggctttcgccgcgctattgcttgccagctttccagagtgttgaatcttccaccagaaaacttgatcacatcaatatctgcagttccaatttcccaaaaagaagaagtagctgattttcagctttctgtggattctttattggaaaaagacaatgaccattcaagaccagatattcaagttcaagccaagagactagcagagaagctaagatgtgatacagtggtgagtgaaatcagtactggtcaaaggactgtaaatttcaaaataaacagagagctcttaacaaagacagtgctacaacaagtaattgaagatggctcaaaatatggattaaaaagtgaacttttctctggacttccccagaagaagattgtggttgaattcagttcacctaatgttgccaaaaaatttcatgttggacatttgcgttctaccatcataggaaattttatagcaaatctcaaagaagctttaggacatcaagtaataagaataaattaccttggcgattggggcatgcagtttggtcttctgggaactggcttccagctgtttggctatgaggaaaaactgcagtccaatcctctacagcatctctttgaagtttatgtacaagttaataaagaagcagcagatgataaaagtgtagcaaaagcagcacaggagttcttccaacgattggaactgggcgatgtgcaagcactttcactgtggcaaaaatttcgggacttgagcattgaagagtacattcgggtttacaagcgtctgggagtatattttgatgaatattcaggagaatcattttatcgtgaaaaatctcaagaggtcttaaagttgctggagagtaaaggactcctactgagaacaataaaaggaacggctgtagtagatctctctgggaatggcgacccctcctcaatttgtactgtaatgcgaagtgatgggacttctctctatgcaaccagagatcttgcagctgctatagatcgaatggacaagtataattttgatacaatgatatatgtgacagataaaggacaaaaaaagcattttcagcaagtattccaaatgctgaagatcatgggatatgactgggcagaaaggtgccagcacgtgccctttggagtagtacagggaatgaagactcgaagaggagatgtcactttcctggaagatgttttaaatgagattcaattaaggatgctacagaacatggcttcaattaagacaactaaagaactcaagaacccacaagagactgcagagagggtcgggctcgcagcactcattattcaggacttcaaaggtttactcttatctgactacaagttcagctgggatcgtgttttccagagtcgcggggacacaggagtcttcctacagtacacacacgcccgcctccacagtttggaagagacttttggatgtgggtacctgaatgacttcaacactgcttgtttacaagagccacagtctgtttcaattcttcagcatcttctcaggttcgacgaggtgctttataaatcatctcaggactttcaacccaggcatatcgtcagttaccttctaactttaagtcatcttgcagctgtggcacacaaaacactacaaataaaagatagtcctcctgaagtggctggggccagacttcatcttttcaaagctgtccgttctgtcctagccaatggaatgaaacttcttggaataacacctgtatgtaggatgtaa

SEQ ID NO: 2076 - protein, 578 aa, Homo sapiens
MACGFRRAIACQLSRVLNLPPENLITSISAVPISQKEEVADFQLSVDSLLEKDNDHSRPDIQVQAKRLAEKLRCDTVVSEISTGQRTVNFKINRELLTKTVLQQVIEDGSKYGLKSELFSGLPQKKIVVEFSSPNVAKKFHVGHLRSTIIGNFIANLKEALGHQVIRINYLGDWGMQFGLLGTGFQLFGYEEKLQSNPLQHLFEVYVQVNKEAADDKSVAKAAQEFFQRLELGDVQALSLWQKFRDLSIEEYIRVYKRLGVYFDEYSGESFYREKSQEVLKLLESKGLLLRTIKGTAVVDLSGNGDPSSICTVMRSDGTSLYATRDLAAAIDRMDKYNFDTMIYVTDKGQKKHFQQVFQMLKIMGYDWAERCQHVPFGVVQGMKTRRGDVTFLEDVLNEIQLRMLQNMASIKTTKELKNPQETAERVGLAALIIQDFKGLLLSDYKFSWDRVFQSRGDTGVFLQYTHARLHSLEETFGCGYLNDFNTACLQEPQSVSILQHLLRFDEVLYKSSQDFQPRHIVSYLLTLSHLAAVAHKTLQIKDSPPEVAGARLHLFKAVRSVLANGMKLLGITPVCRM

SEQ ID NO: 2077 - DNA, 1826 bp, Homo sapiens
tttttttttttttttgttcctgaattatttaagtttcttatagattctggatattagacctttcttagatgcatagcttatgaatattttctcccattatttaggttgtagggaaagggagagcttttgattttttttaagcattacagataatgttgaagtcactgatatatatttgtttgactgcattccctaccctgcttccctagagagaactgatctcatgatgcaaatgatttattttcacgaatcagttgctttgtgtttgtttctttgtttttgtatttttttttcacctacccagtgaaaaggataaatggcattgtccatctctttaatgaactactgagtgttaagaagaatattcttctttttctcatgttgaaactcaaattacaacatttaaaaaatatgtcatttggaggtcagtggagaggtttgaattagaagcatgtatttggagtagtagaggaagcattgtagaagaggtaaagagacctgggcttttttctcagtctgtttttttttgcagtaggattttaaaggagacatttagcttgccagacatcagttttcatgtctataaaataaggtggctagtataagaggaagaattttttgagactaggtcttgctctgtcacccagactggagtgcagtggcatgatctcggctcactgcaacctctgcctcctgggttcaagcaattctcgtgcctaagcctcccgagtagctgggcttacgggcacatgccaccacgcctggctaatttttgtatttttagtagagatggggtttttccatgttggccaggctggtctcaaactcctgaccttaagtggtccacttgcctcggcctcccaaagtgctgggatctgtgcccagacagaagaggaagaattttataagatgataagaaaaacattctgaataaatactaggttatttctcattttcttgcttttaattttgttttttatttatttattttattttatttacttttttgagacagagtttcgctcttgtcacccaggctggagtgcagtggcacaatcttgactcgctgcagtctccacctccaggattcaagcgattcccctgcctcagtctcccaagcagctgggattgtaggtacacaccaccatgcctggctaatttttgtgtgtgtgtgtgtatttttagtagagatggggttttaccatgtggccaggctggtctagaactcaacctcaggtgatccgcctgccttagcctcccaaagtgctgggattacaggcatgagccaccgctctcggcccccttgcttttaattttgaaagtacacataacaccttcttctggtaaaggtatgtctcaatggagaactcatagtgattagtctttgtttaacaactaatgcttttaaggtaacagttctatctcgtttcgatgtctgtctttagagaagtagctgattttcagctttctgtggattctttattggaaaaagacaatgaccattcaagaccagatattcaagttcaagccaagagactagcagagaaggtacgttagcactattatctctttttgacattgtaataaacttgttattaaaaaaagtactttgcaggctatctcagccataatagtgaatttaatagtgtttctttgaggcatcttgtgtaatataatttaaattcattttagccatgtactataaggttataatgatttttcagattagttataaagcactcctcttgagctgacattgttcaattttttgattaaccacttacaggaagactgaagtgttaattaaatttacagattgaagctgg

SEQ ID NO: 2078 - protein, 52 aa, Homo sapiens
MPPRLANFCIFSRDGVFPCWPGWSQTPDLKWSTCLGLPKCWDLCPDRRGRIL

SEQ ID NO: 2079 - DNA, 5471 bp, Homo sapiens
gattgccccctgtgggtcactttctcagtcattttgagctcagcctaatcaaagactgaggttatgaagtcgatcctagatggccttgcagataccaccttccgcaccatcaccactgacctcctgtacgtgggctcaaatgacattcagtacgaagacatcaaaggtgacatggcatccaaattagggtacttcccacagaaattccctttaacttcctttaggggaagtcccttccaagagaagatgactgcgggagacaacccccagctagtcccagcagaccaggtgaacattacagaattttacaacaagtctctctcgtccttcaaggagaatgaggagaacatccagtgtggggagaacttcatggacatagagtgtttcatggtcctgaaccccagccagcagctggccattgcagtcctgtccctcacgctgggcaccttcacggtcctggagaacctcctggtgctgtgcgtcatcctccactcccgcagcctccgctgcaggccttcctaccacttcatcggcagcctggcggtggcagacctcctggggagtgtcatttttgtctacagcttcattgacttccacgtgttccaccgcaaagatagccgcaacgtgtttctgttcaaactgggtggggtcacggcctccttcactgcctccgtgggcagcctgttcctcacagccatcgacaggtacatatccattcacaggcccctggcctataagaggattgtcaccaggcccaaggccgtggtggcgttttgcctgatgtggaccatagccattgtgatcgccgtgctgcctctcctgggctggaactgcgagaaactgcaatctgtttgctcagacattttcccacacattgatgaaacctacctgatgttctggatcggggtcaccagcgtactgcttctgttcatcgtgtatgcgtacatgtatattctctggaaggctcacagccacgccgtccgcatgattcagcgtggcacccagaagagcatcatcatccacacgtctgaggatgggaaggtacaggtgacccggccagaccaagcccgcatggacattaggttagccaagaccctggtcctgatcctggtggtgttgatcatctgctggggccctctgcttgcaatcatggtgtatgatgtctttgggaagatgaacaagctcattaagacggtgtttgcattctgcagtatgctctgcctgctgaactccaccgtgaaccccatcatctatgctctgaggagtaaggacctgcgacacgctttccggagcatgtttccctcttgtgaaggcactgcgcagcctctggataacagcatgggggactcggactgcctgcacaaacacgcaaacaatgcagccagtgttcacagggccgcagaaagctgcatcaagagcacggtcaagattgccaaggtaaccatgtctgtgtccacagacacgtctgccgaggctctgtgagcctgatgcctccctggcagcacaggaaaagaatttttttttttaagctcaaaatctagaagagtctattgtctccttggttatatttttttaactttaccatgctcaatgaaaaggtgattgtcaccatgatcacttatcagtttgctaatgtttccatagtttaggtactcaaactccattctccaggggtttacagtgaagaaagcctgttgtttaagtgactgaacgatccttcaaagtctcaatgaaataggagggaaacctttggctacacaattggaagtctaagaacccatggaaaaatgccatcaaatgaataatgcctttgtaaccacaactttcactataatgtgaaatgtaactgtccgtagtatcagagatgtccatttttacaagttatagtactagagatattttgtaaaatgtattatgtcctgtgagatgtgtatcagtgtttatgtgctattaatatttgtttagttcagcaaaactgaaaggtagacttttatgagaacaatggacaagcagtggatacgtgtcaatgtgtgcactttttttctatattattgcccatgatataactttagaaataaaccttaatatttcttcaaatatctctatttaattttgacactgaaataaccgtaaaggtttatttttctgttacctcaacaagaagaatttgaagacttcaaaatattgagcagaattcattcatacttaaaaatttattagccctgcattttcataggaagacacattatcttctggactatagctgttctaatggattataatcagaatggaagagagaaagcatattgactttttttgagcgacatctctgactttctttagtctttagctattactggatctcttaagacagcatgtgttaatcttaatgtatatcgttatcactgtgcagttgctgtttacttgaatagtattgtgttcctatattccaggtttaagtagatttcatgcctgggtggccaaacaacagtcttcattttttttaattgaaaagaagtagtgtctggatcagtaaaattatactgtgtgtgagtgtgaatataaatgtgtgtatgtgtgtttctgtcctgtaactgttacagtaatgtcataaagtgagaaaactgtgaccaagtataaacttttaccacttgctgcactcttgcacatggattcagtttctaaaattgagttcttcctgtaatcttgttgataaaaatactgactccaaccattcaaaaatttcaccccatccctccttaagagattggatcaagtattactaaattgacctttaggtattacacaagaccagtgcttagcaaaaaataatgacaggcatccaaggaagggatgtatttgtagtgttattgccaggaaaggagagtactttggtttctgagcaccgaatattgagcaatatgtcagtcactaaaaggaagacagttctacagaaaaacaatggtaacatttttcaatagcgtgtgtagatagtatgcactatatacatcacgttaaagtaggactatcacacccagcccatgtggctaaaaaagctgaatcagacagtggatgagacacacaacggcagtgaagaaccgatacacttggcattgacgtctagctatgctgtatctgtgctttgcccacatgcccttggtgacagctgagcacccagctctgtcttggtaggtttgggctaaggaacaaatctctcctttgctcgtggttagcaagatacactcaagcatgaagataaacacagctgctttcttcttacaccccggtctcatgctccttaatggcgccatgggtgcttgttgggcctttttccagtaaggaatgatattgctgaagaatctacttaaccctgacaaattttaattataatctcttcttatacagataaaacatgactcctacaaggccccaaggtttacatagtctgaagtgaagtacagagctggcatctatctggtgatttctagctctcgagatacccaagcagcctgatggggcagttccccttcttacggttcacgctctaaggcaggatgtggcttatgagatactttgcattgtctgtctgcacaccttgaatctgcctgctggctcccttactttacctctctgtcatgtgcagatgaaggctcagggtgctagaggattagtaagatctctttctaaagacaggagagattatttacaagaagaactcaccagggtttagtttgcatttaagaattgccagtcttttgtcctgcatcatcttgaacattaatccacatgtttcagagctcaccaggcagtaccaatgctcttttcacagctatgaagagctagagaaattcttgttatggtagaaaaatttcacgattcatttttgaaactgcatttgtgcgtatgcagtgtagattttatagtgtgttgtgctttcaagatctaaatcatatataataaattaagggacaatggggctgacagcactaaacttggtgcttattgatattctaagaaatatctgtgaaatatcatcacgtatgttatacaaccttcatttaaaaaggtttaaaactagttagattcactttgacacttttcatatcatttcttaacccaagtgacgaaaacattgtccccaatgaatatactcattagaattaccatttgttaatatcactcattaattaaccccataattagatccattaatttaaatgatttaaatttaagtaagttttataaggtctgacatcagaggtatcttactttcctctgaggatgatgtacttgccctgaccatgcattttaccatcacacatgttcagaaagggccaaattcccaacctgctcattttttttttatcagagtcatgatgaatcagtcctagaatgtttcatttgcacaagtagggctgcctccaagaggaacctctgatttattttgtatgaaatatatgtgaaaggatatgaatctgagagatgctgtagacatctgtcctacacttgagatgatttccaagcctctctggcactttgagttaagtctatctggtattaaatgccaaggaccttttgctgcctaaatccactctgcaggaaataggcccaaccaccagatgagaattaggccctggatgagtagcgctatagttactgtcctgttgattaatttctgccatttcatgtccataaaagagaccacccatatcatgcacacaattagatttctcacactctaactgtatatttgtatgatattttaaaatctcctaaatgctgggcaatggctattaacaattaattgtcttgcactggccttctgatgaaatgttaacaatgcctattgtaatatagaaaaaaacattctatctactgatttgggctgaatgtatgtaaataggtttctaaaaagtcagatgtttgagcagtggcctacaaatcagtaattttcggatgggagagtttctttacattgccgtggcatcttaaaagctatcttcatgtaaattgactgtactaggcctactggggatcagagttcccaagaaaggaaaccttttcttgtatctggattcaaatttatttccaatgtttcaagcgggaaacatgactctttattgtctgtaaatctaacattattacttttcctcttagaagaatattgtattgttagatgtttgttgagctggtaacatcgttgcaaccactgcaatatcttcgttagtaatctgtataatactttgtatacaagtactggtaagattgttattaaatgtagcttcagtcattaaattactatagcaaagtagtacttcttctgtaatatttacaatgtattaagcccacagtatattttatttcaatgtaattaaactgttaacttattcaaagagaaaacatctcatcatgtctattgtccaaagttacctggaatcaaataaaaattctagattaccatgaagaacata

SEQ ID NO: 2080 - DNA, 1507 bp, Homo sapiens
gagcgcggttaccggacgggctgggtctatggtcgctccgcgggccgctccgccggctggtgcttttttatcagggcaagctgtgttccatggcagggaacttttggcagagctcccactatttgcaatggattttggataaacaagatctgttgaaggagcgccaaaaggatttaaagtttctctcagaggaagaatattggaagttacaaatattttttacaaatgttatccaagcattaggtgaacatcttaaattaagacaacaagttattgccactgctacggtatatttcaagagattctatgccaggtattctctgaaaagtatagatcctgtattaatggctcctacatgtgtgtttttggcatccaaagtagaggaatttggagtagtttcaaatacaagattgattgctgctgctacttctgtattaaaaactagattttcatatgcctttccaaaggaatttccttataggatgaatcatatattagaatgtgaattctatctgttagaactaatggattgttgcttgatagtgtatcatccttatagacctttgctccagtatgtgcaggacatgggccaagaagacatgttgcttccccttgcatggaggatagtgaatgatacctacagaacggatctttgcctactgtatcctcctttcatgatagctttagcttgcctacatgtagcctgtgttgtacagcagaaagatgccaggcaatggtttgctgagctttctgtggatatggaaaagattttggaaataatcagggttattttaaaactatatgagcagtggaagaatttcgatgagagaaaagagatggcaaccattcttagtaagatgccaaaaccaaaaccacctccaaacagtgaaggagagcagggtccaaatggaagtcagaactctagctacagccaatcttaaaacattccgaagaattccatagtggaccacttggaaataaaccattggacagatttcagtaatgtcttcagtggaacacaaatgaaaatgaatagcttgtttctgtcaagcatattggaaagtgattttatttttgcaaaataagtttttctttaatatgattctagtacataattgattaaaatctcttgattataaatgtttggaaaggttctaaggggacctacagacagacatacatagacatttcaaaattaatagcttttgattagtataatatttcttaatttggataataaaaattgtagctttttattaagccaggaaacatgaagcataatttgtttaaaattctctttggtcattgagggaccaaaaaaggacgtaaaatttacagtcaatctatgagggtttttttccctccataagtttaactttaaaactgtatttaaggaatcaaatcttacaaaatcctggaagattttggtaatgatgttgataatttcagggaaattaatcaagtacctatattgatttaaaagtgtattttattcagtagtttgagg

SEQ ID NO: 2081 - DNA, 1418 bp, Homo sapiens
agtctccccaggttgtagacgctgcggcccggcccggcgggtaaataacagatgcgggtgaaagatccaactaaagctttacctgagaaagccaaaagaagtaaaaggcctactgtacctcatgatgaagactcttcagatgatattgctgtaggtttaacttgccaacatgtaagtcatgctatcagcgtgaatcatgtaaagagagcaatagctgagaatctgtggtcagtttgctcagaatgtttagaagaaagaagattctatgatgggcagctagtacttacttctgatatttggttgtgcctcaagtgtggcttccagggatgtggtaaaaactcagaaagccaacattcattgaagcactttaagagttccagaacagagccccattgtattataattaatctgagcacatggattatatggtgttatgaatgtgatgaaaaattatcaacgcattgtaataagaaggttttggctcagatagttgattttctccagaaacatgcttctaaaacacaaacaagtgcattttctagaatcatgaaactttgtgaagaaaaatgtgaaacagatgaaatacagaagggaggaaaatgcagaaatttatctgtaagaggaattacaaatttaggaaatacttgcttttttaatgcagtcatgcagaacttggcacagacttatactcttactgatctgatgaatgagatcaaagaaagtagtacaaaactcaagatttttccttcctcagactctcagctggacccattggtggtggaactttcaaggcctggaccactgacctcagccttgttcctgtttcttcacagcatgaaggagactgaaaaaggaccactttctcctaaagttctttttaatcagctttgtcagaagcgggtgcatctacatttaatataaataattatgagttacaaaatactaatgtattcatcatttaacatgaatagtcgtttttactgtaactttgctcttattgccctgactatgaagagaactaaaatttgttacagctctatgctttatgaaaattatatctcagtcctcagaagaagcagcttatcctcatatataaggaaatggagacacagaaattaaatggctcacctagtctgagtgaaaagctgagaatcaaatggagatctgtcctgacttggatgcctatgttgtaataccataaagtgagaaaaccatagagttgtaaaatctagaaagtaccgtaagataacatctaatctagctttcttattttaaaagatgagctgtgaggcaaatagagtttaagtgaatttctcaaggtattacagtatgtttaaaaaccaaatccttatgtgcctggaaataaacacataaaggatctgacttgtaaaaaaaaaaaaaaaaaaaaaaaaaaaaaa

SEQ ID NO: 2082 - protein, 289 aa, Homo sapiens
MRVKDPTKALPEKAKRSKRPTVPHDEDSSDDIAVGLTCQHVSHAISVNHVKRAIAENLWSVCSECLEERRFYDGQLVLTSDIWLCLKCGFQGCGKNSESQHSLKHFKSSRTEPHCIIINLSTWIIWCYECDEKLSTHCNKKVLAQIVDFLQKHASKTQTSAFSRIMKLCEEKCETDEIQKGGKCRNLSVRGITNLGNTCFFNAVMQNLAQTYTLTDLMNEIKESSTKLKIFPSSDSQLDPLVVELSRPGPLTSALFLFLHSMKETEKGPLSPKVLFNQLCQKRVHLHLI

SEQ ID NO: 2083 - DNA, 1077 bp, Homo sapiens
agtttgttgctcccaccgagttctgaagaacgccagcagctcgctgcttaaaattaaaccacagggttccatgatgggtcaacttgatgggaaagtcatcatcctgacagccgctgctcaggggattggccaagcagctgccttagcttttgtaagagaaggtgccaaagtcatagccacagacattaatgtgtccaaacttcaggaactggaaaagtacctgggtattcaaactcgtgtccttgatgtcacaaagaagaaacaaattgatcagttcgccaatgaagttgagagacttgatgttctctttaatgttgctggttttgtccatcatggaactgtcctggattgtgaggagaaagactgggacttctcgatgaatctcaatgtgcgcagcacgtacctgatgatcaaggcattccttcctaaaatgcttgctcaaaaatctggcaatattatcaccatgttttctgtggtttccagcatcaaaggagttgtgaacagatgtgtgtacagcacaaccaaggcagccgtgattggcctcacaaaatctgtggctgcagatttcatccagcagggcatcaggtgcaactgtgtgtgcccaggaacggttgatacgccatctctacaagaaagaatacaagccagaggaaatcctgaagaggcacggaatgatttcctgaagagacaaaagatgggacgatttgcaactgcagaagaaatagccatgctctgcgtgtatgtggcttctgatgaatctgcttatgtaactggtaaccctgtcatcattgatggaggatggagcttgtgattttaggatctccatggtgggaaggaaggcaggctcttcctatccacagtgaacctggctatgaagaaaactcaccaatcatctccttcctgctaatcacatgttaatgaaactaagccctttttaacaatgtcactgtttgcaagagtctgattctttaagtatattaatctctttgtaatctcttctgaaatcattgtaaagaaataaaaatattgaactcacagcaagagaatagtttttaaaataaatctcaatttgtaagc

SEQ ID NO: 2084 - protein, 245 aa, Homo sapiens
MGQLDGKVIILTAAAQGIGQAAALAFVREGAKVIATDINVSKLQELEKYLGIQTRVLDVTKKKQIDQFANEVERLDVLFNVAGFVHHGTVLDCEEKDWDFSMNLNVRSTYLMIKAFLPKMLAQKSGNIITMFSVVSSIKGVVNRCVYSTTKAAVIGLTKSVAADFIQQGIRCNCVCPGTVDTPSLQERIQARGNPEEARNDFLKRQKMGRFATAEEIAMLCVYVASDESAYVTGNPVIIDGGWSL

SEQ ID NO: 2085 - DNA, 354 bp, Homo sapiens
atgaatgctataaagagatttcaggatggaaaattagtacagaacaaagcctactgtggagaatcaacaccacagcatttcacaggcctgcagccttatgtggttagcatggatgagggttcttcaggtttcatgagaataggctatgaacactgggttttggtcttcttgattctcagtgcctggataccagaaaaagagaaatatgagattgcagagcagcccaagattgatcagaaagctgtggactcacaaattttaccaaaaatcaaaagtattcctcagctccagtgctacctgcgatctgtgtttgctctgacgaatggaatttatcctcacaaattggtgttttaa

SEQ ID NO: 2086 - protein, 117 aa, Homo sapiens
MNAIKRFQDGKLVQNKAYCGESTPQHFTGLQPYVVSMDEGSSGFMRIGYEHWVLVFLILSAWIPEKEKYEIAEQPKIDQKAVDSQILPKIKSIPQLQCYLRSVFALTNGIYPHKLVF

SEQ ID NO: 2087 - DNA, 774 bp, Homo sapiens
acaatccagccaatggcagaagactgccggaaatgtagaagagttaagtgtgtgtcctatgcgttctacctcaatgcagatatcagagtccctttgagctccctgaagaatatactcacaccaaagtattacctgcacatagctgctcccttccacctcgcggcagttcaaaatgaagctgttgtcatttctggaaggaaactagcccagcagatcaagcagaaagtgcggcaggaggtggaagagtgggtggcctcaggcaacaaacctgagcatgatcctgtacctgctgctatagttccagcaaaaaagatgacttcttgcaggcaagaaggctccagcccagaaggttcctgcccagaaagccacaggctagaggcagtgcctcctctgaaagctcagaagtttcaaaagcaacgtgcccagaaagcatgttgtccaaaagcatctggcaagaaagcgttaagaggctattataaaagtagtaaagggtccaacaacttcaaggacaagaatgatgtattttcatcacttgtgacttccggtttcctagaccagatttcgggtcggtctgaccaggtgcagccccatcctagcagcagattgcttgttctcagcattcccatcatggagaatcttagtgtggtgggaggcttgggaaataccgttttcaaagaccagtggattagtagcctgaaaactcgccagcagttgcctgcttttgtcatcttcctgtctctggaagagcacctgatcctcactaccaaaaactaa

SEQ ID NO: 2088 - protein, 253 aa, Homo sapiens [sequence omitted]

SEQ ID NO: 2089 - DNA, 668 bp, Homo sapiens
acctgatggagatccaagtgtttgggcaggatgagatgatcgacgtcattggggtgaccaagggcaaaggctacaaaggggtcaccagtcgttggcacaccaagaagctgccctgcaagacccaccgaggcctgtgcaaggtggcctgtattggggcatggcatcctgctcgtgtggccttctctgtggcacgtgctggggagaaaggctaccgtcaccgcactgagatcaacaagaagatctataagattggccagggctaccttatcaaggatggcaagctgatcaagaacaatgcctccactgactctgacctgtctgacaagagcaccaatcctctgggtggctttgtccactatggtgaagtgaccaatgaccttgtcatgctgaaaggctgtgtggtgggaaccaagaagcgggtgctcaccctccacgagtccttgctggtgcagatgaaacggcaggctctggagaagattgaccttaagttcattgacaccacctccaagtttggccatggctgcttccagaccatggagcagaagaaagcattcatgggaccactcaagaaagacggaattgcaaaggaagaaggagcttaatgccaggaacagatttcgcagctggtgtggtctcaataaaagttattttccactgggaaaaaaaaa

SEQ ID NO: 2090 - DNA, 372 bp, Homo sapiens
gcgtgatgtctcacagaaagttttctgctcccagacatgggtccctcggcttcctgcctcagaagcgcagcagcaggcatcgtgggaaggtgaagagcttccctaaggatgatccgtccaagccggtccacctcacagccttcctgggatacaaagctggcatgacccacatcatgagggctctggagaagattgaccttaagttcattgacaccacctccaagtttggccatggctgcttccagaccatggagcagaagaaagcattcatgggaccactcaagaaagacggaattgcaaaggaagaaggagcttaatgccaggaacagatttcgcagctggtgtggtctcaataaaagttattttccactg

SEQ ID NO: 2091 - DNA, 3409 bp, Homo sapiens
aacaggaagcggcccctcccggcttcggagccgccgccactcatctctgcccagctgctgccctccccaggaggcctccatggcttcacctacctccaccaacccagcgcatgcccactttgagagcttcctgcaggcccagctgtgccaggacgtgctgagcagcttccaggagctgtgtggggccctggggctggaacccggtggggggctgccccagtaccacaagatcaaggaccagctcaactactggagcgccaagtcactgtggaccaagctggacaagcgagcaggccagcctgtctaccagcagggccgggcctgcaccagcaccaagtgcctggtggtgggtgctggaccttgcgggctgcgggtcgctgtggagctggcgctgctgggggcccgagtggtgctggtggaaaagcgcaccaagttctctcgccacaacgtgctccacctctggcccttcaccatccacgacctgcgggcactcggtgctaagaagttctacgggcgcttctgcaccggcaccctggaccacatcagcatcaggcagctccagctgcttctgctgaaggtagcattgctgctgggggtggaaattcactggggtgtcactttcactggcctccagccccctcctaggaaggggagtggctggcgtgcccagctccaacccaacccccctgcccagctggccaactatgaatttgacgtccttatctcggctgcaggaggtaaattcgtccctgaaggcttcaaagttcgagaaatgcgaggcaaactggccattggcatcacagccaactttgtgaatggacgcaccgtggaggagacacaggtgccggagatcagtggtgtagccaggatctacaaccagagcttcttccagagccttctcaaagccacaggcattgatctggagaacattgtgtactacaaggacgacacccactactttgtgatgacagccaagaagcagtgcctgctgcggctgggggtgctgcgccaggactggccagacaccaatcggctgctgggcagtgccaatgtggtgcccgaggctctgcagcgctttacccgggcagctgctgactttgccacccatggcaagctcgggaaactagagtttgcccaggatgcccatgggcagcctgatgtctctgcctttgacttcacgagcatgatgcgggcagagagttctgctcgtgtgcaagagaagcatggcgcccgcctgctgctgggactggtgggggactgcctggtggagcccttctggcccctgggcactggagtggcacggggcttcctggcagcctttgatgcagcctggatggtgaagcggtgggcagagggcgctgagtccctagaggtgttggctgagcgtgagagcctgtaccagcttctgtcacagacatccccagaaaacatgcatcgcaatgtggcccagtatgggctggacccagccacccgctaccccaacctgaacctccgggcagtgacccccaatcaggtacgagacctgtatgatgtgctagccaaggagcctgtgcagaggaacaacgacaagacagatacagggatgccagccaccgggtcggcaggcacccaggaggagctgctacgctggtgccaggagcagacagctgggtacccgggagtccacgtctccgatttgtcttcctcctgggctgatgggctagctctgtgtgccctggtgtaccggctgcagcctggcctgctggaaccctcagagctgcaggggctgggagctctggaagcaactgcttgggcactaaaggtggcagagaatgagctgggcatcacaccggtggtgtctgcacaggccgtggtagcagggagtgacccactgggcctcattgcctacctcagccacttccacagtgccttcaagagcatggcccacagcccaggccctgtcagccaggcctccccagggacctccagtgctgtattattccttagtaaacttcagaggaccctgcagcgatcccgggccaaggaaaatgcagaggatgctggtggcaagaagctgcgcttggagatggaggccgagaccccaagtactgaggtgccacctgacccagagcctggtgtacccctgacacccccatcccaacaccaggaggccggtgctggggacctgtgtgcactttgtggggaacacctctatgtcctggaacgcctctgtgtcaacggccatttcttccaccggagctgcttccgctgccatacctgtgaggccacactgtggccaggtggctacgagcagcacccaggagatggacatttctactgcctccagcacctgccccagacagaccacaaagcggaaggcagcgatagaggccctgagagtccggagctccccacaccaagtgagaatagcatgccaccaggcctctcaactcccacagcctcgcaggagggggccggtcctgttccagatcccagccagcccacccgtcggcagatccgcctctccagcccggagcgccagcggttgtcctcccttaaccttacccctgacccggaaatggagcctccacccaagcctccccgcagctgctccgccttggcccgccacgccctggagagcagctttgtgggctggggcctgccagtccagagccctcaagctcttgtggccatggagaaggaggaaaaagagagtcccttctccagtgaagaggaagaagaagatgtgcctttggactcagatgtggaacaggccctgcagacctttgccaagacctcaggcaccatgaataactacccaacatggcgtcggactctgctgcgccgtgcgaaggaggaggagatgaagaggttctgcaaggcccagaccatccaacggcgactaaatgagattgaggctgccttgagggagctagaggccgagggcgtgaagctggagctggccttgaggcgccagagcagttccccagaacagcaaaagaaactatgggtaggacagctgctacagctcgttgacaagaaaaacagcctggtggctgaggaggccgagctcatgatcacggtgcaggaattgaatctggaggagaaacagtggcagctggaccaggagctacgaggctacatgaaccgggaagaaaacctaaagacagctgctgatcggcaggctgaggaccaggtcctgaggaagctggtggatttggtcaaccagagagatgccctcatccgcttccaggaggagcgcaggctcagcgagctggccttggggacaggggcccagggctagacgagggtgggccgtctgctttcgttcccacaaagaaagcacctcaccccagcacagtgccacccctgttcatctgggctgcctggcagagagccttgctgtttacaattaaaatgtttctgccac

SEQ ID NO: 2092 - DNA, 1503 bp, Homo sapiens
gttccggcgcacgtaatcgccgagggcacgtgcatgccccctggttaagagttgcaggtagcggtagcgatggacactctggatcgagtagtaaagcccaaaacgaaaagagccaagagattccttgagaagagagaaccgaaactcaatgaaaatattaaaaatgccatgctgattaaagggggaaatgcaaatgcaacagtgacaaaagtacttaaagatgtgtatgcactgaaaaaaccatacggtgtactatataaaaagaaaaatattacaagaccttttgaggatcagacatcactggaattcttttcaaagaagtcagattgttctttattcatgtttggctcccataataagaagcggccaaataatctagtaataggtcgtatgtatgactaccatgtgctggatatgattgaattaggtattgagaattttgtctctctaaaagacattaagaacagtaaatgtcctgagggaacaaaacccatgctgatatttgctggcgatgatttcgatgtaacagaagattatagaagactaaaaagtcttcttattgatttcttcagaggccccacagtatcaaatatccgcctggctggattagagtatgttctgcacttcactgcactgaatgggaagatttactttcgaagctataagttgctgttgaagaaatctggttgcagaacaccacggattgaattggaagagatgggaccctcattggatctggttctgaggaggacacacctggcatcggatgacctttataaattatctatgaaaatgccaaaagctctcaagccaaagaagaagaaaaatatttcccatgatacttttggtacaacttatggaaggattcatatgcagaagcaagacctaagcaaactacaaaccaggaaaatgaaggggttgaagaagcgacctgcagaaaggataacagaagaccacgagaaaaagtcaaaaagaattaaaaaaaattgatggaacttagccagccactactgtttcattgtgttctacttaagagaattatcaagcgtcaatccattcagagtttcttataagatcttattatatatttttataacatgataattttacgatatattattatgaacagtaatatactagtattaagtgtaaagtaagccttttatttgagacattacaccctggtgtgccattttctcttgtgatatcccctgccctccacaaattcttctttctcattgggtggatggatgggtgaggagggatctccataaccattgggatttttttgaatttctggccttagctaaagaaagccacagaaagccggacccgcaggagctgtgtaaacaatctcagtatgaattacctggaaagttaacctcctctcccaacatggatctacattctgatttttattttctacttttattttgcctgaaatcctactcgttgacatttgagattttaagctttgtggctgaaaatatatagatctctgag

SEQ ID NO: 2093 - protein, 306 aa, Homo sapiens
MDTLDRVVKPKTKRAKRFLEKREPKLNENIKNAMLIKGGNANATVTKVLKDVYALKKPYGVLYKKKNITRPFEDQTSLEFFSKKSDCSLFMFGSHNKKRPNNLVIGRMYDYHVLDMIELGIENFVSLKDIKNSKCPEGTKPMLIFAGDDFDVTEDYRRLKSLLIDFFRGPTVSNIRLAGLEYVLHFTALNGKIYFRSYKLLLKKSGCRTPRIELEEMGPSLDLVLRRTHLASDDLYKLSMKMPKALKPKKKKNISHDTFGTTYGRIHMQKQDLSKLQTRKMKGLKKRPAERITEDHEKKSKRIKKN

SEQ ID NO: 2094 - DNA, 708 bp, Homo sapiens
atggaacagtacatctgtaaaaggacaagtgatggcatctacatcataaatctgaagaggacctgggagaagcttctgctggcagctcatgccattgctgccattgaaaaccctgcagatgtcagtgttatatcctccaggaatattggccagagggctgtgctgaagtttgctgctgccactggagccactccaattgctggccgcttcactcctggaaccttcactaaccagatccaggcagctttctgggagccacggcttcttgtggttactgaccccagggctgaccaccagcctctcacggaggcatcttatgttaacctacctaccattgctctattctccttgtgctatgtggacattgccatcgcatgcaacaacaagggagctcactcggtgggtttgatgtggtggacaccggctcgggaagttctgcgcatgcgtggcaccatttcctgcgaacacccgtgggaggtcatgcctgatctctacttctacagagatcctgaagagattgaaaaagaagagcaggctgctgctaaaaaagctgtgaccaagaaagaatttcagggtgaatggactgcttcagctcctgagttcactgctactcagcctgaggttgcagactggtctgaaggcatgcaggccaccgaatgggtaaaagcaatcactgaatgggtagaagcaaccgctgaatggtcttaa

SEQ ID NO: 2095 - protein, 235 aa, Homo sapiens
MEQYICKRTSDGIYIINLKRTWEKLLLAAHAIAAIENPADVSVISSRNIGQRAVLKFAAATGATPIAGRFTPGTFTNQIQAAFWEPRLLVVTDPRADHQPLTEASYVNLPTIALFSLCYVDIAIACNNKGAHSVGLMWWTPAREVLRMRGTISCEHPWEVMPDLYFYRDPEEIEKEEQAAAKKAVTKKEFQGEWTASAPEFTATQPEVADWSEGMQATEWVKAITEWVEATAEWS

SEQ ID NO: 2096 - DNA, 378 bp, Homo sapiens
atggcaaaggaagataacagaagaccctccagagagtggaatcctgaaaatcaaggaacatttctgtatactcaagtgaatgggaaagtggaatatttcctgaagtggaagggatttacagatgctgacaatacttgggaacctgaagaaaatttagattgtccagaattgattgaagcatttcttagctctcagaaagctggcaaacaaaaagatgacagcagtggagaattgatgtttctcatgaaatggaaagattcagatgaggcagacttggtgctggcaaaagaagcaagtatgaagtgtcctcaaattgtaattgctttttatgaagagagactaacttggcattcttgtccagaagatgaagctcaataa

SEQ ID NO: 2097 - protein, 125 aa, Homo sapiens
MAKEDNRRPSREWNPENQGTFLYTQVNGKVEYFLKWKGFTDADNTWEPEENLDCPELIEAFLSSQKAGKQKDDSSGELMFLMKWKDSDEADLVLAKEASMKCPQIVIAFYEERLTWHSCPEDEAQ

SEQ ID NO: 2098 - DNA, 641 bp, Homo sapiens
ctcttccggttctaggcacttcgggagccgcggcttatggtgcagacatggccaagtccaagaaccacaccacacacaaccagtcccgaaaatggcacagaaatggtatcaagaaaccccgatcacaaagatacgaatctcttaagggggtggaccccaagttcctgaggaacatgcgctttgccaagaagcacaacaaaaagggcctaaagaagatgcaggccaacaatgccaaggccatgagtgcacgtgccgaggctatcaaggccctcgtaaagcccaaggaggttaagcccaagatcccaaagggagtcagctgcaagctcgatcgacatgcctacgttgcccaccccaagcttgggaagcgtgctcttgcccgtattgccaaggggctcaggctgtgccggccaaaggccaaggccaaggccaaggatcaaaccaaggcccaggctgcagctccagcttcagttccagctcaggctcccaaaggtacccaggcccctacaaaggcttcagagtagatatctctgccaacatgaggacagaaggactggtgcgaccccccacccccacccctgggctatcatctgcatggggctggggtcctcctgtgctatttgtacaaataaacctgaggcagg

SEQ ID NO: 2099 - DNA, 3088 bp, Homo sapiens
acaaaaaagcttttacgaggtatcagcacttttctttcattagggggaaggcgtgaggaaagtaccaaacagcagcggagttttaaactttaaatagacaggtctgagtgcctgaacttgccttttcattttacttcatcctccaaggagttcaatcacttggcgtgacttcactacttttaagcaaaagagtggtgcccaggcaacatgggtgactggagcgccttaggcaaactccttgacaaggttcaagcctactcaactgctggagggaaggtgtggctgtcagtacttttcattttccgaatcctgctgctggggacagcggttgagtcagcctggggagatgagcagtctgcctttcgttgtaacactcagcaacctggttgtgaaaatgtctgctatgacaagtctttcccaatctctcatgtgcgcttctgggtcctgcagatcatatttgtgtctgtacccacactcttgtacctggctcatgtgttctatgtgatgcgaaaggaagagaaactgaacaagaaagaggaagaactcaaggttgcccaaactgatggtgtcaatgtggacatgcacttgaagcagattgagataaagaagttcaagtacggtattgaagagcatggtaaggtgaaaatgcgaggggggttgctgcgaacctacatcatcagtatcctcttcaagtctatctttgaggtggccttcttgctgatccagtggtacatctatggattcagcttgagtgctgtttacacttgcaaaagagatccctgcccacatcaggtggactgtttcctctctcgccccacggagaaaaccatcttcatcatcttcatgctggtggtgtccttggtgtccctggccttgaatatcattgaactcttctatgttttcttcaagggcgttaaggatcgggttaagggaaagagcgacccttaccatgcgaccagtggtgcgctgagccctgccaaagactgtgggtctcaaaaatatgcttatttcaatggctgctcctcaccaaccgctcccctctcgcctatgtctcctcctgggtacaagctggttactggcgacagaaacaattcttcttgccgcaattacaacaagcaagcaagtgagcaaaactgggctaattacagtgcagaacaaaatcgaatggggcaggcgggaagcaccatctctaactcccatgcacagccttttgatttccccgatgataaccagaattctaaaaaactagctgctggacatgaattacagccactagccattgtggaccagcgaccttcaagcagagccagcagtcgtgccagcagcagacctcggcctgatgacctggagatctagatacaggcttgaaagcatcaagattccactcaattgtggagaagaaaaaaggtgctgtagaaagtgcaccaggtgttaattttgatccggtggaggtggtactcaacagccttattcatgaggcttagaaaacacaaagacattagaatacctaggttcactgggggtgtatggggtagatgggtggagagggaggggataagagaggtgcatgttggtatttaaagtagtggattcaaagaacttagattataaataagagttccattaggtgatacatagataagggctttttctccccgcaaacacccctaagaatggttctgtgtatgtgaatgagcgggtggtaattgtggctaaatatttttgttttaccaagaaactgaaataattctggccaggaataaatacttcctgaacatcttaggtcttttcaacaagaaaaagacagaggattgtccttaagtccctgctaaaacattccattgttaaaatttgcactttgaaggtaagctttctaggcctgaccctccaggtgtcaatggacttgtgctactatatttttttattcttggtatcagtttaaaattcagacaaggcccacagaataagattttccatgcatttgcaaatacgtatattctttttccatccacttgcacaatatcattaccatcactttttcatcattcctcagctactactcacattcatttaatggtttctgtaaacatttttaagacagttgggatgtcacttaacattttttttttttgagctaaagtcagggaatcaagccatgcttaatatttaacaatcacttatatgtgtgtcgaagagtttgttttgtttgtcatgtattggtacaagcagatacagtataaactcacaaacacagatttgaaaataatgcacatatggtgttcaaatttgaacctttctcatggatttttgtggtgtgggccaatatggtgtttacattatataattcctgctgtggcaagtaaagcacactttttttttctcctaaaatgtttttccctgtgtatcctattatggatactggttttgttaattatgattctttattttctctcctttttttaggatatagcagtaatgctattactgaaatgaatttcctttttctgaaatgtaatcattgatgcttgaatgatagaattttagtactgtaaacaggctttagtcattaatgtgagagacttagaaaaaatgcttagagtggactattaaatgtgcctaaatgaattttgcagtaactggtattcttgggttttcctacttaatacacagtaattcagaacttgtattctattatgagtttagcagtcttttggagtgaccagcaactttgatgtttgcactaagattttatttggaatgcaagagaggttgaaagaggattcagtagtacacatacaactaatttatttgaactatatgttgaagacatctaccagtttctccaaatgccttttttaaaactcatcacagaagattggtgaaaatgctgagtatgacacttttcttcttgcatgcatgtcagctacataaacagttttgtacaatgaaaattactaatttgtttgacattccatgttaaactacggtcatgttcagcttcattgcatgtaatgtagacctagtccatcagatcatgtgttctggagagtgttctttattcaataaagttttaatttagtataaacat

SEQ ID NO: 2100 - protein, 382 aa, Homo sapiens
MGDWSALGKLLDKVQAYSTAGGKVWLSVLFIFRILLLGTAVESAWGDEQSAFRCNTQQPGCENVCYDKSFPISHVRFWVLQIIFVSVPTLLYLAHVFYVMRKEEKLNKKEEELKVAQTDGVNVDMHLKQIEIKKFKYGIEEHGKVKMRGGLLRTYIISILFKSIFEVAFLLIQWYIYGFSLSAVYTCKRDPCPHQVDCFLSRPTEKTIFIIFMLVVSLVSLALNIIELFYVFFKGVKDRVKGKSDPYHATSGALSPAKDCGSQKYAYFNGCSSPTAPLSPMSPPGYKLVTGDRNNSSCRNYNKQASEQNWANYSAEQNRMGQAGSTISNSHAQPFDFPDDNQNSKKLAAGHELQPLAIVDQRPSSRASSRASSRPRPDDLEI

SEQ ID NO: 2101 - DNA, 3157 bp, Homo sapiens
gctgtgcgtccggaagtgtctcgcagatagtaaataatctcggaaaggcgagaaagaagctgtctccatcttgtctgtatccgctgctcttgtgacgttgtggagatggggagcgtcctggggctgtgctccatggcgagctggataccatgtttgtgtggaagtgccccgtgtttgctatgccgatgctgtcctagtggaaacaactccactgtaactagattgatctatgcacttttcttgcttgttggagtatgtgtagcttgtgtaatgttgataccaggaatggaagaacaactgaataagattcctggattttgtgagaatgagaaaggtgttgtcccttgtaacattttggttggctataaagctgtatatcgtttgtgctttggtttggctatgttctatcttcttctctctttactaatgatcaaagtgaagagtagcagtgatcctagagctgcagtgcacaatggattttggttctttaaatttgctgcagcaattgcaattattattggggcattcttcattccagaaggaacttttacaactgtgtggttttatgtaggcatggcaggtgccttttgtttcatcctcatacaactagtcttacttattgattttgcacattcatggaatgaatcgtgggttgaaaaaatggaagaagggaactcgagatgttggtatgcagccttgttatcagctacagctctgaattatctgctgtctttagttgctatcgtcctgttctttgtctactacactcatccagccagttgttcagaaaacaaggcgttcatcagtgtcaacatgctcctctgcgttggtgcttctgtaatgtctatactgccaaaaatccaagaatcacaaccaagatctggtttgttacagtcttcagtaattacagtctacacaatgtatttgacatggtcagctatgaccaatgaaccagaaacaaattgcaacccaagtctactaagcataattggctacaatacaacaagcactgtcccaaaggaagggcagtcagtccagtggtggcatgctcaaggaattataggactaattctctttttgttgtgtgtattttattccagcatccgtacttcaaacaatagtcaggttaataaactgactctaacaagtgatgaatctacattaatagaagatggtggagctagaagtgatggatcactggaggatggggacgatgttcaccgagctgtagataatgaaagggatggtgtcacttacagttattccttctttcacttcatgcttttcctggcttcactttatatcatgatgacccttaccaactggtacaggtatgaaccctctcgtgagatgaaaagtcagtggacagctgtctgggtgaaaatctcttccagttggattggcatcgtgctgtatgtttggacactcgtggcaccacttgttcttacaaatcgtgattttgactgagtgagacttctagcatgaaagtcccactttgattattgcttatttgaaaacagtattcccaacttttgtaaagttgtgtatgtttttgcttcccatgtaacttctccagtgttctggcatgaattagattttactgcttgtcattttgttattttcttaccaagtgcattgatatgtgaagtagaatgaattgcagaggaaagttttatgaatatggtgatgagttagtaaaagtggccattattgggcttattctctgctctatagttgtgaaatgaagagtaaaaacaaatttgtttgactattttaaaattatattagaccttaagctgttttagcaagcattaaagcaaatgtatggctgccttttgaaatatttgatgtgttgcctggcaggatactgcaaagaacatggtttattttaaaatttataaacaagtcacttaaatgccagttgtctgaaaaatcttataaggttttacccttgatacggaatttacacaggtagggagtgtttagtggacaatagtgtaggttatggatggaggtgtcggtactaaattgaataacgagtaaataatcttacttgggtagagatggcctttgccaacaaagtgaactgttttggttgttttaaactcatgaagtatgggttcagtggaaatgtttggaactctgaaggatttagacaaggttttgaaaaggataatcatgggttagaaggaagtgtttgaaagtcactttgaaagttagttttgggccagcacggtagctcacccttgtaatcccagcactttgggaggctgaggtgggtagattacttgagcccaggaattcaagaccagcctgggcaacatggtgaaaccctgtttctataaaaaataatctgggctttgtagcatatgcctgtggtcccagctactgaggaggctgaggtgggaggattgcttgagcccaggaggcagaggttgcagtgagccaaggtcacgtcactgcactctagcctgggcaacagagtaagacaaaaaaatatatatatattgaaaatcaaaggaggcaaaattttgacagggaaggaagtaactgcaaaacactaggctttagtaggtacttatataaaatctagtccagttctctcatttaaaaaaatgaagacactgaaatacagacttaaatagctcagatagctaattaggaaatttcaagttggccaataatagcattctctctgacatttaaaaataatttctattcaaaatacatgcataattgattttacacctcattactggtggataatttatgtgatgtggattgctggtgtccagcatgacccataaacaggtcagaagaatgatggaatgttttagaataaactcctgcttatagtatactacacagttcaaaagatgtttaaaatgcttttgtatttactgccatgtaattgaaatatatagattattgtaacctttcaacctgaaaatcaagcagtatgagagtttagttatttgtatgtgtcactagtgtctaatgaagcttttaaaatctacaatttcttctttaaaaatatttattaatgtgaatggaatataacaattcagcttaattccccaaccttattctgtgtgtagacattgtattccacaattttgaatggctgtgttttacctctaaataaatgaattcagag

SEQ ID NO: 2102 - protein, 453 aa, Homo sapiens
MGSVLGLCSMASWIPCLCGSAPCLLCRCCPSGNNSTVTRLIYALFLLVGVCVACVMLIPGMEEQLNKIPGFCENEKGVVPCNILVGYKAVYRLCFGLAMFYLLLSLLMIKVKSSSDPRAAVHNGFWFFKFAAAIAIIIGAFFIPEGTFTTVWFYVGMAGAFCFILIQLVLLIDFAHSWNESWVEKMEEGNSRCWYAALLSATALNYLLSLVAIVLFFVYYTHPASCSENKAFISVNMLLCVGASVMSILPKIQESQPRSGLLQSSVITVYTMYLTWSAMTNEPETNCNPSLLSIIGYNTTSTVPKEGQSVQWWHAQGIIGLILFLLCVFYSSIRTSNNSQVNKLTLTSDESTLIEDGGARSDGSLEDGDDVHRAVDNERDGVTYSYSFFHFMLFLASLYIMMTLTNWYRYEPSREMKSQWTAVWVKISSSWIGIVLYVWTLVAPLVLTNRDFD

SEQ ID NO: 2103 - DNA, 2322 bp, Homo sapiens
ggggaccctctcctgacgctgcgctctctgcgaggcaacctttcacgtccatcgcttgtcatcttaggatccccatgttattttagcccagattggctagttctggggaggcagcatggtgggacgattctgtcccgagtccccgccaggctttgttcgggtcgccgctaccagcgcggtctccctagatcctccatccggggaacctcgccccgggtgcgggtacccggggccgcgcagcgctgcctcgagggtgtatggatgcaccgcgccggcgagagagaccgggggctgggcctgggagaccctagcgggggcgggggcgaagaagagatttattccagtgaaacaacaactggaacttcaagtaactcctcccagagtacttccaactctgggttggccccaaatccaactaatgccaccaccaaggcggctggtggtgccctgcagtcaacagccagtctcttcgtggtctcactctctcttctgcatctctactcttaagagactcaggccaagaaacgtcttctaaatttccccatcttctaaacccaatccaaatggcgtctggaagtccaatgtggcaaggaaaaacaggtcttcatcgaatctactaattccacaccttttattgacacagaaaatgttgagaatcccaaatttgattgatttgaagaacatgtgagaggtttgactagatgatggatgccaatattaaatctgctggagtttcatgtacaagatgaaggagaggcaacatccaaaatagttaagacatgatttccttgaatgtggcttgagaaatatggacacttaatactaccttgaaaataagaatagaaataaaggatgggattgtggaatggagattcagttttcatttggttcattaattctataaggccataaaacaggtaatataaaaagcttccatgattctatttatatgtacatgagaaggaacttccaggtgttactgtaattcctcaacgtattgtttcgacagcactaatttaatgccgatatactctagatgaagttttacattgttgagctattgctgttctcttgggaactgaactcactttcctcctgaggctttggatttgacattgcatttgaccttttatgtagtaattgacatgtgccagggcaatgatgaatgagaatctacccccagatccaagcatcctgagcaactcttgattatccatattgagtcaaatggtaggcatttcctatcacctgtttccattcaacaagagcactacattcatttagctaaacggattccaaagagtagaattgcattgaccacgactaatttcaaaatgctttttattattattattttttagacagtctcactttgtcgcccaggccggagtgcagtggtgcgatctcagatcagtgtaccatttgcctcccgggctcaagcgattctcctgcctcagcctcccaagtagctgggattacaggcacctgccaccatgcccggctaatttttgtaattttagtagagacagggtttcaccatgttgcccaggctggtttcgaactcctgacctcaggtgatccacccgcctcggcctcccaaagtgctgggattacaggcttgagcccccgcgcccagccatcaaaatgctttttatttctgcatatgttgaatactttttacaatttaaaaaaatgatctgttttgaaggcaaaattgcaaatcttgaaattaagaaggcaaaaatgtaaaggagtcaaaactataaatcaagtatttgggaagtgaagactggaagctaatttgcattaaattcacaaacttttatactctttctgtatatacattttttttctttaaaaaacaactatggatcagaatagccacatttagaacactttttgttatcagtcaatatttttagatagttagaacctggtcctaagcctaaaagtgggcttgattctgcagtaaatcttttacaactgcctcgacacacataaacctttttaaaaatagacactccccgaagtcttttgttcgcatggtcacacactgatgcttagatgttccagtaatctaatatggccacagtagtcttgatgaccaaagtcctttttttccatctttagaaaactacatgggaacaaacagatcgaacagttttgaagctactgtgtgtgtgaatgaacactcttgctttattccagaatgctgtacatctattttggattgtatattgtgtttgtgtatttacgctttgattcatagtaacttcttatggaattgatttgcattgaacacaaactgtaaataaaaagaaa

SEQ ID NO: 2104 - DNA, 1325 bp, Homo sapiens
cagaagcggctagtggcggctgcctgcgtccccaaccccctccgcgcagcgctcgcgacacgcgtgccaggagtgggagcgagcggcggggccagctgcgttctgagcctgggcgcagctgccatctgctctgggaagcaccagggtgtccccgccgccctcagctcgaagtcagccaccatggaggcgcaggcacaaggtttgttggagactgaaccgttgcaaggaacagacgaagatgcagtagccagtgctgacttctctagcatgctctctgaggaggaaaaggaagagttaaaagcagagttagttcagctagaagacgaaattacaacactacgacaagttttgtcagcgaaagaaaggcatctagttgagataaaacaaaaactcggcatgaacctgatgaatgaattaaaacagaacttcagcaaaagctggcatgacatgcagactaccactgcctacaagaaaacacatgaaaccctgagtcacgcagggcaaaaggcaactgcagctttcagcaacgttggaacggccatcagcaagaagttcggagacatgagttactccattcgccattccataagtatgcctgctatgaggaattctcctactttcaaatcatttgaggagagggttgagacaactgtcacaagcctcaagacgaaagtaggcggtacgaaccctaatggaggcagttttgaggaggtcctcagctccacggcccatgccagtgcccagagcttggcaggaggctcccggcggaccaaggaggaggagctgcagtgctaagtccagccagcgtgcagctgcatccagaaaccggccactacccagcccatctctgcctgtgcttatccagataagaagaccaaaatcccgctgggaaaaacccaggccttgacattgttattcaaatggcccctccagaaagtttaatgatttccatttgtatttgtgttgatgatggaccacttgaccatcacatttcagtattcatagatgactgtcacattttaaaatgttcccacttgagcaggtacacaactggtcataattcctgtctgtgtaattcgatgtatatttttccaaacatgtagctattgtttgctttgatttttgcttggcctcctttatgatgtgcatgtccttgaaggctgaatgaacagtccctttcagttcagcagatcaacaggatggagctcttcatgactgtctccagcaataggatgatttactataaatttcatccaactacttgtgatctctctcacctacatcaattatgtatgttaatttcagcaattaaaagaattgatttt

SEQ ID NO: 2105 - protein, 204 aa, Homo sapiens
MEAQAQGLLETEPLQGTDEDAVASADFSSMLSEEEKEELKAELVQLEDEITTLRQVLSAKERHLVEIKQKLGMNLMNELKQNFSKSWHDMQTTTAYKKTHETLSHAGQKATAAFSNVGTAISKKFGDMSYSIRHSISMPAMRNSPTFKSFEERVETTVTSLKTKVGGTNPNGGSFEEVLSSTAHASAQSLAGGSRRTKEEELQC

SEQ ID NO: 2106 - DNA, 1595 bp, Homo sapiens
ggagttggaaggggaggaggaagagggggagcaggaagaggggcagaaggaagaagaagagggggaggagaaagagatagaagagtaagaggagggggaagaaagacaaggggaaggggaggaggaggaggacggggaggagcttcgccgcggcctgctccgcccagccggggtcggtggccgcatggcttcggtctcctctgcgaccttctcgggccacggggctcggtccctactgcagttcctgcggctggtagggcagctcaagagagtcccacgaactggctgggtatacagaaatgtccagaggccggagagcgtttcagatcacatgtaccggatggcagttatggctatggtgatcaaagatgaccgtcttaacaaagaccgatgtgtacgcctagccctggttcatgatatggcagaatgcatcgttggggacatagcaccagcagataacatccccaaagaagaaaaacataggcgagaagaggaagctatgaagcagataacccagctcctaccagaggacctcagaaaggagctctatgaactttgggaagagtacgagacccaatctagtgcagaagccaaatttgtgaagcagctagaccaatgtgaaatgattcttcaagcatctgaatatgaagaccttgaacacaaacctgggagactgcaagacttctatgattccacagcaggaaaattcaatcaccctgagatagtccagcttgtttctgaacttgaggcagaaagaagcactaacatagctgcagctgccagtgagccacactcctgagacactctctaaattgctgcactcctgtaacaaacattatttttccatttcattgtattgtgttttgccattgttggtctgttgatttccctagatgtgagtctgtttgttttcaattgtctgaacttcagcaagaaatgtgatacaacttgggcactaaaagaagccacagaacaggaagcggtcatgaaagtgccatggatgaacactggaggtggcagtgcctgtttatgaactaaataaataaatattaaacacctaaaatattagaatatttattggagatttaaaatcatcttattctgacttaattaccgatatccccgaaggctaggttcattgaataatagaaaatttcattatgattgcttttaagaacagattcttcagctgatttagtgataagaatccagaaaagaaaatgtactagtgatgtattctctccccagatgaaattgctgccttattcagatttactctcttgagccagattttgaatttcactgcagactgcttcagacttctaatcataggcttgtaaacctactaataggctctgcccctcttcccaatactttttgtcatttagagatataaaccggggcatataaaaatgcaacttgtattcctttgtatatttttccctgtctgacttataaatcttgagacctttattgtaaaagcatgtatcatcaggtgagaaatataaataggaactggggtcattgagcctcaggtagggaatatatcaacccgatttcttcctctcttttcccttttataggataaataatcc

SEQ ID NO: 2107 - DNA, 2280 bp, Homo sapiens
gacggcagccgccccggccgacagccccgagacgacagcccggcgcgtcccggtccccacctccgaccaccgccagcgctccaggccccgccgctccccgctcgccgccaccgcgccctccgctccgcccgcagtgccaaccatgaccgccgccagtatgggccccgtccgcgtcgccttcgtggtcctcctcgccctctgcagccggccggccgtcggccagaactgcagcgggccgtgccggtgcccggacgagccggcgccgcgctgcccggcgggcgtgagcctcgtgctggacggctgcggctgctgccgcgtctgcgccaagcagctgggcgagctgtgcaccgagcgcgacccatgcgacccgcacaagggcctattctgtcacttcggctccccggccaaccgcaagatcggcgtgtgcaccgccaaagatggtgctccctgcatcttcggtggtacggtgtaccgcagcggagagtccttccagagcagctgcaagtaccagtgcacgtgcctggacggggcggtgggctgcatgcccctgtgcagcatggacgttcgtctgcccagccctgactgccccttcccgaggagggtcaagctgcccgggaaatgctgcgaggagtgggtgtgtgacgagcccaaggaccaaaccgtggttgggcctgccctcgcggcttaccgactggaagacacgtttggcccagacccaactatgattagagccaactgcctggtccagaccacagagtggagcgcctgttccaagacctgtgggatgggcatctccacccgggttaccaatgacaacgcctcctgcaggctagagaagcagagccgcctgtgcatggtcaggccttgcgaagctgacctggaagagaacattaagaagggcaaaaagtgcatccgtactcccaaaatctccaagcctatcaagtttgagctttctggctgcaccagcatgaagacataccgagctaaattctgtggagtatgtaccgacggccgatgctgcaccccccacagaaccaccaccctgccggtggagttcaagtgccctgacggcgaggtcatgaagaagaacatgatgttcatcaagacctgtgcctgccattacaactgtcccggagacaatgacatctttgaatcgctgtactacaggaagatgtacggagacatggcatgaagccagagagtgagagacattaactcattagactggaacttgaactgattcacatctcatttttccgtaaaaatgatttcagtagcacaagttatttaaatctgtttttctaactgggggaaaagattcccacccaattcaaaacattgtgccatgtcaaacaaatagtctatcaaccccagacactggtttgaagaatgttaagacttgacagtggaactacattagtacacagcaccagaatgtatattaaggtgtggctttaggagcagtgggagggtaccagcagaaaggttagtatcatcagatagcatcttatacgagtaatatgcctgctatttgaagtgtaattgagaaggaaaattttagcgtgctcactgacctgcctgtagccccagtgacagctaggatgtgcattctccagccatcaagagactgagtcaagttgttccttaagtcagaacagcagactcagctctgacattctgattcgaatgacactgttcaggaatcggaatcctgtcgattagactggacagcttgtggcaagtgaatttgcctgtaacaagccagattttttaaaatttatattgtaaatattgtgtgtgtgtgtgtgtgtgtatatatatatatatgtacagttatctaagttaatttaaagttgtttgtgcctttttatttttgtttttaatgctttgatatttcaatgttagcctcaatttctgaacaccataggtagaatgtaaagcttgtctgatcgttcaaagcatgaaatggatacttatatggaaattctgctcagatagaatgacagtccgtcaaaacagattgtttgcaaaggggaggcatcagtgtccttggcaggctgatttctaggtaggaaatgtggtagcctcacttttaatgaacaaatggcctttattaaaaactgagtgactctatatagctgatcagttttttcacctggaagcatttgtttctactttgatatgactgtttttcggacagtttatttgttgagagtgtgaccaaaagttacatgtttgcacctttctagttgaaaataaagtgtatattttttctataaa

SEQ ID NO: 2108 - DNA, 2636 bp, Homo sapiens
cactgctgacataactcccttggtcttcaatttaatagttgttaagtttttgcccacattgcatatgcctttcatttataatttatttaccctgcttgacttagttttgggaattcgtaaatttaaaggtgtgtgtattctgtttgcatctccctgtcactgtgacacacctagatgtgtgttacttcaattaaaattctcaaatttaattttgatttgcttcagcagggaaaatattctcaataatgtaaaataattaaggtctatacatgggttgtatttttctggttcacaacagcacaaagtgtctttcatttttttgttggttttcttttaagatcttttttaccctgaagtcggtgaatacttttctagtttatttgatactctttctgtgtatatattaagcttttgctgtagattgcctagtaaaattactaaggataggttgtttttacatatggtctatttaagtctgatgtttacgggggaaagtgtagttactaaaaatgtttaacataatttggaagaagagtatgaacaaccaataccaatacctattgcgtttggattcttaagaccccagtttgttattccactaaactagttatcttaaccatatcatctggttttgtgggccattatttaccttcccttatgtcttatagaataatggttaatatttttaggtcaaaattacttttggaaagtaactttcccacaattaactgtttttgagcacctgacaaaatttagtgtttaccttgcgtgccattttgtgtcatccttcattaaaaaagcaattggaggtttgccagttatctcacttccctttttaaatcaatgttgttttaatgcactaatctgaattctgtaaagaggattatcttagtttatactttgtattttataatgttcttgtatagcagctcggtactgaaggcggtgtttaacttggcaagctctgagacttcaaatgggaacaaatagtaagtagctaagtaaaccacatctttgcaaccaaaataaagatgagttaaaaggtatctggttaggcctatttcatgaggactatgctctggtgggaccacaggtcacctgatacttagtgctgtgctgcctgaaacctcagcatggagacatcaccacatgcactgtggccattcagcatctttctggagcaccagttcactccaggtttttattttagggtgtcatcgattttacctactttgtcagactggtagaagttgctttgcatatcagaaaaactccatttttttccacaaaagggattacagaaaactcttttgtgagtgagtgattggaacttagagactcctgttgccagaatcagactgccctagaacagaatggacaatgcagggaggagaattcacacaaacagcacctgttctgaggcctgtgccagcccaccaggcctgctcaaatgtggtctttacttcaagtgcacagaggcacatgaggtttctggtgataaaccagcgtcttaccgctgttttaaagtcccatccccatggctttcacaatcagttccgttttttttgctgtacttgataaaatgtttattctcatacaggtcaagtacatttacttctattcacagtgagtacccaataacaacaaaagcgcttacaaatttggggggcgtgattttagtacctttatttgaagtgtaatcattttaaattattattattttaactggggcagttatcagtggtttaaacaggaactttagtggcttcaatttgtttaagaaacatattaagtttgagggaaaaatttcccatgaaatatttggaacgtaagagtagtattgattagagaaaattaaataagaaacatagtatggtagccaaattttttaaaaaatcttgaacttttctgtaggtcagttttagaactgctgtgaaaagtgaaggttgccctgtggagattaaaattagagttgttttcataactgacagcatggtgaatccatttgagtcaaagtgaagaatttcctcatcaagtgactatacatttgtttttgtgtgctcaaaagaaatactcaaacacagactgatattaaccagccaggtaaattgaacgacaatgtggcattaggtatttggctgtttattggtcgttaaatactatggttttgcaatatgattgatggtaaaagagtgatgtcatattgatactagagtagcttgtttttttagtaggtgtgggaccatctcttttacaagtgcaactcagtctaggacagccatggatgcagtgtctggagttggaccctctgagcccgctggctgccccagtagcatctgcattggtgaccaaggacactgcactttgaagaggtcgccactgggttatttagtgtcttcactgcttttgttaaaaattgtaaaattttgtacacaaaaagttgtgtttttgaatatcaattgtttagacacacctacaatgataaataagtgcctttaaaggcccctctttccatgaaatacatctgtggtttagcaaggaaagtacaaaatagtttatgtagttggtataatttttatttgtgtcttcatgtagaaaaaatgaatgtcataataaaatataaaacttacgtaaag

SEQ ID NO: 2109 - protein, 108 aa, Homo sapiens
MDNAGRRIHTNSTCSEACASPPGLLKCGLYFKCTEAHEVSGDKPASYRCFKVPSPWLSQSVPFFLLYLIKCLFSYRSSTFTSIHSEYPITTKALTNLGGVILVPLFEV

SEQ ID NO: 2110 - DNA, 1586 bp, Homo sapiens
gtgactgcttagaaaactgcacagcatctgatgaaattagcgaataagaacatcaaccatgtcttacactccaggagttggtggtgaccccgcccagttggcccagaggatctcttctaacatccagaagatcacacagtgttctgtggaaatacaaagaactctgaatcaacttggaacacctcaagattcacctgaattgaggcaacagttgcaacagaagcagcagtatactaaccagcttgccaaagaaacagataagtacattaaagagtttggatctctgcccaccacccccagtgaacagcgtcaaaggaaaatacagaaggatcgcttagtggcagagttcacaacatcactgacaaacttccagaaggtccagaggcaggctgctgagcgagagaaagagtttgttgctcgagtaagagccagttccagagtgtctggcagttttcctgaggacagctcaaaagaaaggaatcttgtatcctgggaaagccaaactcaacctcaagtgcaggtgcaggatgaagaaattacagaggatgacctccgtcttattcatgagagagaatcttctatcaggcaacttgaagctgatattatggatattaatgaaatatttaaagatttgggaatgatgattcatgaacaaggagatgtaatagatagcatagaagccaatgtggaaaatgcagaggtgcacgttcagcaagcaaatcagcagctgtcaagggcagcagattatcagcgcaaatccagaaaaaccctgtgcatcatcattcttatccttgtcattggagttgcgattatcagtctcatcatatggggattgaaccactgaagttataaaggagcacactgtcgcactacattgtctaaattatgtaggaagattcctgtaatcatgtttttttaattattattttaaagctattgtataaaggatggttcccatactttgttatttttattgggggggttggggtggttcctttggattaaatctgatattttctaatactgaaagattttctaaatgtcactgctgacataactcccttggtcttcaatttaatagttgttaagtttttgcccacattgcatatgcctttcatttataatttatttaccctgcttgacttagttttgggaattcgtaaatttaaaggtgtgtgtattctgtttgcatctccctgtcactgtgacacacctagatgtgtgttacttcaattaaaattctcaaatttaattttgatttgcttcagcagggaaaatattctcaataatgtaaaataattaaggtctatacatgggttgtatttttctggttcacaacagcacaaagtgtctttcatttttttgttggttttcttttaagatcttttttaccctgaagtcggtgaatacttttctagtttatttgatactctttctgtgtatatattaagcttttgctgtagattgcctagtaaaattactaaggataggttgtttttacatatggtctatttaagtctgatgtttacgggggaaagtgtagttactaaaaatgtttaacataatttggaagaagagtatgaaca

SEQ ID NO: 2111 - DNA, 534 bp, Homo sapiens
ctttccctgccgccgccgagtcgcgcggaggcggaggcttgggtgcgttcaagattcagcttcacccgtaacccaccgccatggccgaggaaggcattgctgctggaggtgtaatggacgttaatactgctttacaagaggttctgaagactgccctcatccacgatggcctagcacgtggaattcgcgaagctgccaaagccttagacaagcgccaagcccatctttgtgtgcttgcatccaactgtgatgagcctatgtatgtcaagttggtggaggccctttgtgctgaacaccaaatcaacctaattaaggttgatgacaacaagaaactaggagaatgggtaggcctttgtaaaattgacagagaggggaaaccccgtaaagtggttggttgcagttgtgtagtagttaaggactatggcaaggagtctcaggccaaggatgtcattgaagagtatttcaaatgcaagaaatgaagaaataaatctttggctcacaaaaaaaaaaaaaaaaaaaaaaaaaaaaaaaaaa

SEQ ID NO: 2112 - protein, 132 aa, Homo sapiens [sequence omitted]

SEQ ID NO: 2113 - DNA, 1258 bp, Homo sapiens
ggccgcctcgcacccggaacaacaaagcaaggaagacggagtccgagcctcgggggctcctagcaacgggccggggcgggagttccatggagactggggagcgcgcccgtctcatcctcatccttgtcctccagcttctccttcgcatccgacgcaaccggcagcagcgctgccgccgcgtcctcagccaccgctccctcttcccacggatgtgatcttcgtggtggaaagctaaattttaaaaccaccccaatggatgcagacagtgatgttgcattggacattctaattacaaatgtagtctgtgtttttagaacaagatgtcatttaaacttaaggaagattgctttggaaggagcaaatgtaatttataaacgtgatgttggagtaatattaatgaagcttagaaaacctagaattacagctacaatttggtcctcaggaaaaattatttgcactggagcaacaagtgaagaagaagctaaatttggtgccagacgcttagcccgtagtctgcagaaactaggttttcaggtaatatttacagattttaaggttgttaacgttctggcagtgtgtaacatgccatttgaaatccgtttgccagaattcacaaagaacaatagacctcatgccagttacgaacctgaacttcatcctgctgtgtgctatcggataaaatctctaagagctacattacagattttttcaacaggaagtatcacagtaacagggcccaatgtaaaggctgttgctactgctgtggaacagatttacccatttgtgtttgaaagcaggaaagaaattttataattcaccacttaattggttagaatctctaactgagcaccttttaaacctgctgcacattggactcaaaaggaaaactggaccaacaataattgaggaaatagactcttttattcattcacggctacagtgtaagctccagtccctttggattttattccaaaccttgctgtaatataaaaggaagtttacaagacatgatattgctgcttttacaaaaggacattctatttattttcgcagtaattctcatgtccccataagcagagctgtcacagtgtgcactaccttagattgttttattgtcgtcattgttatttttttccattttgagctaatgtgttttatttgtgaatagtcttttacatttttgtatgctgaatatgggcaccaaagaacctgtaaaagttatctttttcaattgaatgtgcacaaataaaagtttgga

SEQ ID NO: 2114 - DNA, 3204 bp, Homo sapiens
gccggggagggacgcaggcaggcggcgggcagcgggaggcggcagcccggtgcggtccccgcggctctcggcggagccccgcgcccgccgcgccatggcccgaagaccccggcacagcatatatagcagtgacgaggatgatgaggactttgagatgtgtgaccatgactatgatgggctgcttcccaagtctggaaagcgtcacttggggaaaacaaggtggacccgggaagaggatgaaaaactgaagaagctggtggaacagaatggaacagatgactggaaagttattgccaattatctcccgaatcgaacagatgtgcagtgccagcaccgatggcagaaagtactaaaccctgagctcatcaagggtccttggaccaaagaagaagatcagagagtgatagagcttgtacagaaatacggtccgaaacgttggtctgttattgccaagcacttaaaggggagaattggaaaacaatgtagggagaggtggcataaccacttgaatccagaagttaagaaaacctcctggacagaagaggaagacagaattatttaccaggcacacaagagactggggaacagatgggcagaaatcgcaaagctactgcctggacgaactgataatgctatcaagaaccactggaattctacaatgcgtcggaaggtcgaacaggaaggttatctgcaggagtcttcaaaagccagccagccagcagtggccacaagcttccagaagaacagtcatttgatgggttttgctcaggctccgcctacagctcaactccctgccactggccagcccactgttaacaacgactattcctattaccacatttctgaagcacaaaatgtctccagtcatgttccataccctgtagcgttacatgtaaatatagtcaatgtccctcagccagctgccgcagccattcagagacactataatgatgaagaccctgagaaggaaaagcgaataaaggaattagaattgctcctaatgtcaaccgagaatgagctaaaaggacagcaggtgctaccaacacagaaccacacatgcagctaccccgggtggcacagcaccaccattgccgaccacaccagacctcatggagacagtgcacctgtttcctgtttgggagaacaccactccactccatctctgccagcggatcctggctccctacctgaagaaagcgcctcgccagcaaggtgcatgatcgtccaccagggcaccattctggataatgttaagaacctcttagaatttgcagaaacactccaatttatagattctttcttaaacacttccagtaaccatgaaaactcagacttggaaatgccttctttaacttccacccccctcattggtcacaaattgactgttacaacaccatttcatagagaccagactgtgaaaactcaaaaggaaaatactgtttttagaaccccagctatcaaaaggtcaatcttagaaagctctccaagaactcctacaccattcaaacatgcacttgcagctcaagaaattaaatacggtcccctgaagatgctacctcagacaccctctcatctagtagaagatctgcaggatgtgatcaaacaggaatctgatgaatctggaattgttgctgagtttcaagaaaatggaccacccttactgaagaaaatcaaacaagaggtggaatctccaactgataaatcaggaaacttcttctgctcacaccactgggaaggggacagtctgaatacccaactgttcacgcagacctcgcctgtggcagatgcaccgaatattcttacaagctccgttttaatggcaccagcatcagaagatgaagacaatgttctcaaagcatttacagtacctaaaaacaggtccctggcgagccccttgcagccttgtagcagtacctgggaacctgcatcctgtggaaagatggaggagcagatgacatcttccagtcaagctcgtaaatacgtgaatgcattctcagcccggacgctggtcatgtgagacatttccagaaaagcattatggttttcagaacacttcaagttgacttgggatatatcattcctcaacatgaaacttttcatgaatgggagaagaacctatttttgttgtggtacaacagttgagagcagcaccaagtgcatttagttgaatgaagtcttcttggatttcacccaactaaaaggatttttaaaaataaataacagtcttacctaaattattaggtaatgaattgtagccagttgttaatatcttaatgcagatttttttaaaaaaaacataaaatgatttatctgtattttaaaggatccaacagatcagtattttttcctgtgatgggttttttgaaatttgacacattaaaaggtactccagtatttcacttttctcgatcactaaacatatgcatatatttttaaaaatcagtaaaagcattactctaagtgtagacttaataccatgtgacatttaatccagattgtaaatgctcatttatggttaatgacattgaaggtacatttattgtaccaaaccattttatgagttttctgttagcttgctttaaaaattattactgtaagaaatagttttataaaaaattatatttttattcagtaatttaattttgtaaatgccaaatgaaaaacgttttttgctgctatggtcttagcctgtagacatgctgctagtatcagaggggcagtagagcttggacagaaagaaaagaaacttggtgttaggtaattgactatgcactagtatttcagactttttaattttatatatatatacattttttttccttctgcaatacatttgaaaacttgtttgggagactctgcattttttattgtggtttttttgttattgttggtttatacaagcatgcgttgcacttcttttttgggagatgtgtgttgttgatgttctatgttttgttttgagtgtagcctgactgttttataatttgggagttctgcatttgatccgcatcccctgtggtttctaagtgtatggtctcagaactgttgcatggatcctgtgtttgcaactggggagacagaaactgtggttgatagccagtcactgccttaagaacatttgatgcaagatggccagcactgaacttttgagatatgacggtgtacttactgccttgtagcaaaataaagatgtgcccttatttt

SEQ ID NO: 2115 - protein, 640 aa, Homo sapiens
MARRPRHSIYSSDEDDEDFEMCDHDYDGLLPKSGKRHLGKTRWTREEDEKLKKLVEQNGTDDWKVIANYLPNRTDVQCQHRWQKVLNPELIKGPWTKEEDQRVIELVQKYGPKRWSVIAKHLKGRIGKQCRERWHNHLNPEVKKTSWTEEEDRIIYQAHKRLGNRWAEIAKLLPGRTDNAIKNHWNSTMRRKVEQEGYLQESSKASQPAVATSFQKNSHLMGFAQAPPTAQLPATGQPTVNNDYSYYHISEAQNVSSHVPYPVALHVNIVNVPQPAAAAIQRHYNDEDPEKEKRIKELELLLMSTENELKGQQVLPTQNHTCSYPGWHSTTIADHTRPHGDSAPVSCLGEHHSTPSLPADPGSLPEESASPARCMIVHQGTILDNVKNLLEFAETLQFIDSFLNTSSNHENSDLEMPSLTSTPLIGHKLTVTTPFHRDQTVKTQKENTVFRTPAIKRSILESSPRTPTPFKHALAAQEIKYGPLKMLPQTPSHLVEDLQDVIKQESDESGIVAEFQENGPPLLKKIKQEVESPTDKSGNFFCSHHWEGDSLNTQLFTQTSPVADAPNILTSSVLMAPASEDEDNVLKAFTVPKNRSLASPLQPCSSTWEPASCGKMEEQMTSSSQARKYVNAFSARTLVM

SEQ ID NO: 2116 - DNA, 1137 bp, Homo sapiens
ctccctgtcgccgcggaggggcgggggcaggacgcgcaactccggccggagctgtccggggtcgtgagccggccccgccttggtggcggcgccccctcgcggtccagaggcagacgcatcgggtgggctcgggtctccagcccggccgggaggagggaccgggtctgcggagcggggactcggggcctcggcggggcgcgcacacgcaggcggggcggcccggggtgcggggcctctgcgcggctgaccaggctcccagagcgtcagcgccgcccatggccgagccgctccagccagaccccggggcggccgaggacgcggcggcccaagctgtggagacgccgggctggaaggccccggaggacgccggcccccagcccggaagttatgagatccgacactatggaccagccaagtgggtcagcacgtccgtggagtctatggactgggattcagccatccagacgggctttacgaaactgaacagctacattcaaggcaaaaacgagaaagagatgaaaataaagatgacagctccagtgacaagctacgtggagcctggttcaggtccttttagtgagtctaccattaccatttccctgtatattccctctgaacagcaatttgatccacccaggcctttagagtcagatgtcttcattgaagatagagccgaaatgactgtgtttgtacggtctttcgatggattttctagtgcccaaaagaatcaagaacaacttttgacattagcaagcattttaagggaagatggaaaagttttcgatgagaaggtttactacactgcaggctacaacagtcctgtcaaattgcttaatagaaataatgaagtgtggttgattcaaaaaaatgaacccaccaaagaaaacgaatgagaaaaatgaaaggaagttctgctgtcagaggcaaaacatctgtttatcatagacatcaacatgacctataagtaaagtgcgtgtctagtgtcttctattgagagtactactattaattaagcttatttccaatgtgcctttttaatgcttgaagttttatctacatacacaggtaacagaggacagtagtctgtaaacatataaatcggtcataactatcgtggtctttatttctgtgaggatc

SEQ ID NO: 2117 - protein, 205 aa, Homo sapiens
MAEPLQPDPGAAEDAAAQAVETPGWKAPEDAGPQPGSYEIRHYGPAKWVSTSVESMDWDSAIQTGFTKLNSYIQGKNEKEMKIKMTAPVTSYVEPGSGPFSESTITISLYIPSEQQFDPPRPLESDVFIEDRAEMTVFVRSFDGFSSAQKNQEQLLTLASILREDGKVFDEKVYYTAGYNSPVKLLNRNNEVWLIQKNEPTKENE

SEQ ID NO: 2118 - DNA, 2446 bp, Homo sapiens
agaaccaccacaacaaataaccagcctggcagtcaattcttcctatggactggtggtttttggcaattgcaatggcattgctatggttgactacctccagaaagcagtgctgctcaacctgggcactattgaattatatggctctaatgatccttatcggagagaaccccgatctcctcgtaaatctcgacagccttcaggagccggtctgtgtgatattagtgaagggactgttgttccagaggatcgctgcaaatctccaacctctgcaaagatgtcaaggaagttaagcttacctactgacctaaagcctgatttagatgtaaaggataactcctttagccgatcacggagttcaagtgtaacaagcattgacaaagaatcccgagaagcgatctccgctcttcatttctgtgaaacgtttactcgaaagacggactcgtccccttccccttgtctatgggttggaacaacgctaggaacagtgcttgtcattgcactgaaccttcccccagggggagagcaaagacttcttcagccagtaattgtgtctccaagtggtactatattgaggttaaaaggtgcaatcttgagaatggcatttctggataccacaggctgcttaataccacctgcgtatgaaccctggagagagcacaatgttcctgaagaaaaagacgaaaaggagaaattgaaaaaacggcggcctgtctcagtatccccctcctcttctcaggaaattagtgaaaaccagtatgcagtgatatgttctgaaaagcaagcaaaagtaatctcactgccaacccagaactgtgcttataagcaaaatattacagagacctcgtttgtgcttcgtggagatattgtagcattgagtaacagtatctgccttgcctgtttctgtgccaatggacatataatgacttttagtttgccaagtttaagacctctgttggatgtgtattacttgccccttaccaatatgcggatagccagaacgttctgctttaccaacaatggacaagcattataccttgtttcacctacagaaatccagagacttacttatagtcaagagacctgtgaaaatcttcaggaaatgttgggtgaactcttcactcctgtagaaacacctgaagcaccaaacaggggattctttaaaggcttatttggaggtggtgcacaatctcttgacagagaagaactatttggagaatcgtcctcaggaaaggcttcaaggagccttgcacagcatattcctggccctggtggcattgaaggcgtaaaaggggcagcatctggagttgttggtgaattagcacgagccaggctggcactagatgaaagagggcagaaacttggcgatctggaagaaagaactgcggccatgttatcaagtgcagagtcattttctaaacatgctcatgagattatgttgaaatacaaagataagaagtggtaccagttctgacaaccagaatccaataagtccaacttcagccagaaggaaaaaagttttccatttttattacattctttaggaaagttaacgttaaagggatgttcgtcactgaatactgttctttcctagcacagtcatgcactgttttacctcagtcatgtggctttaactgaggagtgttcacacgcactcgaaatggagtatatggtgtgtgccagttatgagttgaccatttgggaattaaacaggtcacacgtgacagatgaagaaaccaagggggctgctgaggagacctggtgcagggactaatcctggatcattcctgtattaaactttcatatgccaaaagggtttgtgccgttttatctgccatcagtgtttgacctgtttagggcagaggcaataagtcagaagtcttgaagttgaaatagttatatgtgtgtcattggactggattataaacagctgtcttggactttccctctcttaacactgactggtcatcagtatcattagtgaaaaagaaacaaattgtttgttatcatctctttagacagataagctgaatggtgggctttaaataataaaaacatacacatagttgacttgtgtatgagctactcttggattcttgttattatagacttgtatttagttcatattttgtcaaaagcaaaacaagaagatacatcacttttcattgaaaagaaaagtgtagagcatgactgaattgctcatcattctgggagtttccatgtagtggctatgcagtgtggaaagtgagaaaaacctccattgtggtgaggagaatacttcaatgtcccttgtccttgttctcattaattcagctaaaggtggatttgaccaaaataatgctggttaaatttgtagaaatgttgaaattggctgtgttttaaattttgcttgaatttttataaaatgtttaaccaaatgtacctttgcattctttaattaaaattgctt

SEQ ID NO: 2119 - DNA, 540 bp, Homo sapiens
tttttcgtctgggctgccaacatgccatccagactgaggaagacccggaaacttaggggccacgtgagccaccgccacggccgcataggcaagcaccggaagcaccccggcggccgcggtaatgctggtggtctgcatcaccaccggatcaacttcgacaaataccacccaggctactttgggaaagttggtatgaagcattaccacttaaagaggaaccagagcttctgcccaactgtcaaccttgacaaattgtggactttggtcagtgaacagacacgggtgaatgctgctaaaaacaagactggggctgctcccatcattgatgtggtgcgatctggctactacaaagttctgggaaagggaaagctccccaagcaggctgtcaccgtgcaggccaaattcttcagcagaagagctgaggagaagattaagagtgttgggggggcctgtgtcctggtggcttgaagccgcatggagggagtttcattaaatgctaactacttaaaaaaaaaaaaagaagaagaagaagaagaaaaa

SEQ ID NO: 2120 - protein, 148 aa, Homo sapiens
MPSRLRKTRKLRGHVSHRHGRIGKHRKHPGGRGNAGGLHHHRINFDKYHPGYFGKVGMKHYHLKRNQSFCPTVNLDKLWTLVSEQTRVNAAKNKTGAAPIIDVVRSGYYKVLGKGKLPKQAVTVQAKFFSRRAEEKIKSVGGACVLVA

SEQ ID NO: 2121 - DNA, 1794 bp, Homo sapiens
atgcggtcccgggttctgtggggcgctgcccggtggctctggccccgccgggccgttggcccagcccgccggcccctgagctccggtagcccgccgctggaggagctgttcacccggggcgggcccttgcggaccttcctcgagcgccaggcggggtctgaagcccatttgaaggtcaggaggcccgagttgctggcggtgatcaaactgctgaacgagaaggagcgggagctgcgggagactgagcacttgctgcacggtaagggtcgggcccgggggagaggcgtcagagcacattcttgactcttcgtttgacttttccactgcccacactacccgagtttgaaactctttactcacttgcagccgtttttattttggatcagaggtcaggacatcattacgtgctgtgatcccatcctctcctgtgggctctcttgtgctcctttgccacggcgctctgccgccttttacatgcttattagttgtggactcgggcaagagctcattagctcagcaaggataaataaggcactgtccctgtgatgggctccacagcggtgtttctcaaagtgtggtgtggagacccatttgcagtagtatcagggcagtgcttgttaatagcagacttaggactcagaatctcagacctatacgtgggtaaaggtactaaattgggaaattcagtatggcctaagtatagaataggtgggagatgatgtcatagaaacatgaagccagaaaaatagttaagaaccttgcaagacaaagaatttggatttattttttatagaccatggaaagttagcaaatgtttttaagcagagaattcacgtctttgtaaagaaaagttaatggtggcatgcgctgaggataaattggagtattctccagaaacgctggtggctgacaggccagggaggaggcagttgaaacaatccaaagaagaaatggtgataggcatagttctgactcacaaaacattttgagaaacaagttaggatttagtggcttatgccctgagaaggatgagggagagagttagttctaagaaaagtcttaggtttctggcttcagcacgagtggtactgttaattaagatgaaagtataaaagttggaccgaattttttaaaaagatgagttttgcattgaatgccatattaagttaaaaatacctgtgaaaaggaattccaataaagatatctgtactagtctaggagaaaaaattactgacataggagaaaaattgagcccaaataatcatatgagagctctcgagatatacagtacgtggtaaattaaaccttagaagtagatgagaacactcagggaaaatgtgttaagatagaaacaagtctaacaaggccagaaatacacagtatttgaggagcaggcagagaagaaggctataaaaggtcaagaaaaaaacagccagagctttgtgaccctgaagtagataaataaatgaagctgtagaagccaatagaaaatttcaagaagtaagagatccttggccaggcgtggtggctcacgcctctaattccagcactttgagaggctcaggtgggccgatcacttgagcccaggagttcgagaccagcctgggtaacatggcaaaaccctgtctctacaaacaatgcaaaattagctgggcatggtggtgcgtgcctgtggtcccagctacttgagaggctgaggtgggagaatcgcttgaacccgggaggtggaggttgcagtgagccaagatggtgccactgcattccagcctgggtgacagcgcaagaccctgcctc

SEQ ID NO: 2122 - DNA, 1143 bp, Homo sapiens
atgcggtcccgggttctgtggggcgctgcccggtggctctggccccgccgggccgttggcccagcccgccggcccctgagctccggtagcccgccgctggaggagctgttcacccggggcgggcccttgcggaccttcctcgagcgccaggcggggtctgaagcccatttgaaggtcaggaggcccgagttgctggcggtgatcaaactgctgaacgagaaggagcgggagctgcgggagactgagcacttgctgcacgatgagaatgaagatttaaggaaacttgcagagaatgaaatcactttgtgtcaaaaagaaataactcagctgaagcatcagattatcttacttttggttccctcagaagaaacagatgaaaatgatttgatcctggaagtaactgcaggagttggaggtcaggaggcaatgttgtttacatcagagatatttgatatgtatcagcaatatgctgcatttaaaagatggcattttgaaaccctggaatattttccaagtgaactaggtggccttagacatgcatctgccagcattgggggttcagaagcctataggcacatgaaatttgaaggaggtgttcacagagtacaaagagtgccaaagacagaaaagcaaggccgcgtccatactagcaccatgactgtagcaatattaccccagcctactgagattaatctggtgattaatccgaaagatttgagaattgacactaagcgagccagtggagctggggggcagcatgtaaataccacggacagtgctgtccggatagttcatcttccaacaggtgttgtttctgaatgtcaacaagagagatctcagctgaaaaataaagagctggctatgacaaagttacgtgcaaaactgtacagcatgcatctagaagaagaaataaataaaagacagaatgctagaaaaattcagattggaagtaaaggaagatcagagaaaataagaacatataattttccacagaaccgggtcacagatcacagaataaacaagacgctgcatgatcttgaaacttttatgcaaggagattatctactggatgaacttgtacagtcattgaaggaatacgccgattatgaatctttagtagaaattatttcccaaaaagtttaa

SEQ ID NO: 2123 - DNA, 10742 bp, Homo sapiens
caaaaatcagtctgatctcgggaaacctggagaaatttattttctgtactctaatgttctttcattttggtgaccatcaaggtgctgggagaggaattagatggctgtaattcaaagttaatggaattagatgcagcagtacagaaattcttggaacagaatggccaactgggtaagccactggccaagaagataggaaaactgactgaacttcaccagcagaccattagacaagctgagaatcggctctccaagctcaatcaggcagcatcacatttagaagaatacaatgaaatgcttgaattaattttgaagtggattgaaaaagctaaagtcttggctcatggaactattgcatggaattctgcaagccagcttcgggaacaatatattttgcatcagaccctgctagaagaatccaaagaaattgacagtgagctggaagcaatgactgagaaattacagtacctcactagcgtgtactgtacagaaaaaatgtctcagcaagtggcagaactgggacgggagactgaggagttgcgacagatgatcaaaattcgtttgcagaacctccaagatgcagctaaggatatgaaaaaatttgaagcagagttgaaaaagttacaagctgccttggagcaagcccaggcaacactgacttctccagaagttggacgtctcagtctcaaggagcagctctctcatcggcagcatttgttgtctgagatggagtcactgaagccgaaggtgcaagcagtgcagctctgccagagtgccctccggatccccgaggatgtggttgccagcttacctctctgtcatgctgctctgcggctgcaggaagaggccagccggctgcagcacaccgccatccagcagtgtaacatcatgcaggaagctgtggtacaatatgaacaatatgagcaagaaatgaaacatctccagcaactgatagaaggagctcacagagagattgaggataaacctgttgccaccagtaacatacaggagctgcaggctcagatttctcggcatgaggagctggcgcagaaaattaagggctaccaggagcagatcgcttctttgaattccaagtgcaagatgctgacgatgaaagccaagcacgccaccatgctgctgacggtgaccgaggtcgaggggctggcggaagggacagaggacctggatggggagctcctccccacgccttcggcccacccctctgtggtcatgatgactgcaggtcgctgtcacactttgctgtcaccggtcactgaggagtctggggaggagggaaccaacagtgagatttcctctccacctgcctgtcgctccccttcacctgtggctaatacagatgcttctgttaaccaggacattgcatattaccaagccttgtctgctgagaggttgcagacagatgctgcaaaaattcaccccagcacatccgcatcccaggagttctatgaaccgggattggagccatccgctactgccaaactgggtgatttgcagcgttcttgggaaaccttaaagaatgtgatcagtgagaagcagcgcacactctatgaagctttggaacgccagcagaagtaccaggactccctccagtccatctctacgaagatggaggccattgagctgaaactcagtgagagcccagagcctggcaggagtccagaaagccagatggctgaacatcaggcattgatggatgagattctcatgctccaggatgaaatcaatgagctccagtcctctctcgcagaggagctggtatccgagtcttgtgaggccgaccctgcggagcagctggccttgcagtccacgctcactgtcttagccgagcgaatgtccaccatcaggatgaaagcctcggggaaacggcagcttttggaggagaagttgaatgatcagctggaggaacaaaggcaggaacaggccctgcagaggtatcgctgtgaagccgatgagctggacagctggctcttgagtaccaaggccactctggacactgcgctgagtccacccaaggagcccatggacatggaggcccagcttatggactgccagaatatgctggtggaaatagagcagaaggtggtggctttatcagaactgtcagtccacaatgagaacctgctgctggagggcaaagctcacaccaaggacgaggccgagcagctggctggaaagctgagaaggctcaaggggagcctgctggagctgcagagagccctgcatgataagcagctcaacatgcagggaacagcacaggagaaggaggagagcgatgttgacctaacagccacgcagagccccggcgtccaggaatggctggcccaagctcgcaccacatggacccagcagcggcagagcagtctccagcaacaaaaagagttagaacaggaattagccgagcagaagagtctccttcgctcagtagccagtcgtggagaggagattctaattcaacattcggcggcagagacctctggtgatgctggcgaaaaacctgatgtgttatcccaggagttggggatggaaggggagaaatcatccgctgaagaccagatgagaatgaaatgggaaagcctacatcaagaatttagtaccaagcagaaactactacagaatgttctggaacaggaacaagagcaagtgctttatagcaggccaaatcgactcttgtctggtgtgccactgtacaaaggggacgtgccaacccaagataaatctgcagttacatctttgctggatggactgaaccaagccttcgaggaggtttcatcccagagtggaggggcaaagaggcagagtatacacttggagcagaagttgtatgatggagtctcagccacctctacttggttggatgacgttgaagaacgtttatttgttgccacagcacttttaccagaagaaacagagacttgtctcttcaaccaagagattcttgccaaagacattaaggaaatgtctgaagaaatggataagaacaaaaacttgttttcccaagcttttccagagaatggtgataatcgagatgttattgaagatactttgggttgtcttttgggcaggttatccttgctagactcagtagtgaatcaacgatgtcatcagatgaaagaaagacttcagcaaatactaaatttccagaatgatctgaaagtgctgtttacatcactggctgacaacaaatacatcattctgcaaaaactggcaaatgtgtttgaacagcccgtagcagaacaaatagaggcaatacaacaggctgaagatggactcaaagaatttgatgcaggaatcattgaattaaagaggcgtggtgacaagctacaggtcgagcagccgtccatgcaagaactctccaagctccaggacatgtatgatgagctgatgatgatcattggctcccggaggagtggtctgaatcagaaccttacactcaagagtcagtatgagagggccctacaagatctggctgacctgctagaaactggtcaggagaagatggcaggagaccagaaaatcatcgtgtcttccaaagaggaaatccagcaactacttgacaaacataaggaatactttcagggcctggaatctcatatgatcttgactgaaacactcttcagaaagataatcagctttgcagtccaaaaggaaacccagttccatacagagctgatggctcaggcttctgctgtactgaaacgggctcacaagaggggtgtggagctggagtacattctagagacgtggtcccatctggatgaggaccagcaggagctcagcagacagctggaggtggtggaaagcagcatcccaagcgtgggtctggtggaggagaacgaggacaggcttattgaccgcataacactctaccagcatttaaaatctagccttaatgaataccagcccaaattatatcaagtattagatgatgggaaacgacttctgatatccatcagctgctcagatctagaaagccaactaaatcaacttggagagtgctggctaagtaacaccaataaaatgtctaaggaacttcacagactggaaacaatattgaaacactggaccagatatcaaagtgaatctgcagatctaattcactggttacaatctgcaaaagaccggctagaattttggactcagcaatctgtgacagtcccacaagagctggaaatggtccgtgatcatctaaatgctttcctggagttttctaaagaagtggatgcccaatcttccctgaaatcatctgttctgagtactggaaatcagctccttcgactaaaaaaggtggacacagccacgctgcgctctgagctgtcgcgcattgatagccagtggactgacctgctaaccaatatcccagccgtccaggagaagctccaccagctccagatggataaactgccttcccgccatgccatttctgaagtcatgagttggatttctctaatggaaaatgttattcagaaggatgaagataatattaaaaattccataggttacaaggcaattcatgaataccttcagaaatataagggttttaagatagacattaactgtaaacagctgacagtggattttgtgaaccagtccgtgctacaaatcagcagtcaggatgtggaaagtaagcgtagtgataagactgattttgctgagcaacttggagcaatgaataaaagttggcaaattctgcaaggtctagtaactgagaagatccagctgttggaaggcttattggaatcttggtcagaatatgaaaataatgtacaatgtctgaaaacatggtttgaaacccaggaaaagagactaaaacaacagcatcgaattggagatcaggcttctgttcaaaatgcactgaaagactgtcaggatctggaagatttgattaaagcaaaagaaaaagaagtagagaaaattgagcagaatggacttgctttgattcagaacaagaaagaagacgtctctagcattgtcatgagcacactgcgagagctcggccaaacctgggcaaatttagatcacatggttggacaattaaagatactgctgaaatcagtgcttgaccaatggagtagtcacaaagtggcctttgacaagataaacagttacctcatggaggccagatactctctttcccgattccgtctgctgactggctccttagaagctgtgcaagttcaggtggacaatcttcagaatctccaagatgatctggaaaaacaggaaaggagcttacagaaatttggctctatcaccaaccaattattaaaagagtgtcacccacccgtgacagaaactcttaccaatacactgaaagaagtcaacatgagatggaataacttgctggaagagattgctgagcagctacagtccagcaaggccctacttcagctttggcaaagatacaaggactactccaaacagtgtgcttcgacagttcagcagcaggaggatcgaaccaatgagctgttgaaggcagccacaaacaaggacattgccgatgatgaggttgccacatggattcaagattgcaacgacctcctcaaaggactgggcacagttaaagattccctcttttttctccatgagctgggagagcaactgaagcaacaagtggatgcttccgcagcatcagctattcaatcggatcaactctctttgagtcaacacttgtgtgccctggagcaagctctctgcaaacagcagacttcattacaggctggagttcttgattatgaaacctttgccaagagtttagaagctttggaggcctggatagtggaagctgaagaaatactacaagggcaggaccctagccactcatctgacctctccacaatccaggaaaggatggaagaacttaagggacagatgttaaaattcagcagcatggctccagatttagaccgtctaaatgagcttggatataggttacccttgaatgataaggaaatcaaaagaatgcagaatctgaaccgccattggtctctgatctcctctcagactacagaaagattcagcaagttgcagtcatttttgctacaacatcagactttcttggaaaaatgtgaaacatggatggaattcctagttcagacagaacaaaagttagcagtagagatttcaggaaattatcagcaccttttggaacagcagagagcacacgagttgtttcaagccgagatgttcagtcgtcagcagattttgcactcaatcattattgatgggcaacgtcttctagaacaaggtcaagttgatgacagggatgaattcaacctgaaattgacactcctcagtaatcaatggcagggagtgattcgcagggcccagcagaggcgggggatcattgacagccagattcgccagtggcagcgctatagggagatggcagaaaagcttcgtaaatggttggttgaagtgtcctacctccccatgagtggtctcggaagtgttcctataccactgcaacaagcaaggaccctctttgatgaagtgcagttcaaagaaaaagtgtttctgcggcaacaaggcagctacatcctgactgtggaggctggcaagcaactccttctctcggcggacagtggcgctgaggccgccttgcaggccgaactcgctgaaatccaagagaaatggaaatcagccagcatgcggctggaagaacagaagaaaaaactagccttcttgttgaaagactgggaaaaatgtgagaaaggaatagcagattccctggagaaactacgaactttcaaaaagaagctttcgcagtctctcccggatcaccatgaagagctccatgcagaacaaatgcgttgcaaggaattagaaaatgcagttgggagctggacagatgacttgacccagttgagcctgctgaaggacaccctctctgcctatatcagtgctgatgatatctccattcttaatgaacgcgtagagcttctgcaaaggcagtgggaagaactatgccaccagctctccttaaggcggcagcaaataggtgaaagattgaatgaatgggcagtcttcagtgaaaagaacaaggaactctgtgagtggttgactcaaatggaaagcaaagtttctcagaatggagacattctcattgaagaaatgatagagaagctcaagaaggattatcaagaggaaattgctattgctcaagagaacaaaatacagctccaacaaatgggagaacgacttgctaaagccagccatgaaagcaaagcatctgagattgaatacaagctgggaaaggtcaacgaccggtggcagcatctcctggacctcattgcagccagggtgaagaagctgaaggagaccctggtagccgtgcagcagcttgataagaacatgagcagcctgaggacctggctcgctcacatcgagtcagagctggccaagccaatagtctacgattcctgtaactcggaagaaatacagagaaagcttaatgagcagcaggagcttcagagagacatagagaagcacagtacaggtgttgcatctgtcctcaacctgtgtgaagtcctgctgcacgactgtgacgcctgtgccactgatgccgagtgtgactctatacagcaggctacgagaaacctggaccggcggtggagaaacatttgtgctatgtccatggaaaggaggctgaaaatcgaagagacgtggcgattgtggcagaaatttctggatgactattcacgttttgaagattggctgaagtcttcagaaaggacagctgcttttcccagctcttctggggtgatctatacagttgccaaggaagaactaaagaaatttgaggctttccagcgacaggtccacgagtgcctgacgcagctggaactgatcaacaagcagtaccgccgcctggccagggagaaccgcactgattcagcatgtagcctcaaacagatggttcacgaaggcaaccagagatgggacaacctgcaaaagcgtgtcacctccatcttgcgcagactcaagcattttattggccagcgtgaggagtttgagactgcgcgggacagcattctggtctggctcacagagatggatctgcagctcactaatattgaacatttttctgagtgtgatgttcaagctaaaataaagcaactcaaggccttccagcaggaaatttcactgaaccacaataagattgagcagataattgcccaaggagaacagctgatagaaaagagtgagcccttggatgcagcgatcatcgaggaggaactagatgagctccgacggtactgccaggaggtcttcgggcgtgtggaaagataccataagaaactgatccgcctgcctctcccagacgatgagcacgacctctcagacagggagctggagctggaagactctgcagctctgtcggacctgcactggcacgaccgctctgcagacagcctgctttctccacagccttcctccaatctctccctctcgctcgctcagcccctccggagcgagcggtcaggacgagacaccccggctagtgtggactccatccccctggagtgggatcacgactatgacctcagtcgggacctggagtctgcaatgtccagagctctgccctctgaggatgaagaaggtcaggatgacaaagatttctacctccggggagctgttggcttatcaggggaccacagtgccctagagtcacagatccgacaactgggcaaagccctggatgatagccgttttcagatacagcaaaccgaaaatatcattcgcagcaaaactcccacggggccggagctagacaccagctacaaaggctacatgaaactgctgggcgaatgcagtagcagtatagactccgtgaagagactggagcacaaactgaaggaggaagaggagagccttcctggctttgttaacctgcatagtaccgaaacccaaacggctggtgtgattgaccgatgggagcttctccaggcccaggcattgagcaaggagttgaggatgaagcagaacctccagaagtggcagcagtttaactcagacttgaacagcatctgggcctggctgggggacacggaggaggagttggaacagctccagcgtctggaactcagcactgacatccagaccatcgagctccagatcaaaaagctcaaggagctccagaaagctgtggaccaccgcaaagccatcatcctctccatcaatctctgcagccctgagttcacccaggctgacagcaaggagagccgggacctgcaggatcgcttgtcgcagatgaatgggcgctgggaccgagtgtgctctctgctggaggagtggcggggcctgctgcaggatgccctgatgcagtgccagggtttccatgaaatgagccatggtttgcttcttatgctggagaacattgacagaaggaaaaatgaaattgtccctattgattctaaccttgatgcagagatacttcaggaccatcacaaacagcttatgcaaataaagcatgagctgttggaatcccaactcagagtagcctctttgcaagacatgtcttgccaactactggtgaatgctgaaggaacagactgtttagaagccaaagaaaaagtccatgttattggaaatcggctcaaacttctcttgaaggaggtcagtcgtcatatcaaggaactggagaagttattagacgtgtcaagtagtcagcaggatttgtcttcctggtcttctgctgatgaactggacacctcagggtctgtgagtcccacatcaggaaggagcaccccaaacagacagaaaacgccacgaggcaagtgtagtctctcacagcctggaccctctgtcagcagtccacatagcaggtccacaaaaggtggctccgattcctccctttctgagccagggccaggtcggtccggccgcggcttcctgttcagagtcctccgagcagctcttccccttcagcttctcctgctcctcctcatcgggcttgcctgccttgtaccaatgtcagaggaagactacagctgtgccctctccaacaactttgcccggtcattccaccccatgctcagatacacgaatggccctcctccactctgaactaagcagatgccatctgcagaagtgctggtagcataaggaggatcgggtcataagcaatcccaaactaccaacaagaggaccttgatcttggcgaaagccctcggtgtggcagctttagccctcctccagatcacatgtgtgcaaattatggcttcagaggtggaagataaacagtgacgggggaacaaacagacaacaagaaggtttggaagaaatctggtttgagactctgaaccttagcactaaggagattgagtaaggacctccaaagttccccggactcatgaattctgggcccttggcccattctgtgcacagccaaggacttcagtagaccatctgggcagctttcccatggtgctgctccaaccatcagataaatgaccctcccaagcaccatgtcagtgtcgtacaatctaccaaccaaccagtgctgaagagattttagaaccttgtaacatacaatttttaagagcttatatggcagcttcctttttaccttgttttcctttggggcatgatgttttaacctttgctttagaagcacaagctgtaaatctaaaaggcacttttttttagaggtataaagaaaaactagatgtaataaataagatcatggaaggctttatgtgaaaaaagttgaatgttatagt

SEQ ID NO: 2124 - DNA, 3613 bp, Homo sapiens
gcagagtctgagtcccactccgcaccccaccctctgtctggtacagcttaccaaaccaaagtgcccaaagccgtgacatcccggccggcggctcgcaggcccccgccctccgcacgtcacggccgccgggtgcagtgccccctaggggcccctgggacgaggaggaagcgccaggtccttcccgccgccgccgccgccgccgccgcctgctcccctggcacgcgccccgccgccctcggcagccgcagctccgtgtcccctgagaaccagccgtcccgcgccatgggcacgcgtctgccgctcgtcctgcgccagctccgccgcccgccccagcccccgggccctccgcgccgcctccgtgtgccctgtcgcgctagcagcggcggcggcggaggcggcggcggtggccgggagggcctgcttggacagcggcggccgcaggatggccaggcccggagcagctgcagccccggcggccgaacgcccgcggcgcgggactccatcgtcagagaagtcattcagaattcaaaagaagttctaagtttattgcaagaaaaaaaccctgccttcaagccggttcttgcaattatccaggcaggtgacgacaacttgatgcaggaaatcaaccagaatttggctgaggaggctggtctgaacatcactcacatttgcctccctccagatagcagtgaagccgagattatagatgaaatcttaaagatcaatgaagataccagagtacatggccttgcccttcagatctctgagaacttgtttagcaacaaagtcctcaatgccttgaaaccagaaaaagatgtggatggagtaacagacataaacctggggaagctggtgcgaggggatgcccatgaatgttttgtttcacctgttgccaaagctgtaattgaacttcttgaaaaatcagtaggtgtcaacctagatggaaagaagattttggtagtgggggcccatgggtctttggaagctgctctacaatgcctgttccagagaaaagggtccatgacaatgagcatccagtggaaaacacgccagcttcaaagcaagcttcacgaggctgacattgtggtcctaggctcacctaagccagaagagattccccttacttggatacaaccaggaactactgttctcaactgctcccatgacttcctgtcagggaaggttgggtgtggctctccaagaatacattttggtggactcattgaggaagatgatgtgattctccttgctgcagctctgcgaattcagaacatggtcagtagtggaaggagatggcttcgtgaacagcagcacaggcggtggagacttcactgcttgaaacttcagcctctctcccctgtgccaagtgacattgagatttcaagaggacaaactccaaaagctgtggatgtccttgccaaggagattggattgcttgcagatgaaattgaaatctatggcaaaagcaaagccaaagtacgtttgtccgtgctagaaaggttaaaggatcaagcagatggaaaatacgtcttagttgctgggatcacacccacccctcttggagaagggaagagcacagtcaccatcgggcttgtgcaggctctgaccgcacacctgaatgtcaactcctttgcctgcttgaggcagccttcccaaggaccgacgtttggagtgaaaggaggagccgcgggtggtggatatgcccaggtcatccccatggaggagttcaaccttcacttgactggagacatccacgccatcaccgctgccaataacttgctggctgccgccatcgacacgaggattcttcatgaaaacacgcaaacagataaggctctgtataatcggctggttcctttagtgaatggtgtcagagaattttcagaaattcagcttgctcggctaaaaaaactgggaataaataagactgatccgagcacactgacagaagaggaagtgagtaaatttgcccgtctcgacatcgacccatctaccatcacgtggcagagagtattggatacaaatgaccgatttctacgaaaaataaccatcgggcagggaaacacagagaagggccattaccggcaggcgcagtttgacatcgcagtggccagcgagatcatggcggtgctggccctgacggacagcctcgcagacatgaaggcacggctgggaaggatggtggtggccagtgacaaaagcgggcagcctgtgacagcagatgatttgggggtgacaggtgctttgacagttttgatgaaagatgcaataaaaccaaacctgatgcagaccctggaagggacacctgtgttcgtgcatgcgggcccttttgctaacattgctcacggcaactcttcagtgttggctgataaaattgccctgaaactggttggtgaagaaggatttgtagtgaccgaagctggctttggtgctgacatcggaatggagaaattcttcaacatcaagtgccgagcttccggcttggtgcccaacgtggttgtgttagtggcaacggtgcgagctctgaagatgcatggaggcgggccaagtgtaacggctggtgttcctcttaagaaagaatatacagaggagaacatccagctggtggcagacggctgctgtaacctccagaagcaaattcagatcactcagctctttggggttcccgttgtggtggctctgaatgtcttcaagaccgacacccgcgctgagattgacttggtgtgtgagcttgcaaagcgggctggtgcctttgatgcagtcccctgctatcactggtccgttggtggaaaaggatcggtggacttggctcgggctgtgagagaggctgcgagtaaaagaagccgattccagttcctgtatgatgttcaggttccaattgtggacaagataaggaccattgctcaggctgtctatggagccaaagatattgaactctctcctgaggcacaagccaaaatagatcgttacactcaacagggttttggaaatttgcccatctgcatggcaaagacccacctttctctatctcaccaacctgacaaaaaaggtgtgccaagggacttcatcttacctatcagtgacgtccgggccagcataggcgctgggttcatttaccctttggtcggaacgatgagcaccatgccaggactgcccacccggccctgcttttatgacatagatcttgataccgaaacagaacaagttaaaggcttgttctaagtggacaaggctctcacaggacccgatgcagactcctgaaacagactactctttgcctttttgctgcagttggagaagaaactgaatttgaaaaatgtctgttatgcaatgctggagacatggtgaaataggccaaagatttcttcttcgttcaagatgaattctgttcacagtggagtatggtgttcggcaaaaggacctccaccaagactgaaagaaactaatttatttctgtttctgtggagtttccattatttctactgcttacactttagaatgtttattttatggggactaagggattaggagtgtgaactaaaaggtaacattttccactctcaagttttctactttgtctttgaactgaaaataaacatggatctagaaaacc

SEQ ID NO: 2125 - protein, 218 aa, Homo sapiens
MVSSGRRWLREQQHRRWRLHCLKLQPLSPVPSDIEISRGQTPKAVDVLAKEIGLLADEIEIYGKSKAKVRLSVLERLKDQADGKYVLVAGITPTPLGEGKSTVTIGLVQALTAHLNVNSFACLRQPSQGPTFGVKGGAAGGGYAQVIPMEEFNLHLTGDIHAITAANNLLAAAIDTRILHENTQTDKALYNRLVPLVNGVREFSEIQLARLKIIRNWE

SEQ ID NO: 2126 - DNA, 1599 bp, Homo sapiens
actcttgggaaaactgctgggcaccgtcgtcgcgctgaaggtggttctgtacctgctccgagtgtgcttagcgatggcctggaaatccggcggcgccagccactcggagctaatccacaatctccgcaaaaatggaatcatcaagacagataaagtatttgaagtgatgctggctacagaccgctcccactatgcaaaatgtaacccatacatggattctccacaatcaataggtttccaagcaacaatcagtgctccacacatgcatgcatatgcgctagaacttctatttgatcagttgcatgaaggagctaaagctcttgatgtaggatctggaagtggaatccttactgcatgttttgcacgtatggttggatgtactggaaaagtcataggaattgatcacattaaagagctagtagatgactcagtaaataatgtcaggaaggacgatccaacacttctgtcttcagggagagtacagcttgttgtgggggatggaagaatgggatatgctgaagaagccccttatgatgccattcatgtgggagctgcagcccctgttgtaccccaggcgctaatagatcagttaaagcccggaggaagattgatattgcctgttggtcctgcaggcggaaaccaaatgttggagcagtatgacaagctacaagatggcagcatcaaaatgaagcctctgatgggggtgatatacgtgcctttaacagataaagaaaagcagtggtccaggtggaagtgattttatcttctgctctttcttcttccacacatgcaagggatgaattgtaaaagcaacatcagcttgaccagtataaaattacagtggattgctcatctcagtcctcaaagctttttgaaaaccaacaccatcacagcttgttttggactttgttacactgttattttcagcatgaaaatgtgtgtttttttagggtttctgattcttcaaagaggcacagagccaaattggtagaggaaggatgcaaagtataaatttgtgtaatattactttaacatgcccatattttacttggaaatattaaaagaaagggttctgtaaaatggaaaacttagtttgtgaattgattttgaggagtggtttttcttttcttggacacttaattctgttctgatattaatttatcagattgcttttgtgcattggataacaccaccattcacaagttaagattcttggtatttggatatctgttagatgctactaagaaaatagagatgagctttctttttaaagcttttgatgtggtgtcatagaatagcatgttgtagatacaatcagctgctttgttaccttaaaactaggcatttgtaaatattaaaccttaagatggcaggtgatgtcctgtaaacactcagctgttcagattggacataactgacttagttcttcccttctctctctctcaaaattataggagacttgtagtttagtgtggttttctgtttctaatttgctgctgataatgtatatgaacttaacatgctgtgtaagctgtgtcctagttcttgaacagtttatgcagtgctgctttgccaaataaagttaaaagtaaaagaggc

SEQ ID NO: 2127 - protein, 227 aa, Homo sapiens
MAWKSGGASHSELIHNLRKNGIIKTDKVFEVMLATDRSHYAKCNPYMDSPQSIGFQATISAPHMHAYALELLFDQLHEGAKALDVGSGSGILTACFARMVGCTGKVIGIDHIKELVDDSVNNVRKDDPTLLSSGRVQLVVGDGRMGYAEEAPYDAIHVGAAAPVVPQALIDQLKPGGRLILPVGPAGGNQMLEQYDKLQDGSIKMKPLMGVIYVPLTDKEKQWSRWK

SEQ ID NO: 2128 - DNA, 7396 bp, Homo sapiens
actctggcaagttgcgggcgcgcggggagctgtcgcgggcagcgcgccctcgggaggacgtggccccggcccccgcccgcagtgggcccgaccctcatggccctgagcaaagggctgcggctgctggggcgcctgggggccgagggggactgtagcgtgctgctggaggcgcgcggccgcgacgactgcctgctgttcgaggccggcacggtggccacgctggctccagaagaaaaggaagtcattaaaggacagtatggcaagctcacggacgcgtacggctgcctgggggagctgaggctgaaatctggtggcacgtctctgagcttcctggtgttggtgacaggctgcacatctgtgggcagaattccagatgctgaaatctacaaaatcactgccactgacttttaccctcttcaggaagaggccaaggaggaggaacgcctcatagctttgaagaaaatcctcagctcgggggtgttctatttctcatggccaaacgatgggtctcgctttgacctgactgtccgcacgcagaagcagggggatgacagctctgaatgggggaactccttcttctggaaccagctgttgcacgtgcccttgaggcagcaccaggtgagctgctgtgactggctgctgaagatcatctgcggggtggtcaccatccgcaccgtgtatgcctcccacaagcaggccaaggcctgcctcgtctctcgcgttagctgtgagcgcacaggcactcgcttccacacccgtggcgtgaacgacgacggccatgtgtccaacttcgtggagacagagcagatgatttacatggacgatggagtgtcatcttttgtccagatcagaggctccgttccgctgttctgggaacagccagggcttcaggttggctcccatcatctgagactccacagaggcctggaagccaatgcccctgctttcgacaggcacatggtgcttctgaaggagcagtacgggcagcaggtggtcgtgaaccttctgggaagcagaggcggagaggaggtgctcaacagagccttcaagaagctgctctgggcttcttgccacgcgggcgacacgcctatgatcaattttgacttccatcagtttgccaaaggtgggaagctagagaaattggagaccctcttgaggccacagttaaagctgcactgggaagacttcgatgtgttcacaaagggggagaacgtcagtccacgttttcagaaaggcactttgcggatgaactgtcttgactgcctggaccgaaccaacactgtgcagagcttcatcgcgctcgaggtcctgcatctgcagctcaagaccctggggctgagttcaaaacccatcgttgaccgctttgtggagtccttcaaagccatgtggtctctgaatggccacagcctgagcaaggtgttcacaggcagcagagccctggaagggaaggccaaggtggggaagctgaaggatggagcccggtccatgtctcgaaccatccagtccaacttcttcgacggggtgaagcaggaggccatcaagctgctgctggttggggacgtctacggcgaggaggtggcagacaaagggggcatgctgctggacagcacggcgctcctggtgactcccaggatcctgaaagctatgactgagcgtcagtccgaattcacaaatttcaagcggatccggattgctatggggacctggaacgtgaacggaggaaagcagttccggagcaacgtgctcaggacggcggagctgacagactggctgctcgactcgccccagctctcgggagctaccgactcccaggatgacagcagcccagctgacatatttgctgtggggtttgaagagatggtggaattgagcgcagggaatattgtcaatgccagtactaccaacaagaagatgtggggtgaacagcttcagaaagccatctcacgctctcatagatacattctgttgacttcggcacagctggtgggcgtctgtctttatatctttgtacgtccataccatgtcccgttcatcagggacgtagccatcgacacagtgaagacgggcatggggggcaaggcggggaacaagggcgccgtcggcatccgcttccagttccacagcaccagcttctgcttcatatgtagtcacctgacggccgggcagtcccaggtgaaggagcggaatgaagactacaaggagatcacccagaaactctgcttcccaatggggagaaatgttttttctcatgattatgtattttggtgtggcgatttcaactaccgcattgatcttacttatgaagaagtcttctattttgttaaacgccaagactggaagaaacttctggaatttgatcaactacagctacagaaatcaagtggaaaaatttttaaggactttcacgaaggagccattaactttggacccacctacaagtatgacgttggctcagccgcctacgatacaagcgacaaatgccgcacccccgcctggacagacagggtgctgtggtggaggaagaaacatccctttgataaaacagctggagaactcaaccttctagacagtgatctagatgttgacaccaaagtcagacacacctggtctcctggtgccctgcagtattatggtcgtgcggagctacaagcgtctgatcacagacctgtgctggcgatcgtggaggtggaagttcaggaagtcgatgtgggtgctcgggagagggttttccaggaagtgtcctccttccagggccccctggatgccactgttgtagtaaaccttcaatcaccgaccttagaagagaaaaacgagtttccagaggacctgcgtactgagctcatgcagaccttggggagttatgggacaattgttcttgtcaggatcaaccaagggcagatgctggtaacttttgcagacagtcactcggctctcagtgtcctggacgtggacggtatgaaggtgaaaggcagagcagtgaagattagaccgaagaccaaggactggctgaaaggtttgcgagaggagatcattcggaaacgagacagcatggcccccgtgtctcccactgccaactcctgtttgctggaggaaaactttgacttcacaagtttggactatgagtcagaaggggatattcttgaagacgatgaagactacttggtggatgaattcaatcagcctggagtctcggacagtgaactcgggggagacgacctctctgatgtccccggccccacagcactggctcctcccagcaagtcacctgctctcaccaaaaagaagcagcatccaacgtacaaagatgacgcggacctggtggagctcaagcgggagctggaagccgtcggggagttccgccaccgttctccgagcaggtctctgtcggtccccaaccggcctcggccacctcaacccccgcagagacccccccctccaaccggtttaatggtgaaaaagtcggcttcagatgcgtccatctcctccggcacccatggacagtattcaattttgcagacggcaagacttctaccaggagcacctcagcaacctcccaaggctcggactggaataagtaaaccttataatgtcaagcagatcaaaaccaccaatgcccaggaggcagaagcagcaatccggtgtctcctggaagccagaggaggtgcctccgaagaagccctaagtgccgtggccccaagggaccttgaagcatcctctgaaccagagcccacaccgggggcagccaaaccagagaccccacaggcgcccccactccttccccgtcggcccccacccagagttcctgccatcaagaagccaaccttgagaaggacaggaaagcccctgtcaccggaagaacagtttgagcaacagactgtccattttacaatcgggcccccggagacaagcgttgaggcccctcctgtcgtgacagcccctcgagtccctcctgttcccaaaccaagaacatttcagcctgggaaagctgcagagaggccaagccacaggaagccagcatcagacgaagcccctcctggggcaggagcctctgtgccaccacctctggaggcgccgcctcttgtgcccaaggtacccccgaggaggaagaagtcagcccccgcagccttccacctgcaggtcctgcagagcaacagccagcttctccagggcctcacttacaatagcagtgacagcccctctgggcacccacctgccgcgggcaccgtcttcccacaaggggactttctcagcacttcatctgctacaagccccgacagcgatggcaccaaagcgatgaagccagaggcagccccacttcttggtgattatcaggaccccttctggaaccttcttcaccaccctaaactgttgaataacacttggctttctaagagctcagaccctttggactcaggaaccaggagccccaaaagagatcccatagacccagtgtcagctggcgcttcagctgccaaggcagagctgccaccagatcatgaacacaaaaccttaggtcactgggtgacaatcagtgaccaagaaaagaggacagcactgcaggtgtttgacccactggcaaaaacatgactgagcagctttgaaggctgcagtcctatagaatgcataccttcctccctctagacatccctccaccagaagagacatctatttaaaggcacactggccaaaacgtttgtgcatctgtcactctcgtgtagtttacaaaaatcgtgtctcttattcagtaagatggttactcagccaccaaaatatatttcactcaaggcttgtacatctgaagtttgctcttcaaggaatgggaaccttcctgttaaattcggtgtatggattttaagaaaggaatctagccaatgaggtccaagaagttctcacccattgaatttttaaatggctgttcagttcatgttgtacgtgatggagatttgtcttttgttttatttgcattttacagatttggtataacattttggggagccacctgaaggttgatgtataaagtaaggattagagaaagaggtcgttgtgaccattagtagctgtcctggcccacttaaacaaggttacaaaaaatcagagtcggaagcagccaaataggtcaacctaatgactagactgtacattcccatgagccttcatgtttaagtgtgtacatgtgcgttaaccttgatgatgcgtgaatcccgagggagccggtggcatacaccgttagcttaaccttagcttaaactagctgaaggctcctgtgccatgtcttagacattgcatgccctatcaattactataatcctgagccatggtgtgctactgaaaccaatttttatccaccatctagtccttattaaatgaaacctcacggatcctttgttccgcttatattccatgcataccacataaaagcacacagtgcgaaaactcttgctgatacgcgatattgattctcattgttagaatatggagagtgtttcagcctcgtctgtccggctggagcttcgggatggaaagtgctatgtgtccctgcatataagaatcaccaggccagtgtttctgggtttgcttgtctatatgtttgtctatattttttgcctatacatttttcccacgtttccaacagcacttctcacctattcaataactgaaaaagacattaccatagtgctttacatttttaaagtaatgttacaaggtctggaatccatttggagcagataccgtgttttcgctatttaataagaagttcagtagtgaaatcttactgtaccgcctgttgtatctgggagcctcgtacagaggctcgcacagcagtgatcaagtgtcatcccttacgtgactgggggatgtctgtcctaaaagctgactgctaggatagtaaggatcatcttgcctgggctatgccactgtcttgttaccaattagacatctggaatttcataattagttttcattgtcactgtcaagatatattgcagattacttaaatatggccatcaaaacaaaagttacaacacgtatctcttttcatctgaaaactaatacctggaaaaggataaaaaaaaaaaggaatccgtgacccacagagctagacagataagatgcatagttgaccagtcataaaaggcggtgtttaggtgatcaggatgccgttggtggcatttacgtgctttatatgatttttacctctgtaacaaacacaagaaataaacagaatggtccttaacagagtttgggggagagagcaagatgggttccttggagaagctgatttgccaagatgcacatcgctattaacagccagagtcataaatgaaatgaaattgaagaattcattcaaatgctcttttccctataacctcttttctcaccaaaaaggagataaatttgaaaacagataaatgtaacaaccagtcaaagaagcaggggaaaagtaagctcctccaaagttgcttgcagtgctggaaatagatctcatttttaggttttctcttcgttccagataccaaataaatgggacagagaataaaatttttgttaaaatatgtgctcatctcctaagtagctcttcagagtctgaccgtaagtaaaaacacacagaattgtgttgactgggggaggtgaatcacaaaaaagttacgaggagtttaagagttaaatattatttgatcgtggctgtcaaatttagtgaacaacatagattggatttggagttggtagtaggtatggttctcataccagaattctcttaaaaaaaaaaaaaaggacaattggaattgccttatttatttttaaaatcaatgcttactagttggtaggattcccaggtcagcagcagggttgattaaataatcttgacaatgagcagctgccatcttgggggatttcattctgtggttttttaaatgtttcgtctttgatgctaccatccagggcttcttattgtgaccttgtagcctattttgttcctgctgttctctaacatggtgcagttcacgcagactggtttaggtacttcacaactcaccattgtctctctgaccccaagcctagtcccttttacatcaccatcttctcagacttcttgcctattcttaaaatatgttttggttaatgattgaattaggacatcagcttaagcaattcctgtaacggtttaacgttgttgaagttcaaggcacataataaaattctccctgatgtgtgtgtaagtataaacaaagtaatgtatcaaagcgttcactttataatgaagtcatttcattgggaaggaaagctgcaaagattattgggggactagtgattaataaaatcctgtaatatttttgaagtgaaaatttgtactgaaattgtacatgatacctattaaatgtttttgtcttttttt

SEQ ID NO: 2129 - protein, 1496 aa, Homo sapiens
MALSKGLRLLGRLGAEGDCSVLLEARGRDDCLLFEAGTVATLAPEEKEVIKGQYGKLTDAYGCLGELRLKSGGTSLSFLVLVTGCTSVGRIPDAEIYKITATDFYPLQEEAKEEERLIALKKILSSGVFYFSWPNDGSRFDLTVRTQKQGDDSSEWGNSFFWNQLLHVPLRQHQVSCCDWLLKIICGVVTIRTVYASHKQAKACLVSRVSCERTGTRFHTRGVNDDGHVSNFVETEQMIYMDDGVSSFVQIRGSVPLFWEQPGLQVGSHHLRLHRGLEANAPAFDRHMVLLKEQYGQQVVVNLLGSRGGEEVLNRAFKKLLWASCHAGDTPMINFDFHQFAKGGKLEKLETLLRPQLKLHWEDFDVFTKGENVSPRFQKGTLRMNCLDCLDRTNTVQSFIALEVLHLQLKTLGLSSKPIVDRFVESFKAMWSLNGHSLSKVFTGSRALEGKAKVGKLKDGARSMSRTIQSNFFDGVKQEAIKLLLVGDVYGEEVADKGGMLLDSTALLVTPRILKAMTERQSEFTNFKRIRIAMGTWNVNGGKQFRSNVLRTAELTDWLLDSPQLSGATDSQDDSSPADIFAVGFEEMVELSAGNIVNASTTNKKMWGEQLQKAISRSHRYILLTSAQLVGVCLYIFVRPYHVPFIRDVAIDTVKTGMGGKAGNKGAVGIRFQFHSTSFCFICSHLTAGQSQVKERNEDYKEITQKLCFPMGRNVFSHDYVFWCGDFNYRIDLTYEEVFYFVKRQDWKKLLEFDQLQLQKSSGKIFKDFHEGAINFGPTYKYDVGSAAYDTSDKCRTPAWTDRVLWWRKKHPFDKTAGELNLLDSDLDVDTKVRHTWSPGALQYYGRAELQASDHRPVLAIVEVEVQEVDVGARERVFQEVSSFQGPLDATVVVNLQSPTLEEKNEFPEDLRTELMQTLGSYGTIVLVRINQGQMLVTFADSHSALSVLDVDGMKVKGRAVKIRPKTKDWLKGLREEIIRKRDSMAPVSPTANSCLLEENFDFTSLDYESEGDILEDDEDYLVDEFNQPGVSDSELGGDDLSDVPGPTALAPPSKSPALTKKKQHPTYKDDADLVELKRELEAVGEFRHRSPSRSLSVPNRPRPPQPPQRPPPPTGLMVKKSASDASISSGTHGQYSILQTARLLPGAPQQPPKARTGISKPYNVKQIKTTNAQEAEAAIRCLLEARGGASEEALSAVAPRDLEASSEPEPTPGAAKPETPQAPPLLPRRPPPRVPAIKKPTLRRTGKPLSPEEQFEQQTVHFTIGPPETSVEAPPVVTAPRVPPVPKPRTFQPGKAAERPSHRKPASDEAPPGAGASVPPPLEAPPLVPKVPPRRKKSAPAAFHLQVLQSNSQLLQGLTYNSSDSPSGHPPAAGTVFPQGDFLSTSSATSPDSDGTKAMKPEAAPLLGDYQDPFWNLLHHPKLLNNTWLSKSSDPLDSGTRSPKRDPIDPVSAGASAAKAELPPDHEHKTLGHWVTISDQEKRTALQVFDPLAKT

SEQ ID NO: 2130 - DNA, 3044 bp, Homo sapiens
aggcagggcgggcgggcgctctaagggttctgctctgactccaggttgggacagcgtcttcgctgctgctggatagtcgtgttttcggggatcgaggatactcaccagaaaccgaaaatgccgaaaccaatcaatgtccgagttaccaccatggatgcagagctggagtttgcaatccagccaaatacaactggaaaacagctttttgatcaggtggtaaagactatcggcctccgggaagtgtggtactttggcctccactatgtggataataaaggatttcctacctggctgaagctggataagaaggtgtctgcccaggaggtcaggaaggagaatcccctccagttcaagttccgggccaagttctaccctgaagatgtggctgaggagctcatccaggacatcacccagaaacttttcttcctccaagtgaaggaaggaatccttagcgatgagatctactgcccccctgagactgccgtgctcttggggtcctacgctgtgcaggccaagtttggggactacaacaaagaagtgcacaagtctgggtacctcagctctgagcggctgatccctcaaagagtgatggaccagcacaaacttaccagggaccagtgggaggaccggatccaggtgtggcatgcggaacaccgtgggatgctcaaagataatgctatgttggaatacctgaagattgctcaggacctggaaatgtatggaatcaactatttcgagataaaaaacaagaaaggaacagacctttggcttggagttgatgcccttggactgaatatttatgagaaagatgataagttaaccccaaagattggctttccttggagtgaaatcaggaacatctctttcaatgacaaaaagtttgtcattaaacccatcgacaagaaggcacctgactttgtgttttatgccccacgtctgagaatcaacaagcggatcctgcagctctgcatgggcaaccatgagttgtatatgcgccgcaggaagcctgacaccatcgaggtgcagcagatgaaggcccaggcccgggaggagaagcatcagaagcagctggagcggcaacagctggaaacagagaagaaaaggagagaaaccgtggagagagagaaagagcagatgatgcgcgagaaggaggagttgatgctgcggctgcaggactatgaggagaagacaaagaaggcagagagagagctctcggagcagattcagagggccctgcagctggaggaggagaggaagcgggcacaggaggaggccgagcgcctagaggctgaccgtatggctgcactgcgggctaaggaggagctggagagacaggcggtggatcagataaagagccaggagcagctggctgcggagcttgcagaatacactgccaagattgccctcctggaagaggcgcggaggcgcaaggaggatgaagttgaagagtggcagcacagggccaaagaagcccaggatgacctggtgaagaccaaggaggagctgcacctggtgatgacagcacccccgcccccaccaccccccgtgtacgagccggtgagctaccatgtccaggagagcttgcaggatgagggcgcagagcccacgggctacagcgcggagctgtctagtgagggcatccgggatgaccgcaatgaggagaagcgcatcactgaggcagagaagaacgagcgtgtgcagcggcagctgctgacgctgagcagcgagctgtcccaggcccgagatgagaataagaggacccacaatgacatcatccacaacgagaacatgaggcaaggccgggacaagtacaagacgctgcggcagatccggcagggcaacaccaagcagcgcatcgacgagttcgaggccctgtaacagccaggccaggaccaagggcagaggggtgctcatagcgggcgctgccagccccgccacgcttgtgtctttagtgctccaagtctaggaactccctcagatcccagttcctttagaaagcagttacccaacagaaacattctgggctgggaaccagggaggcgccctggtttgttttccccagttgtaatagtgccaagcaggcctgattctcgcgattattctcgaatcacctcctgtgttgtgctgggagcaggactgattgaattacggaaaatgcctgtaaagtctgagtaagaaacttcatgctggcctgtgtgatacaagagtcagcatcattaaaggaaacgtggcaggacttccatctgtgccatacttgttctgtattcgaaatgagctcaaattgattttttaatttctatgaaggatccatctttgtatatttacatgcttagaggggtgaaaattattttggaaattgagtctgaagcactctcgcacacacagtgattccctcctcccgtcactccacgcagctggcagagagcacagtgatcaccagcgtgagtggtggaggaggacacttggatttttttttttgttttttttttttttgcttaacagttttagaatacattgtacttatacaccttattaatgatcagctatatactatttatatacaagtgataatacagatttgtaacattagttttaaaaagggaaagttttgttctgtatattttgttaccttttacagaataaaagaattacatatgaaaaaccctctaaaccatggcacttgatgtgatgtggcaggagggcagtggtggagctggacctgcctgctgcagtcacgtgtaaacaggattattattagtgttttatgcatgtaatggactatgcacacttttaattttgtcagattcacacatgccactatgagctttcagactccagctgtgaagagactctgtttgcttgtgtttgtttgtttgcagtctctctctgccatggccttggcaggctgctggaaggcagcttgtggaggccgttggttccgcccactcattccttctcgtgcactgctttctccttcacagctaagatgccatgtgcaggtggattccatgccgcagacatgaaataaaagctttgcaaaggca

SEQ ID NO: 2131 - DNA, 462 bp, Homo sapiens
atcttccggtaattcgccaaaatgacgaacacaaagggaaagaggagaggcacctgacatatgttctctaggccttttagaaaacatggaatgggtactgttcaaaaaggaatgccccacaagtgtcaccatggcaaaactgggagtctacgatgttccccagcatgctgttggcattgttgtaaacaaacaagttaagggcaagattcttgccaagagaattaatgtgcgtattgagcacattacgcactctaagagccgagatagcttcctgaaacgcgtgaaggaaaatgatcagaaaaagaaagaagccaaagagaaaggtacctgggttcagctaaagcgccagcctgctccacccagagaaacacactttgtgagaaccaatgggaaggagcctgagctgctggaacctattccctattaattcatggcataataggtgttaaaaagaaaaataaa

SEQ ID NO: 2132 - DNA, 1453 bp, Homo sapiens
ggcagcgcagggcagacggcggcaggagaagcaagatgaatgcaggctcagatcctgtggtcatcgtctcggcggcgcggaccatcataggttccttcaatggtgccttagctgctgttcctgtccaggacctgggctccactgtcatcaaagaagtcttgaagagggccactgtggctccggaagatgtgtctgaggtcatctttggacatgtcttggcagcaggctgtgggcagaatcctgttagacaagccagtgtgggtgcaggaattccctactctgttccagcatggagctgccagatgatctgtgggtcaggcctaaaagctgtgtgccttgcagtccagtcaatagggataggagactccagcattgtggttgcaggaggcatggaaaatatgagcaaggctcctcacttggcttacttgagaacaggagtaaagataggtgagatgccactgactgacagtatactctgtgatggtcttacagatgcatttcacaactgtcatatgggtattacagctgaaaatgtagccaaaaaatggcaagtgagtagagaagatcaggacaaggttgcagttctgtcccagaacaggacagagaatgcacagaaagctggccattttgacaaagagattgtaccagttttggtgtcaactagaaaaggtcttattgaagttaaaacagatgagtttcctcgccatgggagcaacatagaagccatgtccaagctaaagccttactttcttactgatggaacgggaacagtcaccccagccaatgcttcaggaataaatgatggtgctgcagctgtcgttcttatgaagaagtcagaagctgataaacgtgggcttacacctttagcacggatagtttcctggtcccaagtgggtgtggagccttccattatgggaataggaccaattccagccataaagcaagctgttacaaaagcaggttggtcactggaagatgttgacatatttgaaatcaatgaagcctttgcagctgtctctgctgcaatagttaaagaacttggattaaacccagagaaggtcaatattgaaggaggggctatagccttgggccaccctcttggagcatctggctgtcgaattcttgtgaccctgttacacacactggagagaatgggcagaagtcgtggtgttgcagccctgtgcattgggggtgggatgggaatagcaatgtgtgttcagagagaatgaattgcttaaactttgaacaacctcaatttctttttaaactaataaagtactaggttgcaatatgtgaaatcagaggaccaaagtacagatggaaaccatttcctacatcacaaaaacccaagtttacagcttgtactttactttaatgtgtaatactcaactcaaggtacaagacaattgcatttaacattgttataaataaaaggaacatcagatcaatcatt

SEQ ID NO: 2133 - protein, 397 aa, Homo sapiens
MNAGSDPVVIVSAARTIIGSFNGALAAVPVQDLGSTVIKEVLKRATVAPEDVSEVIFGHVLAAGCGQNPVRQASVGAGIPYSVPAWSCQMICGSGLKAVCLAVQSIGIGDSSIVVAGGMENMSKAPHLAYLRTGVKIGEMPLTDSILCDGLTDAFHNCHMGITAENVAKKWQVSREDQDKVAVLSQNRTENAQKAGHFDKEIVPVLVSTRKGLIEVKTDEFPRHGSNIEAMSKLKPYFLTDGTGTVTPANASGINDGAAAVVLMKKSEADKRGLTPLARIVSWSQVGVEPSIMGIGPIPAIKQAVTKAGWSLEDVDIFEINEAFAAVSAAIVKELGLNPEKVNIEGGAIALGHPLGASGCRILVTLLHTLERMGRSRGVAALCIGGGMGIAMCVQRE

SEQ ID NO: 2134 - DNA, 2020 bp, Homo sapiens
acgtgtatcgctgccgtcaagatggaggggcctttgtccgtgttcggtgaccgcagcactggggaaacgatccgctcccaaaacgttatggctgcagcttcgattgccaatattgtaaaaagttctcttggtccagttggcttggataaaatgttggtggatgatattggtgatgtaaccattactaacgatggtgcaaccatcctgaagttactggaggtagaacatcctgcagctaaagttctttgtgagctggctgatctgcaagacaaagaagttggagatggaactacttcagtggttattattgcagcagaactcctaaaaaatgcagatgaattagtcaaacagaaaattcatcccacatcagttattagtggctatcgacttgcttgcaaggaagcagtgcgttatatcaatgaaaacctaattgttaacacagatgaactgggaagagattgcctgattaatgctgctaagacatccatgtcttccaaaatcattggaataaatggtgatttctttgctaacatggtagtagatgctgtacttgctattaaatacacagacataagaggccagccacgctatccagtcaactctgttaatattttgaaagcccatgggagaagtcaaatggagagtatgctcatcagtggctatgcactcaactgtgtggtgggatcccagggcatgcccaagagaatcgtaaatgcaaaaattgcttgccttgacttcagcctgcaaaaaacaaaaatgaagcttggtgtacaggtggtcattacagaccctgaaaaactggaccaaattagacagagagaatcagatatcaccaaggagagaattcagaagatcctggcaactggtgccaatgttattctaaccactggtggaattgatgatatgtgtctgaagtattttgtggaggctggtgctatggcagttagaagagttttaaaaagggaccttaaacgcattgccaaagcttctggagcaactattctgtcaaccctggccaatttggaaggtgaagaaacttttgaagctgcaatgttgggacaggcagaagaagtggtacaggagagaatttgtgatgatgagctgatcttaatcaaaaatactaaggctcgtacgtctgcatcgattatcttacgtggggcaaatgatttcatgtgtgatgagatggagcgctctttacatgatgcactttgtgtagtgaagagagttttggagtcaaaatctgtggttcccggtgggggtgctgtagaagcagccctttccatataccttgaaaactatgcaaccagcatggggtctcgggaacagcttgcgattgcagagtttgcaagatcacttcttgttattcccaatacactagcagttaatgctgcccaggactccacagatctggttgcaaaattaagagcttttcataatgaggcccaggttaacccagaacgtaaaaatctaaaatggattggtcttgatttgagcaatggtaaacctcgagacaacaaacaagcaggggtgtttgaaccaaccatagttaaagttaagagtttgaaatttgcaacagaagctgcaatcaccattcttcgaattgatgatcttattaaattacatccagaaagtaaagatgataaacatggaagttatgaagatgctgttcactctggagcccttaatgattgatctgatgttccttttatttataacaatgttaaatgcaattgtcttgtaccttgagttgagtattacacattaaagtaaagtacaagctgtaaacttgggtttttgtgatgtaggaaatggtttccatctgtactttggtcctctgatttcacatattgcaacctagtactttattagtttaaaaagaaattgaggttgttcaaagtttaagcaattcattctctctgaacacacattgctattcccatcccacccccaatgcacagggctgcaacaccacgacttctgcccattctctccagtgtgtgtaacagggtcacaagaattc

SEQ ID NO: 2135 - DNA, 2518 bp, Homo sapiens
tttgcttttgcttatttccgtccatttccctctctgcgcgcggaccttccttttccagatggtgagagccgcggggacacccgacgccggggcaggctgatccacgatcctgggtgtgcgtaacgccgcctggggctccgtgggcgagggacgtgtggggacaggtgcaccggaaactgccagactggagagttgaggcatcggaggcgcgagaacagcactactactgcggcgagacgagcgcggcgcatcccaaagcccggccaaatgcgctcgtccctgggaggggagggaggcgcgcctggagcggggacagtcttggtccgcgccctcctcccgggtctgtgccgggacccgggacccgggagccgtcgcaggtctcggtccaaggggccccttttctcggaagggcggcggccaagagcagggaaggtggatctcaggtagcgagtctgggcttcggggacggcggggaggggagccggacgggaggatgagctcccctggcaccgagagcgcgggaaagagcctgcagtaccgagtggaccacctgctgagcgccgtggagaatgagctgcaggcgggcagcgagaagggcgaccccacagagcgcgaactgcgcgtgggcctggaggagagcgagctgtggctgcgcttcaaggagctcaccaatgagatgatcgtgaccaagaacggcaggaggatgtttccggtgctgaaggtgaacgtgtctggcctggaccccaacgccatgtactccttcctgctggacttcgtggcggcggacaaccaccgctggaagtacgtgaacggggaatgggtgccggggggcaagccggagccgcaggcgcccagctgcgtctacatccaccccgactcgcccaacttcggggcccactggatgaaggctcccgtctccttcagcaaagtcaagctcaccaacaagctcaacggagggggccagatcatgctgaactccttgcataagtatgagcctcgaatccacatagtgagagttgggggtccacagcgcatgatcaccagccactgcttccctgagacccagttcatagcggtgactgcttatcagaacgaggagatcacagctcttaaaattaagtacaatccatttgcaaaagctttccttgatgcaaaggaaagaagtgatcacaaagagatgatggaggaacccggagacagccagcaacctgggtactcccaatgggggtggcttcttcctggaaccagcaccctgtgtccacctgcaaatcctcatcctcagtttggaggtgccctctccctcccctccacgcacagctgtgacaggtacccaaccctgaggagccaccggtcctcaccctaccccagcccctatgctcatcggaacaattctccaacctattctgacaactcacctgcatgtttatccatgctgcaatcccatgacaattggtccagccttggaatgcctgcccatcccagcatgctccccgtgagccacaatgccagcccacctaccagctccagtcagtaccccagcctgtggtctgtgagcaacggcgccgtcaccccgggctcccaggcagcagccgtgtccaacgggctgggggcccagttcttccggggctcccccgcgcactacacacccctcacccatccggtctcggcgccctcttcctcgggatccccactgtacgaaggggcggccgcggccacagacatcgtggacagccagtacgacgccgcagcccaaggccgcctcatagcctcatggacacctgtgtcgccaccttccatgtgaagcagcaaggcccaggtcccgaaagatgcagtgactttttgtcgtggcagccagtggtgactggattgacctactaggtacccagtggcagtctcaggttaagaaggaaatgcagcctcagtaacttccttttcaaagcagtggaggagcacacggcacctttccccagagccccagcatcccttgctcacacctgcagtagcggtgctgtcccaggtggcttacagatgaacccaactgtggagatgatgcagttggcccaacctcactgacggtgaaaaaatgtttgccagggtccagaaactttttttggtttatttctcatacagtgtattggcaactttggcacaccagaatttgtaaactccaccagtcctactttagtgagataaaaagcacactcttaatcttcttccttgttgctttcaagtagttagagttgagctgttaaggacagaataaaatcatagttgaggacagcaggttttagttgaattgaaaatttgactgctctgccccctagaatgtgtgtattttaagcatatgtagctaatctcttgtgttgttaaactataactgtttcatatttttcttttgacaaagtagccaaagacaatcagcagaaagcattttctgcaaaataaacgcaatatgcaaaatgtgattcgtccagttattagtgaagcccctccttttgtgagtatttactgtttattg

SEQ ID NO: 2136 - protein, 435 aa, Homo sapiens
MSSPGTESAGKSLQYRVDHLLSAVENELQAGSEKGDPTERELRVGLEESELWLRFKELTNEMIVTKNGRRMFPVLKVNVSGLDPNAMYSFLLDFVAADNHRWKYVNGEWVPGGKPEPQAPSCVYIHPDSPNFGAHWMKAPVSFSKVKLTNKLNGGGQIMLNSLHKYEPRIHIVRVGGPQRMITSHCFPETQFIAVTAYQNEEITALKIKYNPFAKAFLDAKERSDHKEMMEEPGDSQQPGYSQWGWLLPGTSTLCPPANPHPQFGGALSLPSTHSCDRYPTLRSHRSSPYPSPYAHRNNSPTYSDNSPACLSMLQSHDNWSSLGMPAHPSMLPVSHNASPPTSSSQYPSLWSVSNGAVTPGSQAAAVSNGLGAQFFRGSPAHYTPLTHPVSAPSSSGSPLYEGAAAATDIVDSQYDAAAQGRLIASWTPVSPPSM

SEQ ID NO: 2137 - DNA, 823 bp, Homo sapiens
cgcagccgtgcgatgttgtcctctacagccatgtattcggctcctggcagagacttggggatggaaccgcacagagccgcgggccctttgcagctgcgattttcgccctacgttttcaacggaggtactatactggcaattgctggagaagattttgcaattgttgcttctgatactcgattgagtgaagggttttcaattcatacgcgggatagccccaaatgttacaaattaacagacaaaacagtcattggatgcagcggttttcatggagactgtcttacgctgacaaagattattgaagcaagactaaagatgtataagcattccaataataaggccatgactacgggggcaattgctgcaatgctgtctacaatcctgtattcaaggcgcttctttccatactatgtttacaacatcatcggtggacttgatgaagaaggaaagggggctgtatacagctttgatccagtagggtcttaccagagagactccttcaaggctggaggctcagcaagtgccatgctacagcccctgcttgacaaccaggttggttttaagaacatgcagaatgtggagcatgttccgctgtccttggacagagccatgcggctggtgaaagatgtcttcatttctgcggctgagagagatgtgtacactggggacgcactccggatctgcatagtgaccaaagagggcatcagggaggaaactgtttccttaaggaaggactgatctgtgtgctcttatcaccaatcagttcagacctggttgattttgtactttggaactgtaccttggatggttttgtttattaaaa

SEQ ID NO: 2138 - protein, 241 aa, Homo sapiens
MLSSTAMYSAPGRDLGMEPHRAAGPLQLRFSPYVFNGGTILAIAGEDFAIVASDTRLSEGFSIHTRDSPKCYKLTDKTVIGCSGFHGDCLTLTKIIEARLKMYKHSNNKAMTTGAIAAMLSTILYSRRFFPYYVYNIIGGLDEEGKGAVYSFDPVGSYQRDSFKAGGSASAMLQPLLDNQVGFKNMQNVEHVPLSLDRAMRLVKDVFISAAERDVYTGDALRICIVTKEGIREETVSLRKD

SEQ ID NO: 2139 - DNA, 2899 bp, Homo sapiens
gctcccagccgggcccctcagcggtcggcgggacggctcccggctgcagtctgcccgcccgccccgcgcgggggccgagtcgcgaagcgcgcctgcgacccggcgtccgggcgcgctggagaggacgcgaggagccatgaggcgccagcctgcgaaggtggcggcgctgctgctcgggctgctcttggagtgcacagaagccaaaaagcattgctggtatttcgaaggactctatccaacctattatatatgccgctcctacgaggactgctgtggctccaggtgctgtgtgcgggccctctccatacagtggctgtggtacttctggttccttctgatgatgggcgtgcttttctgctgcggagccggcttcttcatccggaggcgcatgtaccccccgccgctgatcgaggagccagccttcaatgtgtcctacaccaggcagcccccaaatcccggcccaggagcccagcagccggggccaccctattacaccgacccaggaggaccggggatgaaccctgtcgggaattccatggcaatggctttccaggtcccacccaactcaccccaggggagtgtggcctgcccgccccctccagcctactgcaacacgcctccgcccccgtacgaacaggtagtgaaggccaagtagtggggtgcccacgtgcaagaggagagacaggagagggcctttccctggcctttctgtcttcgttgatgttcacttccaggaacggtctcgtgggctgctaagggcagttcctctgatatcctcacagcaagcacagctctctttcaggctttccatggagtacaatatatgaactcacactttgtctcctctgttgcttctgtttctgacgcagtctgtgctctcacatggtagtgtggtgacagtccccgagggctgacgtccttacggtggcgtgaccagatctacaggagagagactgagaggaagaaggcagtgctggaggtgcaggtggcatgtagaggggccaggccgagcatcccaggcaagcatccttctgcccgggtattaataggaagccccacgccgggcggctcagccgatgaagcagcagccgactgagctgagcccagcaggtcatctgctccagcctgtcctctcgtcagccttcctcttccagaagctgttggagagacattcaggagagagcaagccccttgtcatgtttctgtctctgttcatatcctaaagatagacttctcctgcaccgccagggaagggtagcacgtgcagctctcaccgcaggatggggcctagaatcaggcttgccttggaggcctgacagtgatctgacatccactaagcaaatttatttaaattcatgggaaatcacttcctgccccaaactgagacattgcattttgtgagctcttggtctgatttggagaaaggactgttacccattttttggtgtgtttatggaagtgcatgtagagcatcctgccctttgaaatcagactgggtgtgtgtcttccctggacatcactgcctctccaggtcattctcaggcccgggggtctccttccctcaggcagctccagtggtgggttctgaagggtgctttcaaaacagggggcacatctggctgggaagtcacatggactcttccagggagagagaccagctgaggcgtctctctctgaggttgtgttgggtctaagcgggtgtgtgctgggctccaaggaggaggagcttgctgggaaaagacaggagaagtactgactcaactgcactgaccatgttgtcataattagaataaagaagaagtggttggaaatgcacattcctggataggaatcacagctcaccccaggatctcacaggtagtctcctgagtagttgacggctagcggggagctagttccgccgcatagttatagtgttgatgtgtgaacgctgacctgtcctgtgtgctaagagctatgcagcttagctgaggcgcctagattactagatgtgctgtatcacggggaatgaggtgggggtgcttattttttaatgaactaatcagagactcttgagaaattgttactcattgaactggagcatcaagacatctcatggaaatggatacggagtgatttggtgtccatgcttttcactctgaggacatttaatcggagaacctcctggggaattttgtgggagacacttgggaacaaaacagacaccctgggaatgcagttgcaagcacagatgctgccaccagtgtctctgaccaccctggtgtgactgctgactgccagcgtggtacctcccatgctgcaggcctccatctaaatgagacaacaaagcacaatgttcactgtttacaaccaagacaactgcgtgggtccaaacactcctcttcctccaggtcatttgttttgcatttttaatgtctttattttttgtaatgaaaaagcacactaagctgcccctggaatcgggtgcagctgaataggcacccaaaagtccgtgactaaatttcgtttgtctttttgatagcaaataatgttaagagacagtgatggctagggctcaacaattttgtattcccatgtttgtgtgagacagagtttgttttcccttgaacttggttagaattgtgctactgtgaacgctgatcctgcatatggaagtcccacttcggtgacatttcctggccattcttgtttccattgtgtggatggtgggttgtgcccacttcctggagtgagacagctcctggtgtgtagaattcccggagcgtctgtggttcagagtaaacttgaagcagatctctgcatgcttttcctctgcaacaattggctcatttctcttttttgttctcttttgataggatcctgtttcctatgtgtgcaaaataaaaataaatttgggcaa

SEQ ID NO: 2140 - DNA, 429 bp, Homo sapiens
atggcaggggagtcacaaaggagaagcactcagcctgccgagaggtcccaggactttcctggaggatcagtccccaaactgactgtgacagggagctatacccagataacagcagaggcccagaataagaaagagtctgtagatggcaagtcaatgggaaatcattccaggaaggtagggaaagatggaattctggagagcattggacctcagattgggagtctgaacgtctttccatatgcatcaggaagccatggaaaattcacagactggagtgactttggcaaaggaacaacatataacgcactctcccctgaactctacacaacatattttgtcaccaagaccctacttctgacctccctgttcttatgcattcgaacagcatacccccgattccgctacgaccaactcatacacctcctatga

SEQ ID NO: 2141 - DNA, 1327 bp, Homo sapiens
ctaaatactaccgtatgacccaccataattacccccatactccttacactattcctcatcacccaactaaaaatattaaatacaaattaccacctacctccctcaccaaagcccataaaaataaaaaactataacaaaccctgagaaccaaaatgaacgaaaatctgttcacttcattcattgcccccacaatcctaggcctacccgccgcagtactgatcattctatttccccctctattgatccccacctccaaatatctcatcaacaaccgactaattaccacccaacaatgactaatccaactaacctcaaaacaaatgatagccatacacaacactaagggacgaacctgatctcttatactagtatccttaatcatttttattgccacaactaacctcctcggactcctgcctcactcatttacaccaaccacccaactatctataaacctagccatggccatccccttatgagcgggcgcagtgattataggctttcgctctaagattaaaaatgccctagcccacttcttaccacaaggcacacctacaccccttatccctatactagttattatcgaaaccatcagcctactcattcaaccaatagccctggccgtacgcctaaccgctaacattactgcaggccacctactcatgcacctaattggaagcgccacactagcaatatcaactattaaccttccctctacacttatcatcttcacaattctaattctactgactatcctagaaatcgctgtcgccttaatccaagcctacgtttttacacttctagtaagcctctacctgcacgacaacacataatgacccaccaatcacatgcctatcatatagtaaaacccagcccatggcccctaacaggggccctctcagccctcctaatgacctccggcctagccatgtgatttcacttccactccacaaccctcctcatactaggcctactaaccaacacactaaccatataccaatgatggcgcgatgtaacacgagaaagcacataccaaggccaccacacaccacctgtccagaaaggccttcgatacgggataatcctatttattacctcagaagtttttttcttcgcaggatttttctgagccttttaccactccagcctagctcccaccccccaactagggggacactggcccccaacaggcatcaccccgctaaatcccctagaagtcccactcctaaacacatccgtattactcgcatcaggggtatcaatcacctgagctcaccatagtctaatagtctattttaccctcctacaagcctcagagtacttcgag

SEQ ID NO: 2142 - DNA, 706 bp, Homo sapiens
gtgggaacatccagttgcgggaaaacaagcttaacacgcccactgattctacattatgctcctacctcccggcagcctctccaggcccagaactttctccagtcagcctctacagaccaagctcatgactcacaatggcctatttaggcccataccctacgtcacggcagcctccgcagatgagcctactgcctcacaacagcctccacaggcacagctccatcgttacaatggcctctttagacccagctcctgcctcccagccttctctccaggccctgaactttctcaagtcgacctcaccaggcccagctcatgcttctttgcagcctctccaggcccagctcctgcatcttggtggcccctccaggcccagcctctgcctcccgtcagcctctacagtcccaacgtctgcctcacagcagattcttcaggcccagcatctgcctcacttggaccctccagacccagatggtgtctcactgtggcatcctcaggcgaagctcctgcctttcggcagcctctccaggcccagctcctcctgcctcccagtggcctctttcggcccagcccagctcatgcctcccggcggccttcccaagccccgcttttgactttcggtggcctctgcaggcctcgacaaggcccagcctcctgcctcccgaaggcctgcacaggcccagcctctgcctcacagcggactctc

SEQ ID NO: 2143 - protein, 251 aa, Homo sapiens
MLLPPGSLSRPRTFSSQPLQTKLMTHNGLFRPIPYLTAVSADEPTASQQPPQAQLHRYNGLFRPSSCLPAFSPGPELSQVDLTRPSSCFFAASPGPTPASWWPLQAQPVPPVGLYNPNICLTADSSRPASASQWTLQTQMVSHCGILRRSSCLSAASPGPAPPASQWPLSAQPSSCLPAAFPSPAFDFWWPLQASTRPSLLPPEGLHRPSLCLTADSPRPASSRLTAASPVQSSCLSATSAGPATACQWPL

SEQ ID NO: 2144 - DNA, 1562 bp, Homo sapiens
ctctctcacacacacccccgcttgggcctcctctctctctccggctccattttctccgccgccgggggccggggtctcctgtggggggcccagccggtatcccaggtctcccttcagtgccggggtgaacccccgggggagccgggagccgggggcagacgggcgggggttggggcggagggagcagcggccccagcgagtttggggggagaagtaaccaggcggggggaggggcggagcagggagggggcctcagggcccccccccagctatggacgaacggctactggggccgccccctccaggcgggggccgggggggcctgggattggtgagtggggagcctgggggccctggcgagcctcccggtggcggagaccccggtgggggtagcgggggggtcccgggaggccgagggaagcaagacatcggggacattctgcagcagataatgaccatcaccgaccagagcctggacgaggcccaggccaagaaacacgccctaaactgccaccgaatgaagcctgctctctttagcgtcctgtgtgaaatcaaggagaaaactggcctcagcattcggagctcccaggaggaggagccggtggacccacagctgatgcgcttggacaacatgcttctggcagagggtgtggctgggcccgagaaagggggcggctcagcagcagcagctgcagccgctgcagcctctggtggtggtgtgtcccctgacaactccatcgaacactcggactatcgcagcaaacttgcccagatccgtcacatataccactcggagctggagaagtatgagcaggcatgtaatgagttcacgacccatgtcatgaacctgctgagggagcagagccgcaccaggcccgtggcccccaaagagatggaacgcatggtgagcatcatccatcgaaagttcagcgccatccagatgcagctgaagcagagcacctgcgaggctgtgatgatcctgcgctcccgtttcctggatgccagacgaaagcgccgtaacttcagcaaacaggccactgaggtcctaaatgagtatttctactcccacctgagtaacccatatcctagtgaggaggccaaggaggagcttgccaagaagtgtggcatcaccgtgtctcaggtctccaactggtttggcaacaagaggattcgctataagaaaaacatcggaaagttccaagaggaggcaaacatctatgctgtcaagaccgccgtgtcagtcacccaggggggccacagccgcaccagctccccgacacccccttcctctgcaggtggatcccactgtcaccccagctgactgttttgcacacttcctgcttttgttcccacttcctatctaggcaggatcatagcagagagggggccttttggggtgagagggaccgagctgagataggctggagatgtcaggggacagaggccattccagtgatcttagttctgcctttcttcccacgggtggccaaggaacagcctgctctttctgtgtgttggaatgttattttgtggataattggagtatagtagcatgtccccac

SEQ ID NO: 2145 - DNA, 1754 bp, Homo sapiens
gagtagagtagggcaggagaaactgggccaggctgcacttagctcaaggggcctcgaggactctctgcgtctctggagacaagggcactacacgcacttcagaatgaagagttgcgggagcatgctggggctctgggggcagcggctccccgcggcgtgggtcctgcttctgttgcctttcctgccgctgctgctgcttgcagcccccgcgccccaccgcgagtcctacaagccggtcatcgtggtgcatgggctcttcgacagctcgtacagcttccgccacctgctggaatacatcaatgagacacaccccgggactgtggtgacagtgctcgatctcttcgatgggagagagagcttgcgacccctgtgggaacaggtgcaagggttccgagaggctgtggtccccatcatggcaaaggcccctcaaggggtgcatctcatctgctactcgcaggggggccttgtgtgccgggctctgctttctgtcatggatgatcacaacgtggattctttcatctccctctcctctccacagatgggacagtatggagacacggactacttgaagtggctgttccccacctccatgcggtctaacctctatcggatctgctatagcccctggggccaggaattctccatctgcaactactggcatgatccccaccacgatgacttgtacctcaatgccagcagcttcctggccctgatcaatggggaaagagaccatcccaatgccacagtatggcggaagaactttctgcgtgtgggccacctggtgctgattgggggccctgatgatggtgttattactccctggcagtccagcttctttggtttctatgatgcaaatgagaccgtcctggagatggaggagcaactggtttatctgcgggattcttttgggttgaagactctattggcccggggggccatagtgaggtgtccaatggccggtatctcccacacagcctggcactccaaccgtaccctttatgagacctgcattgaaccttggctctcctgaggatatattcaggggtccccaggaactcctcggtccagagaccaagtggtggccttggaaagcagatgtcaggctttggtgtgcctgtgaccacctcattgctcccatattatcccccatttttagtagagacggggttttagtagagacttggcctcccagaacccccttcctctgctcctccatgaatgacaattccaggcctcccctacctcatgtcctctcatttgggggattgctccgtgctgtccctttctctcaaggccgaagttgggaagtgagaaaccatgtttttaacttgtggctgcttttgctgctgctgctcctccgtatctggctgtatgggtggagaacccaccccctgcccaccacaggggtctccttccaggccactcaggacatttttagcttctctcctccccatgttcccttttttctctaaagtcccctgacatcagccctcccaactcctaagagggactacccatgagagtggggttctgaggctcccctatggggacagttccgttcttgaagtgtcagtgttggggaatatctgtggcctatgaggcccatctcaggtttggggatcccccagtccctatgatcagtgttggagtacccccctgggagagcctagtttctttgaggccccaggccctcttttaactacctttgaataggtgttatccctgtatttatggaaataaagttccatttcctc

SEQ ID NO: 2146 - DNA, 5426 bp, Homo sapiens
agaaggtagcagacagacagacggatctaacctctcttggatcctccagccatgaggctgctctgggggctgatctgggcatccagcttcttcaccttatctctgcagaagcccaggttgctcttgttctctccttctgtggttcatctgggggtccccctatcggtgggggtgcagctccaggatgtgccccgaggacaggtagtgaaaggatcagtgttcctgagaaacccatctcgtaataatgtcccctgctccccaaaggtggacttcacccttagctcagaaagagacttcgcactcctcagtctccaggtgcccttgaaagatgcgaagagctgtggcctccatcaactcctcagaggccctgaggtccagctggtggcccattcgccatggctaaaggactctctgtccagaacgacaaacatccagggtatcaacctgctcttctcctctcgccgggggcacctctttttgcagacggaccagcccatttacaaccctggccagcgggttcggtaccgggtctttgctctggatcagaagatgcgcccgagcactgacaccatcacagtcatggtggagaactctcacggcctccgcgtgcggaagaaggaggtgtacatgccctcgtccatcttccaggatgactttgtgatcccagacatctcagagccagggacctggaagatctcagcccgattctcagatggcctggaatccaacagcagcacccagtttgaggtgaagaaatatgtccttcccaactttgaggtgaagatcacccctggaaagccctacatcctgacggtgccaggccatcttgatgaaatgcagttagacatccaggccaggtacatctatgggaagccagtgcagggggtggcatatgtgcgctttgggctcctagatgaggatggtaagaagactttctttcgggggctggagagtcagaccaagctggtgaatggacagagccacatttccctctcaaaggcagagttccaggacgccctggagaagctgaatatgggcattactgacctccaggggctgcgcctctacgttgctgcagccatcattgagtctccaggtggggagatggaggaggcagagctcacatcctggtattttgtgtcatctcccttctccttggatcttagcaagaccaagcgacaccttgtgcctggggcccccttcctgctgcaggccttggtccgtgagatgtcaggctccccagcttctggcattcctgtcaaagtttctgccacggtgtcttctcctgggtctgttcctgaagtccaggacattcagcaaaacacagacgggagcggccaagtcagcattccaataattatccctcagaccatctcagagctgcagctctcagtatctgcaggctccccacatccagcgatagccaggctcactgtggcagccccaccttcaggaggccccgggtttctgtctattgagcggccggattctcgacctcctcgtgttggggacactctgaacctgaacttgcgagccgtgggcagtggggccaccttttctcattactactacatgatcctatcccgagggcagatcgtgttcatgaatcgagagcccaagaggaccctgacctcggtctcggtgtttgtggaccatcacctggcaccctccttctactttgtggccttctactaccatggagaccacccagtggccaactccctgcgagtggatgtccaggctggggcctgcgagggcaagctggagctcagcgtggacggtgccaagcagtaccggaacggggagtccgtgaagctccacttagaaaccgactccctagccctggtggcgctgggagccttggacacagctctgtatgctgcaggcagcaagtcccacaagcccctcaacatgggcaaggtctttgaagctatgaacagctatgacctcggctgtggtcctgggggtggggacagtgcccttcaggtgttccaggcagcgggcctggccttttctgatggagaccagtggaccttatccagaaagagactaagctgtcccaaggagaagacaacccggaaaaagagaaacgtgaacttccaaaaggcgattaatgagaaattgggtcagtatgcttccccgacagccaagcgctgctgccaggatggggtgacacgtctgcccatgatgcgttcctgcgagcagcgggcagcccgcgtgcagcagccggactgccgggagcccttcctgtcctgctgccaatttgctgagagtctgcgcaagaagagcagggacaagggccaggcgggcctccaacgagccctggagatcctgcaggaggaggacctgattgatgaggatgacattcccgtgcgcagcttcttcccagagaactggctctggagagtggaaacagtggaccgctttcaaatattgacactgtggctccccgactctctgaccacgtgggagatccatggcctgagcctgtccaaaaccaaaggcctatgtgtggccaccccagtccagctccgggtgttccgcgagttccacctgcacctccgcctgcccatgtctgtccgccgctttgagcagctggagctgcggcctgtcctctataactacctggataaaaacctgactgtgagcgtccacgtgtccccagtggaggggctgtgcctggctgggggcggagggctggcccagcaggtgctggtgcctgcgggctctgcccggcctgttgccttctctgtggtgcccacggcagccaccgctgtgtctctgaaggtggtggctcgagggtccttcgaattccctgtgggagatgcggtgtccaaggttctgcagattgagaaggaaggggccatccatagagaggagctggtctatgaactcaaccccttggaccaccgaggccggaccttggaaatacctggcaactctgatcccaatatgatccctgatggggactttaacagctacgtcagggttacagcctcagatccattggacactttaggctctgagggggccttgtcaccaggaggcgtggcctccctcttgaggcttcctcgaggctgtggggagcaaaccatgatctacttggctccgacactggctgcttcccgctacctggacaagacagagcagtggagcacactgcctcccgagaccaaggaccacgccgtggatctgatccagaaaggctacatgcggatccagcagtttcggaaggcggatggttcctatgcggcttggttgtcacggggcagcagcacctggctcacagcctttgtgttgaaggtcctgagtttggcccaggagcaggtaggaggctcgcctgagaaactgcaggagacatctaactggcttctgtcccagcagcaggctgacggctcgttccaggacctctctccagtgatacataggagcatgcaggggggtttggtgggcaatgatgagactgtggcactcacagcctttgtgaccatcgcccttcatcatgggctggccgtcttccaggatgagggtgcagagccattgaagcagagagtggaagcctccatctcaaaggcaagctcatttttgggggagaaagcaagtgctgggctcctgggtgcccacgcagctgccatcacggcctatgccctgacactgaccaaggcccctgcggacctgcggggtgttgcccacaacaacctcatggcaatggcccaggagactggagataacctgtactggggctcagtcactggttctcagagcaatgccgtgtcgcccaccccggctcctcgcaacccatccgaccccatgccccaggccccagccctgtggattgaaaccacagcctacgccctgctgcacctcctgcttcacgagggcaaagcagagatggcagaccaggctgcggcctggctcacccgtcagggcagcttccaagggggattccgcagtacccaagacacggtgattgccctggatgccctgtctgcctactggattgcctcccacaccactgaggagaggggtctcaatgtgactctcagctccacaggccggaatgggttcaagtcccacgcgctgcagctgaacaaccgccagattcgcggcctggaggaggagctgcagttttccttgggcagcaagatcaatgtgaaggtgggaggaaacagcaaaggaaccctgaaggtccttcgtacctacaatgtcctggacatgaagaacacgacctgccaggacctacagatagaagtgacagtcaaaggccacgtcgagtacacgatggaagcaaacgaggactatgaggactatgagtacgatgagcttccagccaaggatgacccagatgcccctctgcagcccgtgacacccctgcagctgtttgagggtcggaggaaccgccgcaggagggaggcgcccaaggtggtggaggagcaggagtccagggtgcactacaccgtgtgcatctggcggaacggcaaggtggggctgtctggcatggccatcgcggacgtcaccctcctgagtggattccacgccctgcgtgctgacctggagaagctgacctccctctctgaccgttacgtgagtcactttgagaccgaggggccccacgtcctgctgtattttgactcggtccccacctcccgggagtgcgtgggctttgaggctgtgcaggaagtgccggtggggctggtgcagccggccagcgcaaccctgtacgactactacaaccccgagcgcagatgttctgtgttttacggggcaccaagtaagagcagactcttggccaccttgtgttctgctgaagtctgccagtgtgctgaggggaagtgccctcgccagcgtcgcgccctggagcggggtctgcaggacgaggatggctacaggatgaagtttgcctgctactacccccgtgtggagtacggcttccaggttaaggttctccgagaagacagcagagctgctttccgcctctttgagaccaagatcacccaagtcctgcacttcaccaaggatgtcaaggccgctgctaatcagatgcgcaacttcctggttcgagcctcctgccgccttcgcttggaacctgggaaagaatatttgatcatgggtctggatggggccacctatgacctcgagggacacccccagtacctgctggactcgaatagctggatcgaggagatgccctctgaacgcctgtgccggagcacccgccagcgggcagcctgtgcccagctcaacgacttcctccaggagtatggcactcaggggtgccaggtgtgagggctgccctcccacctccgctgggaggaacctgaacctgggaaccatgaagctggaagcactgctgtgtccgctttcatgaacacagcctgggaccagggcatattaaaggcttttggcagcaaagtgtcagtgttggc

SEQ ID NO: 2147 - DNA, 2900 bp, Homo sapiens
tgtggccaccccagttcagctccgggtgttccgcgagttccacctgcacctccgcctgcccatgtctgtccgccgctttgagcagctggagctgcggcctgtcctctataactacctggataaaaacctgactgtgagcgtccacgtgtccccagtggaggggctgtgcctggctgggggcggagggctggcccagcaggtgctggtgcctgcgggctctgcccggcctgttgccttctctgtggtgcccacggcagccaccgctgtgtctctgaaggtggtggctcgagggtccttcgaattccctgtgggagatgcggtgtccaaggttctgcagattgagaaggaaggggccatccatagagaggagctggtctatgaactcaaccccttggaccaccgaggccggaccttggaaatacctggcaactctgatcccaatatgatccctgatggggactttaacagctacgtcagggttacagcctcagatccattggacactttaggctctgagggggccttgtcaccaggaggcgtggcctccctcttgaggcttcctcgaggctgtggggagcaaaccatgatctacttggctccgacactggctgcttcccgctacctggacaagacagagcagtggagcacactgcctcccgagaccaaggaccacgccgtggatctgatccagaaaggctacatgcggatccagcagtttcggaaggcggatggttcctatgcggcttggttgtcacggggcagcagcacctggctcacagcctttgtgttgaaggtcctgagtttggcccaggagcaggtaggaggctcgcctgagaaactgcaggagacatctaactggcttctgtcccagcagcaggctgacggctcgttccaggacctctctccagtgatacataggagcatgcaggggggtttggtgggcaatgatgagactgtggcactcacagcctttgtgaccatcgcccttcatcatgggctggccgtcttccaggatgagggtgcagagccattgaagcagagagtggaagcctccatctcaaaggcaagctcatttttgggggagaaagcaagtgctgggctcctgggtgcccacgcagctgccatcacggcctatgccctgacactgaccaaggcccctgcggacctgcggggtgttgcccacaacaacctcatggcaatggcccaggagactggagataacctgtactggggctcagtcactggttctcagagcaatgccgtgtcgcccaccccggctcctcgcaacccatccgaccccatgccccaggccccagccctgtggattgaaaccacagcctacgccctgctgcacctcctgcttcacgagggcaaagcagagatggcagaccaggctgcggcctggctcacccgtcagggcagcttccaagggggattccgcagtacccaagacacggtgattgccctggatgccctgtctgcctactggattgcctcccacaccactgaggagaggggtctcaatgtgactctcagctccacaggccggaatgggttcaagtcccacgcgctgcagctgaacaaccgccagattcgcggcctggaggaggagctgcagttttccttgggcagcaagatcaatgtgaaggtgggaggaaacagcaaaggaaccctgaaggtccttcgtacctacaatgtcctggacatgaagaacacgacctgccaggacctacagatagaagtgacagtcaaaggccacgtcgagtacacgatggaagcaaacgaggactatgaggactatgagtacgatgagcttccagccaaggatgacccagatgcccctctgcagcccgtgacacccctgcagctgtttgagggtcggaggaaccgccgcaggagggaggcgcccaaggtggtggaggagcaggagtccagggtgcactacaccgtgtgcatctggcggaacggcaaggtggggctgtctggcatggccatcgcggacgtcaccctcctgagtggattccacgccctgcgtgctgacctggagaagctgacctccctctctgaccgttacgtgagtcactttgagaccgaggggccccacgtcctgctgtattttgactcggtccccacctcccgggagtgcgtgggctttgaggctgtgcaggaagtgccggtggggctggtgcagccggccagcgcaaccctgtacgactactacaaccccgagcgcagatgttctgtgttttacggggcaccaagtaagagcagactcttggccaccttgtgttctgctgaagtctgccagtgtgctgaggggaagtgccctcgccagcgtcgcgccctggagcggggtctgcaggacgaggatggctacaggatgaagtttgcctgctactacccccgtgtggagtacggcttccaggttaaggttctccgagaagacagcagagctgctttccgcctctttgagaccaagatcacccaagtcctgcacttcaccaaggatgtcaaggccgctgctaatcagatgcgcaacttcctggttcgagcctcctgccgccttcgcttggaacctgggaaagaatatttgatcatgggtctggatggggccacctatgacctcgagggacacccccagtacctgctggactcgaatagctggatcgaggagatgccctctgaacgcctgtgccggagcacccgccagcgggcagcctgtgcccagctcaacgacttcctccaggagtatggcactcaggggtgccaggtgtgagggctgccctcccacctccgctgggaggaacctgaacctgggaaccatgaagctggaagcactgctgtgtccgctttcatgaacacagcctgggaccagggcatattaaaggcttttggcagca

SEQ ID NO: 2148 - DNA, 1235 bp, Homo sapiens; identical to SEQ ID NO: 1954

SEQ ID NO: 2149 - protein, 254 aa, Homo sapiens
MAISGVPVLGFFIIAVLMSAQESWAIKEEHVIIQAEFYLNPDQSGEFMFDFDGDEIFHVDMAKKETVWRLEEFGRFASFEAQGALANIAVDKANLEIMTKRSNYTPITNVPPEVTVLTNSPVELREPNVLICFIDKFTPPVVNVTWLRNGKPVTTGVSETVFLPREDHLFRKFHYLPFLPSTEDVYDCRVEHWGLDEPLLKHWEFDAPSPLPETTENVVCALGLTVGLVGIIIGTIFIIKGLRKSNAAERRGPL

SEQ ID NO: 2150 - DNA, 948 bp, Homo sapiens
atgaaggccaactacagcgcagaggagcgctttctcctgctgggtttctccgactggccttccctgcagccggtcctcttcgcccttgtcctcctgtgctacctcctgaccttgacgggcaactcggcgctggtgctgctggcggtgcgcgacccgcgcctgcacacgcccatgtactacttcctctgccacctggccttggtagacgcgggcttcactactagcgtggtgccgccgctgctggccaacctgcgcggaccagcgctctggctgccgcgcagccactgcacggcccagctgtgcgcatcgctggctctgggttccgccgaatgcgtcctcctggcggtgatggctctggaccgcgcggccgcagtgtgccgcccgctgcgctatgcggggctcgtctccccgcgcctatgtcgcacgctggccagcgcctcctggctaagcggcctcaccaactcggttgcgcaaaccgcgctcctggctgagcggccgctgtgcgcgccccgcctgctggaccacttcatctgtgagctgccggcgttgctcaagctggcctgcggaggcgacggagacactaccgagaaccagatgttcgccgcccgcgtggtcatcctgctgctgccgtttgccgtcatcctggcctcctacggtgccgtggcccgagctgtctgttgcatgcggttcagcggaggccggaggagggcggtgggcacgtgtgggtcccacctgacagccgtctgcctgttctacggctcggccatctacacctacctgcagcccgcgcagcgctacaaccaggcacggggcaagttcgtatcgctcttctacaccgtggtcacacctgctctcaacccgctcatctacaccctcaggaataagaaagtgaagggggcagcgaggaggctgctgcggagtctggggagaggccaggctgggcagtga

SEQ ID NO: 2151 - protein, 401 aa, Homo sapiens; identical to SEQ ID NO: 2024

SEQ ID NO: 2152 - DNA, 1037 bp, Homo sapiens; identical to SEQ ID NO: 2019

SEQ ID NO: 2153 - protein, 126 aa, Homo sapiens; identical to SEQ ID NO: 2020

SEQ ID NO: 2154 - DNA, 507 bp, Homo sapiens
gcgcaccctctccccttgtccactgctgccgcctccttcttctgccgctcctggtgctgcttgtgtgctcgtttggagcggacctggtacctcttttgtgaagcggcagctgaggagactccggcgctcgccatggccgaagaaaagcccaaggaaggagtcaagactgagaacaacgatcatattaatttgaaggtggcggggcaggatggttctgtggtgcagtttaagattaagaggcatacaccacttagtaaactaatgaaagcctattgtgaacgacagtggaaatggaggatgaagatacaattgatgtgttccaacagcagacgggaggtgtctactgaaaagggaacctgcttctttactccagaactctgttctttaaagaccaagattacattctcaattagaaaactgcaatttgcttccaccacatcctgactactaccgtatagttttctctattctttcatttcccccttccccattcctttactgtacata

SEQ ID NO: 2155 - DNA, 1310 bp, Homo sapiens
agacgccgagatgctggtcatggcgccccgaaccgtcctcctgctgctctcggcggccctggccctgaccgagacctgggccggctcccactccatgaggtatttctacacctccgtgtcccggcccggccgcggggagccccgcttcatctcagtgggctacgtggacgacacccagttcgtgaggttcgacagcgacgccgcgagtccgagagaggagccgcgggcgccgtggatagagcaggaggggccggagtattgggaccggaacacacagatctacaaggcccaggcacagactgaccgagagagcctgcggaacctgcgcggctactacaaccagagcgaggccgggtctcacaccctccagagcatgtacggctgcgacgtggggccggacgggcgcctcctccgcgggcatgaccagtacgcctacgacggcaaggattacatcgccctgaacgaggacctgcgctcctggaccgccgcggacacggcggctcagatcacccagcgcaagtgggaggcggcccgtgaggcggagcagcggagagcctacctggagggcgagtgcgtggagtggctccgcagatacctggagaacgggaaggacaagctggagcgcgctgaccccccaaagacacacgtgacccaccaccccatctctgaccatgaggccaccctgaggtgctgggccctgggtttctaccctgcggagatcacactgacctggcagcgggatggcgaggaccaaactcaggacactgagcttgtggagaccagaccagcaggagatagaaccttccagaagtgggcagctgtggtggtgccttctggagaagagcagagatacacatgccatgtacagcatgaggggctgccgaagcccctcaccctgagatgggagccgtcttcccagtccaccgtccccatcgtgggcattgttgctggcctggctgtcctagcagttgtggtcatcggagctgtggtcgctgctgtgatgtgtaggaggaagagttcaggtggaaaaggagggagctactctcaggctgcgtgcagcgacagtgcccagggctctgatgtgtctctcacagcttgaaaagcctgagacagctgtcttgtgagggactgagatgcaggatttcttcacgcctcccctttgtgacttcaagagcctctggcatctctttctgcaaaggcacctgaatgtgtctgcgtccctgttagcataatgtgaggaggtggagagacagcccacccttgtgtccactgtgacccctgttcgcatgctgacctgtgtttcctcccca

SEQ ID NO: 2156 - protein, 362 aa, Homo sapiens
MLVMAPRTVLLLLSAALALTETWAGSHSMRYFYTSVSRPGRGEPRFISVGYVDDTQFVRFDSDAASPREEPRAPWIEQEGPEYWDRNTQIYKAQAQTDRESLRNLRGYYNQSEAGSHTLQSMYGCDVGPDGRLLRGHDQYAYDGKDYIALNEDLRSWTAADTAAQITQRKWEAAREAEQRRAYLEGECVEWLRRYLENGKDKLERADPPKTHVTHHPISDHEATLRCWALGFYPAEITLTWQRDGEDQTQDTELVETRPAGDRTFQKWAAVVVPSGEEQRYTCHVQHEGLPKPLTLRWEPSSQSTVPIVGIVAGLAVLAVVVIGAVVAAVMCRRKSSGGKGGSYSQAACSDSAQGSDVSLTA

SEQ ID NO: 2157 - DNA, 1502 bp, Homo sapiens
ggcgccccgaaccgtcctcctgctgctctcggcggccctggccctgaccgagacctgggccgccccaggctcccactccatgaggtatttcgacaccgccatgtcccggcccggccgcggggagccccgcttcatctcagtgggctacgtggacgacacgcagttcgtgaggttcgacagcgacgccgcgagtccgagagaggagccgcgggcgccgtggatagagcaggaggggccggagtattgggaccggaacacacagatcttcaagaccaacacacagactgaccgagagagcctgcggaacctgcgcggctactacaaccagagcgaggccgggtctcacaccctccagagcatgtacggctgcgacgtggggccggacgggcgcctcctccgcgggcataaccagtacgcctacgacggcaaggattacatcgccctgaacgaggacctgcgctcctggaccgcggcggacaccgcggctcagatcacccagcgcaagtgggaggcggcccgtgtggcggagcaggacagagcctacctggagggcacgtgcgtggagtggctccgcagatacctggagaacgggaaggacacgctggagcgcgcggaccccccaaagacacacgtgacccaccaccccatctctgaccatgaggccaccctgaggtgctgggccctgggcttctaccctgcggagatcacactgacctggcagcgggatggcgaggaccaaactcaggacactgagcttgtggagaccagaccagcaggagatagaaccttccagaagtgggcagctgtggtggtgccttctggagaagagcagagatacacatgccatgtacagcatgaggggctgccgaagcccctcaccctgagatgggagccgtcttcccagtccaccgtccccatcgtgggcattgttgctggcctggctgtcctagcagttgtggtcatcggagctgtggtcgctgctgtgatgtgtaggaggaagagctcaggtggaaaaggagggagctactctcaggctgcgtgcagcgacagtgcccagggctctgatgtgtctctcacagcttgaaaagcctgagacagctgtcttgtgagggactgagatgcaggatttcttcacgcctcccctttgtgacttcaagagcctctggcatctctttctgcaaaggcacctgaatgtgtctgcgtccctgttagcataatgtgaggaggtggagagacagcccacccttgtgtccactgtgacccctgttcccatgctgacctgtgtttcctccccagtcatctttcttgttccagagaggtggggctggatgtctccatctctgtctcaactttacgtgcactgagctgcaacttcttacttccctactgaaaataagaatctgaatataaatttgttttctcaaatatttgctatgagaggttgatggattaattaaataagtcaattcctggaatttgagagagcaaataaagacctgaga

SEQ ID NO: 2158 - protein, 362 aa, Homo sapiens; identical to SEQ ID NO: 1989

SEQ ID NO: 2159 - DNA, 1432 bp, Homo sapiens
ccgagcttcttaaacacaggccttgggcctacggctctgggggtacttgggggggcgggggcaggtctgatgagtaacccctccccccaggttccagaggaagaagcctccacatctgtctgccggcccaagagttccatggcctccacttcccgccgccaacgccgagaacgtcgctttcgtcgttacttgtctgcaggacggctggtccgggcccaggccctcctccagcgacacccaggcctcgatgtagatgctgggcagcccccaccactgcaccgggcctgtgcccgccacgatgcccctgccctgtgcctgctgcttcggctcggggctgaccctgcccaccaggaccgccatggggacacggcactgcatgctgctgcccgccagggcccagatgcctacaccgatttcttcctcccgctgctaagccgctgtccctccgccatgggaataaagaataaggatggggagacccctggccaaattttgggctggggacccccctgggattctgctgaagaggaggaagaagatgatgcctccaaggagcgggaatggagacagaagctccagggtgagctggaggacgagtggcaggaagtcatggggaggtttgaaggtgatgcctcccatgaaacccaggaacctgagtccttctcagcctggtcagatcgcctggcccgggaacatgcccagaagtgccagcagcagcagcgagaagcagagggatcccgtcgacccccacgtgctgagggctccagccagagctggcgacagcaggaggaggagcagcggctcttcagggagcgagcccgggccaaggaggaagagctgcgtgagagccgagccaggagggcgcaggaggctctaggggaccgagaacccaagccaaccagggccgggcccagggaagagcaccccagaggagcggggaggggcagcctctggcgatttggtgatgtgccctggccctgccctgggggaggggacccagaggccatggctgcagccctggtggccaggggcccccctttggaggaacagggggctctgaggaggtacttgagggtccagcaggtccgctggcaccctgaccgcttcctgcagcgattccgaagccagattgagacctgggagctgggccgtgtgatgggagcagtgacagccctttctcaggccctgaatcgccatgcagaggccctcaagtgaccctagggaagaagcaagaaacttcggggctgcagcctcaggatgaggcagaaggaagggtaagggaaaggatggggaccacaaggaagagccaggtgctgctcagcagaggatatgggtgggagcgaaagttgtaacaagtgggggtggggggtgcgggccgccaccactgctccttgactctgccgtttcctaataagacctggttccacatctc

SEQ ID NO: 2160 - DNA, 841 bp, Homo sapiens
tctaatacctattgatctgttactttctcccatcacgctcaggtgggaacatccagttgcaggaaaacaagcttaacacgcccactgattctacattatggtgagttctataattattttattatatattacagtgtaataatggaaataaagtgcctaataaatgcaaatgtgcttacatcttttggcccagctcctacctcccggcagcctctccaggcccagaactttctccagtcagcctctacagaccaagctcatgactctcaatggcctatttaggcccataccctacgtcacggcagcctccgcagatgaggctactgcctcacaacagcctccacaggcacagctccatcgttacaatggcctctttagacccagctcctgcctcccagccttctctccaggccctgaactttctcaagttgacctcaccaggcccagctcatgcttctttgcagcctctccaggcccagctcctgcatcttggtggcccctccaggcccagcctctgcctcccgtcagcctctacagtcccaacgtctgcctcacagcagattcttcacgcccagcttctacctcacttggaccctccagacccagatggtgtctcactgtggcatcctcaggtgaagctcctgcctttcggcagcctctccaggcccagctcctcctgcctcccagtggcctctttcggcccagcccagctcatgcctcccggcggccttcccaagccccgcttttgactttcggtggcctctgcaggcctcgacaaggcccagcctcctgcctcccgaaggcctgcacaggcccagcctctgcctcacagcggactctc

SEQ ID NO: 2161 - DNA, 964 bp, Homo sapiens
tgagggagtgagggaagcttcctctgtatttacagccactcccctttgctcacattcccgcctgagctccaccttctcagatgagcagcagcattagatgctcataggagaacgcaccctgttgtgaaccatgcatgtgagggatctaggttgcgctgtccttatgagagtctaatacctattgatctgtcactttctcccatcacgctcaggtgggaacatccagttgcaggaaaacaagcttaacacgcccactgattctacattatgctcctacctcccggcagcctctccaggcccagaactttctccagtcagcctctacagaccaagctcatgactcaaaatggcctatttaggcccataccctacgtcacggcagcctccgcagatgaggctactgcctcacaacagcctccacaggcacagctccatcgttacaatggcctctttagacccagctcctgcctcccagccttctctccaggccctgaacattctcaggtctccctctgttgtccaaggctggagtgtagtagtgctatcgcagctgactgcagcctcaaccttccaggctgaagcgatcctcccacgtcaacctcccacgtggctgagactacaggtgcttgccactatgcccaactaatatttggaattttcatatacgtggattccagaggggtgacagcgaaacgtgggaacatccagttgcaggaaaacaagcttaacacgcccactgattctacattatgctcctacctcccggcagcctctccaggcccagaactttctccagtcagcctctacagaccaagctcatgactctcaatggcctatttaggcccataccctacgtcacggcagcctccgcagatgaggctactgcctcacaacagcctccacaggcacagctccatcgttacaatggcctctttagacccagctcctgcctcccagccttctc

SEQ ID NO: 2162 - protein, 159 aa, Homo sapiens
MAYLGPYPTSRQPPQMRLLPHNSLHRHSSIVTMASLDPAPASQPSLQALNFLKLTSPGPAHASLQPLQAQLLHLGGPSRPSLCLPSASTVPTSASQQILHAQLLPHLDPPDPDGVSLWHPQVKLLPFGSLSRPSSSCLPVASFGPAQLMPPGGLPKPRF

SEQ ID NO: 2163 - DNA, 1310 bp, Homo sapiens
ggcacgagggccggaaggcggcgtccgcgacgcagctgttcacgcttaggtgggcgacgtgggcgcaggtgggcgcaggatggcaaaacagaagagaaaagttcctgaagtgacagagaaaaagaacaaaaagctgaagaaggcgtcagcagaggggccactgctgggccctgaggctgcaccaagtggcgaaggagccggctccaagggcgaagctgtgctcaggcccgggctggacgcagagccagagctgtccccagaggagcagagggtcctggaaaggaagctgaaaaaggaacggaagaaagaggagaggcagcgtctgcgggaggcaggccttgtggcccagcacccgcctgccaggcgctcgggggccgaactggccctggactacctctgcagatgggcccaaaagcacaagaactggaggtttcagaagacgaggcagacgtggctcctgctgcacatgtatgacagtgacaaggttcccgatgagcacttctccaccctgctggcctacctggaggggctgcagggccgggcccgagagctgacggtgcagaaggcggaagccctgatgcgggagctggatgaggagggctctgatccccccctgccggggagggcccagcgcatccgacaggtgctgcagctgctctcctagtgggttcagcgcggggcggggccgctgcccagtgcagggctgcctcagaccacacagggtgcagctcctccggcggtgggggccgggttcaccagcagggcagcggctgagcaagggctttcagctcctccggtggtgggggccgggatcaccagcaccagagcctcgcaagggccccttccctcctccagaccctccttggccggtgacggctgtgacagtgatggcaggttcagtgccttcagcgcagagcgtggatgctctggaatcacccggacccctggccttggagggaccctccagccccaggaatctgctttggagggaaatgtctatttttctaccgggaatattttagagattggggcatgctggctcctcccgccagctgcaaacctgcaccttccgcctgattcccgatccccctgcgtgggccgcattcctggtcccctgcctgcgtccatcgaggggcctggctgtggcctgttttcctttgaccccacacagcgtcattgcgggtcatggggagcccctggtgggagcttgtggagtcggatcacgtacctgtgcagaaaccgcctctgtggctgcatttgaaataaaacccgacccagcagcaaaaaaaaaaaaaaaaaaaaaaaaaaaa

SEQ ID NO: 2164 - protein, 194 aa, Homo sapiens
MAKQKRKVPEVTEKKNKKLKKASAEGPLLGPEAAPSGEGAGSKGEAVLRPGLDAEPELSPEEQRVLERKLKKERKKEERQRLREAGLVAQHPPARRSGAELALDYLCRWAQKHKNWRFQKTRQTWLLLHMYDSDKVPDEHFSTLLAYLEGLQGRARELTVQKAEALMRELDEEGSDPPLPGRAQRIRQVLQLLS

SEQ ID NO: 2165 - DNA, 1605 bp, Homo sapiens
gcggcgcgctgcaggcgcggggaacaccaatggcggggtacttgaagctggtgtgtgtttcctttcagcgtcaagggttccacactgttgggagtcgctgcaagaatcggacaggcgctgagcacctgtggctgacccgacatctcagggacccatttgtgaaggctgcgaaggtggagagttaccggtgtcgaagcgccttcaagctcctggaggtgaacgagaggcaccagattctgcggcccggccttcgggtgttagactgtggggcagctcctggggcctggagtcaggtggcggtgcagaaggtcaacgccgcaggcacagatcccagctctcctgttggcttcgtgcttggggtagatcttcttcacatattccccctggaaggagcaacttttctgtgccctgctgacgtgactgacccgagaacctcacagagaatcctcgaggtgcttcctggcaggagagcagatgtgattctgagcgacatggcgcccaatgccacagggttccgggacctcgatcatgacaggctcatcagcctgtgcctgacccttctcagcgtgaccccagacatcctgcaacctggggggacattcctttgtaaaacctgggctggaagtcaaagccgtcggttacagaggagactgacagaggaattccagaatgtaaggatcatcaaacctgaagccagcaggaaagagtcatcagaagtgtacttcttggccacacagtaccacggaaggaagggcactgtgaagcagtgaggatttcttgtgccattttcataatggtcattagctccttttaagctagaaacgtagcctgagctcctgaagagttcctgggagatttgagctgattttggagatggagcaggacaagtggggagtctctctctctctttctctctctctctttttaaccaaaaagagatgacaaaactaagttcaggggccatggaaaatgaaaaagtccgctatattgtgatttgggaagagaaagttatcaagagaaagaggtgaggatggaaggatggagaaaaacagactgtgggaaggatcagaaggaatccgccgaggcagggatgggtgtgcccatgtgtgccttgacgggacttcatcttatagactgttaaactgtcacacacaaacaggctttccacccctgctctgagagcaccacgcacagatttccagttcttagtgtggctgtttaaagtagaaaatctgggggctgggtgaggccactcatgcctgtaaacccagggctttagaaggctgaggctgggggattgcttgaagtcaggagttcaagaccaacctgggcaacatagcaacaccccccatgtctacaaaaatgaaaaaccaaaaagcaaaccaaaagaaaaatctgaaatttccatctggggattaacttctgtctttctggtgaacaatatagcaattcacgcattcttcaagcagcaaaagttcccggaacaattagggaagacgtatggtctgaatttatccaggcagtgggtctgctttggtttttgctggaaatttatatcagtgtctgggctcccaagaacataaatgtaattgccaaagcaaaaaa

SEQ ID NO: 2166 - protein, 246 aa, Homo sapiens
MAGYLKLVCVSFQRQGFHTVGSRCKNRTGAEHLWLTRHLRDPFVKAAKVESYRCRSAFKLLEVNERHQILRPGLRVLDCGAAPGAWSQVAVQKVNAAGTDPSSPVGFVLGVDLLHIFPLEGATFLCPADVTDPRTSQRILEVLPGRRADVILSDMAPNATGFRDLDHDRLISLCLTLLSVTPDILQPGGTFLCKTWAGSQSRRLQRRLTEEFQNVRIIKPEASRKESSEVYFLATQYHGRKGTVKQ

SEQ ID NO: 2167 - DNA, 2961 bp, Homo sapiens
cggcggccgcggagccctgcgagtaggcagcgttgggcccatgcaggacgcggagaacgtggcggtgcccgaggcggccgaggagcgcgccgagcccggccagcagcagccggccgccgagccgccgccagccgaggggctgctgcggcccgcggggcccggcgctccggaggccgcggggaccgaggcctccagtgaggaggtggggatcgcggaggccgggccggagtccgaggtgaggaccgagccggcggccgaggcagaggcggcctccggcccgtccgagtcgccctcgccgccggccgccgaggagctgcccgggtcgcatgctgagccccctgtcccggcacagggcgaggccccaggagagcaggctcgggacgagcgctccgacagccgggcccaggcggtgtccgaggacgcgggaggaaacgagggcagagcggccgaggccgaaccccgggcgctggagaacggcgacgcggacgagccctccttcagcgaccccgaggacttcgtggacgacgtgagcgaggaagaattactgggagatgtactcaaagatcggccccaggaagcagatggaatcgattcggtgattgtagtggacaatgtccctcaggtgggacccgaccgacttgagaaactcaaaaatgtcatccacaagatcttttccaagtttgggaaaatcacaaatgatttttatcctgaagaggatgggaagacaaaagggtatattttcctggagtacgcgtcccctgcccacgctgtggatgctgtgaagaacgccgacggctacaagcttgacaagcagcacacattccgggtcaacctctttacggattttgacaagtatatgacgatcagtgacgagtgggatattccagagaaacagcctttcaaagacctggggaacttacgttactggcttgaagaggcagaatgcagagatcagtacagtgtgatttttgagagtggagaccgcacttccatattctggaatgacgtaaaagaccctgtctcaattgaagaaagagcgagatggacagagacgtatgtgcgttggtctcctaagggcacctacctggctacctttcatcaaagaggcattgctctatgggggggagagaaattcaagcaaattcagagattcagccaccaaggggttcagcttattgacttctcaccttgtgaaaggtacctggtgacctttagccccctgatggacacgcaggatgaccctcaggccataatcatctgggacatccttacggggcacaagaagaggggttttcactgtgagagctcagcccattggcctatttttaagtggagccatgatggcaaattctttgccagaatgaccctggatacgcttagcatctatgaaactccttctatgggtcttttggacaagaagagtttgaagatctctgggataaaagacttttcttggtctcctggtggtaacataatcgccttctgggtgcctgaagacaaagatattccagccagggtaaccctgatgcagctccctaccaggcaagagatccgagtgaggaacctgttcaatgtggtggactgcaagctccattggcagaagaacggagactacttgtgtgtgaaagtagataggactccgaaaggcacccagggtgttgtcacaaattttgaaattttccgaatgagggagaaacaggtacctgtggatgtggtcgagatgaaagaaaccatcatagcctttgcctgggaaccaaatggaagtaagtttgctgtgctgcacggagaggctccgcggatatctgtgtctttctaccacgtcaaaaacaacgggaagattgaactcatcaagatgttcgacaagcagcaggcgaacaccatcttctggagcccccaaggacagttcgtggtgttggcgggcctgaggagtatgaacggtgccttagcgtttgtggacacttcggactgcacggtcatgaacatcgcagagcactacatggcttccgacgtcgaatgggatcctactgggcgctacgtcgtcacctctgtgtcctggtggagccataaggtggacaacgcgtactggctgtggactttccagggacgcctcctgcagaagaacaacaaggaccgcttctgccagctgctgtggcggccccggcctcccacactcctgagccaggaacagatcaagcaaattaaaaaggatctgaagaaatactctaagatctttgaacagaaggatcgtttgagtcagtccaaagcctcaaaggaattggtggagagaaggcgcaccatgatggaagatttccggaagtaccggaaaatggcccaggagctctatatggagcagaaaaacgagcgcctggagttgcgaggaggggtggacactgacgagctggacagcaacgtggacgactgggaagaggagaccattgagttcttcgtcactgaagaaatcattcccctcgggaatcaggagtgacctggagcactgtgcgcagccgtgtgtgctgtggagccgaggccgtcctgcaggaagccgcgtgactcccgcctcctccctgtgctctctggctctggactgtgactgcgcctggattctgccattgcgacacatttttgtgcctttcagcccctggtgtctgcagtgggggatttaaggcacccgcttccacttctttcttgtttggagttttctgttggaaccgccggcgttggctccgaagacttagcgacgccactggcggcaccttctcctgcgcccagtgatgtttccacggtgcctgtacacagccgagcagcatttccgttgaaggacttgcatccccattgcgggcagtgctggacgtgtcccggagacccaccgggagggcgccgccatgccttgtacccccaccgtgcaggttgtggccggttttctccgcaggttgaacatggaaataaaagcaaacttgtatg

SEQ ID NO: 2168 - DNA, 2776 bp, Homo sapiens
gtcggagcgaccggcttggcgcctgcctgtccccagcccctctcagcttgaactccttccttcaagtctgggccctcgaggcttccagagcggcctccaggggtgcagtctcagttccccacgccagccgtctccgtcctccgcctcctccgggcctggcaggtggcactgtccggaggcggagccttgggcgaggggtggttgcggcggaggacgcaaccgagcgggcctgcggcctcaccatggacccagaatgcgcccagctgctcccggctctctgtgctgttctggtagatcccaggcagccggtggcagatgacacctgtttggagaagctcctggactggtttaaaacggtcactgaaggagagtccagtgtcgtgctgctgcaggagcacccctgcctggtggagctgctgtcccatgtgctgaaagtccaggacctgagttctggggtcctctccttctcactgcgcctggcaggaaccttcgcagcccaggaaaactgcttccagtatcttcaggtgcggtcgacaccatcttctccctgcagggagactccagcctgtttgtggcctcggcggccagtcagctcctggtgcacgtcctggctttgtccatgcgaggtggagccgaggggcagccctgcctgccggggggtgactggcccgcgtgtgcccagaagatcatggatcacgttgaagagtccttgtgctccgcggccacccccaaggtcactcaggccctgaacgtcctgaccacgaccttcgggcgctgccagagcccctggacggaagccctgtgggtgcggctgagtccccgcgtggcctgtctgctggagagagaccccatccccgccgcacactcgttcgtggacctgcttctctgtgtggctcgttctcccgtgttcagttcttccgacggcagcctgtgggagacagtggcgcgggctctgagctgcctgggtcccacccacatgggacccctggctttggggatcctgaagctcgagcactgtccacaggcactgaggacccaggccttccaggtccttctccagcccctggcctgtgtcctgaaggccacggttcaggcccccggacccccaggcttgctggacgggacggcagacgatgccacgacggtggacacactcctggcctccaagtcgtcctgcgccggcctcctgtgccgcaccctggctcacctggaggagctgcagccgctgccccagcgcccttcaccgtggccccaggcgtctctactgggggctacagtgactgtcctgcggctctgtgacggctcggctgcccctgcctccagtgtggggggccacctctgtgggaccctggcgggctgcgtccgggtccagcgagcagccctcgacttcctggggacgctgtcacaggggacaggcccccaggagctggtgacgcaggcgcttgctgtcctcctggagtgcctcgagagccccggctccagccccacggttctgaagaaggccttccaggccacgctcaggtggctcctgagctcacccaagacccccggctgctctgatctcggccccctcatcccgcagttcctcagagagctgttccctgtgctgcagaaacgcctgtgccacccctgctgggaggtgagggactccgccctcgagttcctgacccagctgagcaggcactggggaggacaggctgacttcagatgcgcactcttggcttcagaggtgcctcagctggccctgcagctcctccaggaccctgagagttatgtccgagcgagtgcagtgaccgccatggggcagctgtccagccagggcctgcacgcccccaccagccctgagcatgcagaggcccggcagagcctgttcctggagctcctgcacatcctctccgtagactcggagggcttcccacggcgggcggtcatgcaagtcttcactgagtggctgcgggacggccacgccgacgcggcccaggacacggagcagttcgtggccactgtgctgcaggcggcgagccgagacctggactgggaggtccgcgcccagggcctggagctggccctcgtgttcctgggccagactttggggccgccgcgtacccactgcccctatgccgtggccctacccgaggtggccccagcccagccactcaccgaggcactgagggctctctgccacgtggggctctttgacttcgccttttgtgccttgtttgactgcgaccgccctgtggcgcagaagtcttgtgacctccttctcttcctgagggacaagattgcttcctacagcagcctgcgggaggccaggggcagccccaacactgcctccgcagaggccaccctgccgaggtggcgggcgggtgagcaggcccagcccccaggggaccaggagcctgaggctgtgctggccatgctcaggtccctagacctggagggcctgcggagcacgctggccgagagcagcgaccacgtggaaaagagtccccagtccctcctgcaggacatgctggccacgggaggcttcctgcagggggacgaggccgactgctactgagcagaaccagagtctgccactggggctcaggaccaagggaggcagcaccatgtccttctgtgggacactgccagccccagggctccagcccagcccggtggatcctctggggaagccaggaccaggagagaagcaaggtcaagaaatcccacagtttgatgtattaaagaaatgacttatttctactcaaaataaatggcattgaagtctttcttt

SEQ ID NO: 2169 - protein, 646 aa, Homo sapiens
MRGGAEGQPCLPGGDWPACAQKIMDHVEESLCSAATPKVTQALNVLTTTFGRCQSPWTEALWVRLSPRVACLLERDPIPAAHSFVDLLLCVARSPVFSSSDGSLWETVARALSCLGPTHMGPLALGILKLEHCPQALRTQAFQVLLQPLACVLKATVQAPGPPGLLDGTADDATTVDTLLASKSSCAGLLCRTLAHLEELQPLPQRPSPWPQASLLGATVTVLRLCDGSAAPASSVGGHLCGTLAGCVRVQRAALDFLGTLSQGTGPQELVTQALAVLLECLESPGSSPTVLKKAFQATLRWLLSSPKTPGCSDLGPLIPQFLRELFPVLQKRLCHPCWEVRDSALEFLTQLSRHWGGQADFRCALLASEVPQLALQLLQDPESYVRASAVTAMGQLSSQGLHAPTSPEHAEARQSLFLELLHILSVDSEGFPRRAVMQVFTEWLRDGHADAAQDTEQFVATVLQAASRDLDWEVRAQGLELALVFLGQTLGPPRTHCPYAVALPEVAPAQPLTEALRALCHVGLFDFAFCALFDCDRPVAQKSCDLLLFLRDKIASYSSLREARGSPNTASAEATLPRWRAGEQAQPPGDQEPEAVLAMLRSLDLEGLRSTLAESSDHVEKSPQSLLQDMLATGGFLQGDEADCY

SEQ ID NO: 2170 - DNA, 4716 bp, Homo sapiens
ggcggccgagcggagccgagcgcagccgagccgggccgagccgggccgggccgggcccaggagcgcgcggatgatgcgggcggccaggcgggggtcgacgggtccctgaagcccgcgccccgggccagcaagggagccccgcgcaggccgcgcgcatccggaggcggccgggccccgccatggccggggtcagctacgcggcgccctggtgggtgagcctcctgcaccggctgccccacttcgacctgagctgggaggccactagcagccagttccggcccgaggacaccgactaccagcaggccctgctgctcctgggggccgccgccctggcctgcctcgccctggacctcctcttcctgctcttctactccttctggctgtgctgccggcggcgcaagagcgaggagcacctggacgccgactgctgctgcacggcctggtgtgtcatcatcgccacgctggtgtgcagcgccggcatcgcagtgggattctacggcaacggggagaccagtgatggcatccatagggccacctactcgctccgccacgccaaccgcacggtggccggggtccaggaccgcgtgtgggacacggcggtggggctgaaccacacggcggagcccagcctgcagaccctggagcggcagctggccgggcggcccgagcccctgcgagccgtacagaggctgcagggcctgctggagacgctgctgggctacacggccgccatccccttttggaggaacacggcggtgtcgctggaggtgctggcggagcaggtggatctctacgactggtacagggtctgcctgctgggagtcctggccctggtcatcagctggggcgcgctgggcttggagctggctgtgtccgtgggctccagcgacttctgtgtggaccctgacgcctacgtgaccaaaatggtggaggagtactcggtgctgagtggggacatcctgcagtactacctggcctgctcgccccgcgccgccaaccccttccagcagaagctgtcgggcagccacaaggcactggtggagatgcaggatgtcgtggctgagcttctgaggaccgtcccctgggagcagccggccactaaggaccccctcctccgcgtccaggaggtgctgaatggcacggaggtgaacctgcagcacctcaccgccctggtggactgccgcagcctgcatctggactacgtgcaagcgctgaccggcttctgctatgacggcgtggagggcctcatctacctggccctcttctccttcgtcacagccctcatgttcagctccatcgtctgcagcgtcccgcacacctggcagcaaaagagaggccctgatgaggacggggaggaggaggccgctccagggccgcggcaggcgcacgacagcctctaccgcgtccacatgcccagcctgtacagctgtggcagcagctacggcagtgagaccagcatcccggccgcggcccacaccgtcagcaacgccccggtcactgagtacatgagccagaacgctaatttccagaacccccgctgtgagaacaccccactcattgggcgcgagtccccgccgccctcatacacctccagcatgagagccaaatacctcgccacgagccagcctcgccctgactccagcggcagccactagaccgcgcccggcagccacccaccccacgtgccaacttcccctccccgtgccagcactgccgcttccacctgggccacccaccggaccctcgcacgccgtgccaggcctgccccagacgcgtctgcaggccgcttgccctcctgtcccctccccgcaggggcacagtggagacgcaggggctctgggcccgtaccgccaactcgggtcacacctgaacgctgctgccagccgatgccccagccctgcacgccacccactatcccggcacgctccctctgcagatggtcgccgcacctacaagccctggccgcacccaacctgtgttgttgccgcccggcccttccctccacagctctccttcctcccgcccggcacttctgtggaccccttcttagttcacaggcacggctggggccgctctgtgctggcgcctgctggccactgagggacagggacacgtgccacctgctcatctctgccctgaggtcaccccgtggtccctccacgtgcccatctctctgcagtgccctcctcgcctgtgcagcccgcccacccacaggctcacccctcctgccggctgccagaggccccctccagcagggcctctctccgttgccccagcttcactctctccctcagcacctgccctgctggaggccccagccctccgtggacagcaggggccacgtggagcccgggccgctcacccgccacccagtgctggccgccttcttggtgccaaacccccttcccccacccagagactgggcagctgtgtctggttcgttctttgcactaaccacatttgtcatctctagggcaggctggggctgcgggctgagggggaccgctggcaccccccttccctcccttcttggttccatttccatccatgacaggtacagcatcccaggagcccggcctgaggggctggacccgagccggctgtgaacatccctcagcccctgctgtccccccttgggactaaccactaacctcacccccaaactccacgggtgcccctagctggcccagagccggcagtgtgagcccaagtccgggctggagccgaggccggagcagctgtctgggagtcaaggctgcagtagcgtttcttcatggggtgctccagggggtgccacagaccgacaggcagcccaagggcctggacacccctccccaggcaggtgctgccccaggaggactgtcctcgggaatgaacctcccgcgggctttggactgaggtccctgtggcctcggtctcctccccatgaagtgggagcgaggctccccaatggtgcttttggctttagtgtacgatgtttgctgtgcttcccgccgtggagggcagagccaccccacatcaggatcggacgtgctacccctcccggtcccggccctggcccagccagcccagccctcgaggctcgatgcctgtgccaaggccaggggcagccagagggcagctggatggccacgtgcaggggtcaaggctgggccctgcagtggggcgggccgccagccccagcagtttacagacgcatggctcttcctcccagagcagccggcagctacctggaccggaaatgtcctcatcccctccctggggccaggctctgccctggccttcctctgtgaacccctcctttctttgtgctggtgtctgggaccaaaaagggggaatatgggagggcagagtggggaggggagtccatgggcctggggccccaagccggggcgtctgagctccccaggcatgaccaaacctcagtggaggggcctctgcttcaggccccgcctggctgacattctgagcccccctcggaggccccgccacagccaacctgcccagtctttcctctgggcttgacccgccaggggagttctccaggcctagggccaggagagaggccctggcaccctggcgtgggtgcccgccaaacgccctgcgaccgctcagaagcacaaatgctgtccatggccgtgaggctgcctgccaggtgaatggacatagcgtgagaggcggtgaggccagggcttccagcctcgtgctgtctcgggactcctgaccgtggtgtgcgtgtgtgcccgtctgtgactttctactcaccaaggttgaagaaaggaaacggggaaaatcaaaaggggttcaaaccccacctcagtaggtggaggggagcgcctgccattggttgtatttttgttctgagttttcggtgccgtgttcctaactactccatcccatgacctcgccacacctactggggcatctggctggtgcctgctgccatggccagcccccactctcaccctgcacagggggtcttgcagcccccaggcccacagcctcgttgggaggacagggtggccctggggacaagagggaggagcccaggggcttacctcactgagagtgctccccagcaggcatccactaccccagggccccccacatgtcatggcaaggttggtagtgaatgggcctggttgggagcagcccctggcccattgcccacccacccatctcactatgcaattcgagttccaagcaacatttgctcctgccctggggccagctctgccccagccctgagaggggtggtgaggcagccccctggaccccagaaccccagacaagggggcaggcgggggaccagggcctctcctgtgggatctttgttttgtgtttaaccataatggttgtgtactgaaccacttcatatttgttatatataatatatatatatataatctccttaagactcagcctcctggtttacccccccggcctgggcatctgacctcccccaccccagtgtgatttaacatccaggaactgaggcctgaaccattttgcatttccccctcctccagcctctgtagggccatggctgtatgtactgtcgctgtgtttttttgtttttttagaactgggtttgggggctgatttttatttctttgggggctttttttcttggcaaatactaaaaatctcgtcaatgtaatttctgtggtttctattcagcttgggtttcatgttttaaaataaattttaaaaagc

SEQ ID NO: 2171 - protein, 491 aa, Homo sapiens
MAGVSYAAPWWVSLLHRLPHFDLSWEATSSQFRPEDTDYQQALLLLGAAALACLALDLLFLLFYSFWLCCRRRKSEEHLDADCCCTAWCVIIATLVCSAGIAVGFYGNGETSDGIHRATYSLRHANRTVAGVQDRVWDTAVGLNHTAEPSLQTLERQLAGRPEPLRAVQRLQGLLETLLGYTAAIPFWRNTAVSLEVLAEQVDLYDWYRVCLLGVLALVISWGALGLELAVSVGSSDFCVDPDAYVTKMVEEYSVLSGDILQYYLACSPRAANPFQQKLSGSHKALVEMQDVVAELLRTVPWEQPATKDPLLRVQEVLNGTEVNLQHLTALVDCRSLHLDYVQALTGFCYDGVEGLIYLALFSFVTALMFSSIVCSVPHTWQQKRGPDEDGEEEAAPGPRQAHDSLYRVHMPSLYSCGSSYGSETSIPAAAHTVSNAPVTEYMSQNANFQNPRCENTPLIGRESPPPSYTSSMRAKYLATSQPRPDSSGSH

SEQ ID NO: 2172 - DNA, 1503 bp, Homo sapiens
acagaacagagagaaaggaacctttgtctttcgtgtgaatgctcgtgaggggccatccttagagtggaaatgctcctgaggctccagcgaatcaagaccctcagacccccgggctgtccccaccccatgaccacatgttccgcaggcaccctcagcgctgtgccctgcgtgtcgcccaggcaggtgtttgtttttgagcgcagattctgcctgtggcatagccatgtggagatgttcacgcatgtacttccctttgtgatttcagccgatacggaagatgtgtgcattgtagagagattgttctccagcagcctagtggccatcgtgagccttaaagcaccaaggaagctaaaggtttgccactttaagaagggaactgagatctgcaactacagctactccaacacgattctggctgtgaagctcaacaggcagaggctgatagtatgcctggaggagtccctgtacatccacaacattcgggacatgaaggtgctgcatacgatcagggagacgcctccaaaccctgcaggcctgtgtgcgctgtcaatcaacaacgacaactgctacttggcgtacccagggagcgcgaccatcggagaggtgcaggtcttcgataccattaatttgagagctgcaaacatgattccggctcacgacagtcctttagcggcactggcctttgacgcaagtggaactaaacttgccacggcttcggagaaggggaccgtgattagggtattttccattccagaaggacaaaaactctttgagtttcggagaggagtaaagaggtgcgtgagcatctgctccctggccttcagcatggacggcatgttcctctccgcctccagcaacactgagaccgtgcacatcttcaaactcgagactgtgaaagaaaaacccccagaggagcccaccacctggaccgggtacttcgggaaagtgctcatggcctccaccagctacctgccttcccaagtgacagaaatgttcaaccagggcagagctttcgccacggtccgcctgccattctgcggccacaaaaacatctgctcgctagccacaattcagaagatcccgcggttgttggtgggtgccgccgacgggtacctgtacatgtacaacctggacccccaggagggcggcgagtgtgccctgatgaagcagcaccggctggacggcagtctgaaaacgaccaatgagatcttggactctgcctctcacgactgccccttagtcactcagacatacggcgcagctgcaggaaaagcctacacagacgacctgggtgctgtgggtggcgcctgcctggaggacgaggccagcgccctgcgcctggatgaggacagcgagcacccgcccatgattcttcggactgactgaacttgacctgtgacctctgacccggggagcagagaacactggcttcacagaggactttgtgcattgctgctatgaactttgacctgagtcgggggagaggatggcagagactttatt

SEQ ID NO: 2173 - protein, 438 aa, Homo sapiens
MLLRLQRIKTLRPPGCPHPMTTCSAGTLSAVPCVSPRQVFVFERRFCLWHSHVEMFTHVLPFVISADTEDVCIVERLFSSSLVAIVSLKAPRKLKVCHFKKGTEICNYSYSNTILAVKLNRQRLIVCLEESLYIHNIRDMKVLHTIRETPPNPAGLCALSINNDNCYLAYPGSATIGEVQVFDTINLRAANMIPAHDSPLAALAFDASGTKLATASEKGTVIRVFSIPEGQKLFEFRRGVKRCVSICSLAFSMDGMFLSASSNTETVHIFKLETVKEKPPEEPTTWTGYFGKVLMASTSYLPSQVTEMFNQGRAFATVRLPFCGHKNICSLATIQKIPRLLVGAADGYLYMYNLDPQEGGECALMKQHRLDGSLKTTNEILDSASHDCPLVTQTYGAAAGKAYTDDLGAVGGACLEDEASALRLDEDSEHPPMILRTD

SEQ ID NO: 2174 - DNA, 1793 bp, Homo sapiens
cgcgtccgccccgcgagcacagagcctcgcctttgccgatccgccgcccgtccacacccgccgccagctcaccatggatgatgatatcgccgcgctcgtcgtcgacaacggctccggcatgtgcaaggccggcttcgcgggcgacgatgccccccgggccgtcttcccctccatcgtggggcgccccaggcaccagggcgtgatggtgggcatgggtcagaaggattcctatgtgggcgacgaggcccagagcaagagaggcatcctcaccctgaagtaccccatcgagcacggcatcgtcaccaactgggacgacatggagaaaatctggcaccacaccttctacaatgagctgcgtgtggctcccgaggagcaccccgtgctgctgaccgaggcccccctgaaccccaaggccaaccgcgagaagatgacccagatcatgtttgagaccttcaacaccccagccatgtacgttgctatccaggctgtgctatccctgtacgcctctggccgtaccactggcatcgtgatggactccggtgacggggtcacccacactgtgcccatctacgaggggtatgccctcccccatgccatcctgcgtctggacctggctggccgggacctgactgactacctcatgaagatcctcaccgagcgcggctacagcttcaccaccacggccgagcgggaaatcgtgcgtgacattaaggagaagctgtgctacgtcgccctggacttcgagcaagagatggccacggctgcttccagctcctccctggagaagagctacgagctgcctgacggccaggtcatcaccattggcaatgagcggttccgctgccctgaggcactcttccagccttccttcctgggcatggagtcctgtggcatccacgaaactaccttcaactccatcatgaagtgtgacgtggacatccgcaaagacctgtacgccaacacagtgctgtctggcggcaccaccatgtaccctggcattgccgacaggatgcagaaggagatcactgccctggcacccagcacaatgaagatcaagatcattgctcctcctgagcgcaagtactccgtgtggatcggcggctccatcctggcctcgctgtccaccttccagcagatgtggatcagcaagcaggagtatgacgagtccggcccctccatcgtccaccgcaaatgcttctaggcggactatgacttagttgcgttacaccctttcttgacaaaacctaacttgcgcagaaaacaagatgagattggcatggctttatttgttttttttgttttgttttggttttttttttttttttggcttgactcaggatttaaaaactggaacggtgaaggtgacagcagtcggttggagcgagcatcccccaaagttcacaatgtggccgaggactttgattgcacattgttgtttttttaatagtcattccaaatatgagatgcattgttacaggaagtcccttgccatcctaaaagccaccccacttctctctaaggagaatggcccagtcctctcccaagtccacacaggggaggtgatagcattgctttcgtgtaaattatgtaatgcaaaatttttttaatcttcgccttaatacttttttattttgttttattttgaatgatgagccttcgtgcccccccttccccctttttgtcccccaacttgagatgtatgaaggcttttggtctccctgggagtgggtggaggcagccagggcttacctgtacactgacttgagaccagttgaataaaagtgcacacctta

SEQ ID NO: 2175 - protein, 375 aa, Homo sapiens
MDDDIAALVVDNGSGMCKAGFAGDDAPRAVFPSIVGRPRHQGVMVGMGQKDSYVGDEAQSKRGILTLKYPIEHGIVTNWDDMEKIWHHTFYNELRVAPEEHPVLLTEAPLNPKANREKMTQIMFETFNTPAMYVAIQAVLSLYASGRTTGIVMDSGDGVTHTVPIYEGYALPHAILRLDLAGRDLTDYLMKILTERGYSFTTTAEREIVRDIKEKLCYVALDFEQEMATAASSSSLEKSYELPDGQVITIGNERFRCPEALFQPSFLGMESCGIHETTFNSIMKCDVDIRKDLYANTVLSGGTTMYPGIADRMQKEITALAPSTMKIKIIAPPERKYSVWIGGSILASLSTFQQMWISKQEYDESGPSIVHRKCF

SEQ ID NO: 2176 - DNA, 2767 bp, Homo sapiens
gcggagggtgcgtgcgggccgcggcagccgaacaaaggagcaggggcgccgccgcagggacccgccacccacctcccggggccgcgcagcggcctctcgtctactgccaccatgaccgccaacggcacagccgaggcggtgcagatccagttcggcctcatcaactgcggcaacaagtacctgacggccgaggcgttcgggttcaaggtgaacgcgtccgccagcagcctgaagaagaagcagatctggacgctggagcagccccctgacgaggcgggcagcgcggccgtgtgcctgcgcagccacctgggccgctacctggcggcggacaaggacggcaacgtgacctgcgagcgcgaggtgcccggtcccgactgccgtttcctcatcgtggcgcacgacgacggtcgctggtcgctgcagtccgaggcgcaccggcgctacttcggcggcaccgaggaccgcctgtcctgcttcgcgcagacggtgtcccccgccgagaagtggagcgtgcacatcgccatgcaccctcaggtcaacatctacagtgtcacccgtaagcgctacgcgcacctgagcgcgcggccggccgacgagatcgccgtggaccgcgacgtgccctggggcgtcgactcgctcatcaccctcgccttccaggaccagcgctacagcgtgcagaccgccgaccaccgcttcctgcgccacgacgggcgcctggtggcgcgccccgagccggccactggctacacgctggagttccgctccggcaaggtggccttccgcgactgcgagggccgttacctggcgccgtcggggcccagcggcacgctcaaggcgggcaaggccaccaaggtgggcaaggacgagctctttgctctggagcagagctgcgcccaggtcgtgctgcaggcggccaacgagaggaacgtgtccacgcgccagggtatggacctgtctgccaatcaggacgaggagaccgaccaggagaccttccagctggagatcgaccgcgacaccaaaaagtgtgccttccgtacccacacgggcaagtactggacgctgacggccaccgggggcgtgcagtccaccgcctccagcaagaatgccagctgctactttgacatcgagtggcgtgaccggcgcatcacactgagggcgtccaatggcaagtttgtgacctccaagaagaatgggcagctggccgcctcggtggagacagcaggggactcagagctcttcctcatgaagctcatcaaccgccccatcatcgtgttccgcggggagcatggcttcatcggctgccgcaaggtcacgggcaccctggacgccaaccgctccagctatgacgtcttccagctggagttcaacgatggcgcctacaacatcaaagactccacaggcaaatactggacggtgggcagtgactccgcggtcaccagcagcggcgacactcctgtggacttcttcttcgagttctgcgactataacaaggtggccatcaaggtgggcgggcgctacctgaagggcgaccacgcaggcgtcctgaaggcctcggcggaaaccgtggaccccgcctcgctctgggagtactagggccggcccgtccttccccgcccctgcccacatggcggctcctgccaaccctccctgctaaccccttctccgccaggtgggctccagggcgggaggcaagcccccttgcctttcaaactggaaaccccagagaaaacggtgcccccacctgtcgcccctatggactccccactctcccctccgcccgggttccctactcccctcgggtcagcggctgcggcctggccctgggagggatttcagatgcccctgccctcttgtctgccacggggcgagtctggcacctctttcttctgacctcagacggctctgagccttatttctctggaagcggctaagggacggttgggggctgggagccctgggcgtgtagtgtaactggaatcttttgcctctcccagccacctcctcccagccccccaggagagctgggcacatgtcccaagcctgtcagtggccctccctggtgcactgtccccgaaacccctgcttgggaagggaagctgtcgggagggctaggactgacccttgtggtgtttttttgggtggtggctggaaacagcccctctcccacgtgggagaggctcagcctggctcccttccctggagcggcagggcgtgacggccacagggtctgcccgctgcacgttctgccaaggtggtggtggcgggcgggtaggggtgtgggggccgtcttcctcctgtctctttcctttcaccctagcctgactggaagcagaaaatgaccaaatcagtattttttttaatgaaatattattgctggaggcgtcccaggcaagcctggctgtagtagcgagtgatctggcggggggcgtctcagcaccctccccagggggtgcatctcagccccctctttccgtccttcccgtccagccccagccctgggcctgggctgccgacacctgggccagagcccctgctgtgattggtgctccctgggcctcccgggtggatgaagccaggcgtcgccccctccgggagccctggggtgagccgccggggcccccctgctgccagcctcccccgtccccaacatgcatctcactctgggtgtcttggtcttttattttttgtaagtgtcatttgtataactctaaacgcccatgatagtagcttcaaactggaaatagcgaaataaaataactcagtctgc

SEQ ID NO: 2177 - protein, 493 aa, Homo sapiens
MTANGTAEAVQIQFGLINCGNKYLTAEAFGFKVNASASSLKKKQIWTLEQPPDEAGSAAVCLRSHLGRYLAADKDGNVTCEREVPGPDCRFLIVAHDDGRWSLQSEAHRRYFGGTEDRLSCFAQTVSPAEKWSVHIAMHPQVNIYSVTRKRYAHLSARPADEIAVDRDVPWGVDSLITLAFQDQRYSVQTADHRFLRHDGRLVARPEPATGYTLEFRSGKVAFRDCEGRYLAPSGPSGTLKAGKATKVGKDELFALEQSCAQVVLQAANERNVSTRQGMDLSANQDEETDQETFQLEIDRDTKKCAFRTHTGKYWTLTATGGVQSTASSKNASCYFDIEWRDRRITLRASNGKFVTSKKNGQLAASVETAGDSELFLMKLINRPIIVFRGEHGFIGCRKVTGTLDANRSSYDVFQLEFNDGAYNIKDSTGKYWTVGSDSAVTSSGDTPVDFFFEFCDYNKVAIKVGGRYLKGDHAGVLKASAETVDPASLWEY

SEQ ID NO: 2178 - DNA, 1221 bp, Homo sapiens
ccgaacgcccgcagcagggtcagaagggaggtggccggtctccgtcgtgacctctgacggtttctgagcgttggcctttggcacgcgctacacccttttgctttggttctgccatgccgatgtaccaggtaaagccctatcacgggggcggcgcgcctctccgtgtggagcttcccacctgcatgtaccggctccccaacgtgcacggcaggagctacggcccagcgccgggcgctggccacgtgcaggaagagtctaacctgtctctgcaagctcttgagtcccgccaagatgatattttaaaacgtctgtatgagttgaaagctgcagttgatggcctctccaagatgattcaaacaccagatgcagacttggatgtaaccaacataatccaagcggatgagcccacgactttaaccaccaatgcgctggacttgaattcagtgcttgggaaggattacggggcgctgaaagacatcgtgatcaacgcaaacccggcctcccctcccctctccctgcttgtgctgcacaggctgctctgtgagcacttcagggtcctgtccacggtgcacacgcactcctcggtcaagagcgtgcctgaaaaccttctcaagtgctttggagaacagaataaaaaacagccccgccaagactatcagctgggattcactttaatttggaagaatgtgccgaagacgcagatgaaattcagcatccagacgatgtgccccatcgaaggcgaagggaacattgcacgtttcttgttctctctgtttggccagaagcataatgctgtcaacgcaacccttatagatagctgggtagatattgcgatttttcagttaaaagagggaagcagtaaagaaaaagccgctgttttccgctccatgaactctgctcttgggaagagcccttggctcgctgggaatgaactcaccgtagcagacgtggtgctgtggtctgtactccagcagatcggaggctgcagtgtgacagtgccagccaatgtgcagaggtggatgaggtcttgtgaaaacctggctccttttaacacggccctcaagctccttaagtgaattgccgtaactgattttaaagggtttagattttaagaatggtgctctttcatgcctattatcagtaaggggacttgtattagagtcagagtctttttatttaggccagttgtcaagtgtcaataaaagcgcatcatgtaattta

SEQ ID NO: 2179 - protein, 320 aa, Homo sapiens
MPMYQVKPYHGGGAPLRVELPTCMYRLPNVHGRSYGPAPGAGHVQEESNLSLQALESRQDDILKRLYELKAAVDGLSKMIQTPDADLDVTNIIQADEPTTLTTNALDLNSVLGKDYGALKDIVINANPASPPLSLLVLHRLLCEHFRVLSTVHTHSSVKSVPENLLKCFGEQNKKQPRQDYQLGFTLIWKNVPKTQMKFSIQTMCPIEGEGNIARFLFSLFGQKHNAVNATLIDSWVDIAIFQLKEGSSKEKAAVFRSMNSALGKSPWLAGNELTVADVVLWSVLQQIGGCSVTVPANVQRWMRSCENLAPFNTALKLLK

SEQ ID NO: 2180 - DNA, 2813 bp, Homo sapiens
atcggagtgtggcagtgctgggctggccggcgggctgggctgcggcccgcgcgcggccggcgatgcaggggggcaactccggggtccgcaagcgcgaagaggagggcgacggggctggggctgtggctgcgccgccggccatcgactttcccgccgagggcccggaccccgaatatgacgaatctgatgttccagcagaaatccaggtgttaaaagaacccctacaacagccaaccttcccttttgcagttgcaaaccaactcttgctggtttctttgctggagcacttgagccacgtgcatgaaccaaacccacttcgttcaagacaggtgtttaagctactttgccagacgtttatcaaaatggggctgctgtcttctttcacttgtagtgacgagtttagctcattgagactacatcacaacagagctattactcacttaatgaggtctgctaaagagagagttcgtcaggatccttgtgaggatatttctcgtatccagaaaatcagatcaagggaagtagccttggaagcacaaacttcacgttacttaaatgaatttgaagaacttgccatcttaggaaaaggtggatacggaagagtatacaaggtcaggaataaattagatggtcagtattatgcaataaaaaaaatcctgattaagggtgcaactaaaacagtttgcatgaaggtcctacgggaagtgaaggtgctggcaggtcttcagcaccccaatattgttggctatcacaccgcgtggatagaacatgttcatgtgattcagccacgagcagacagagctgccattgagttgccatctctggaagtgctctccgaccaggaagaggacagagagcaatgtggtgttaaaaatgatgaaagtagcagctcatccattatctttgctgagcccaccccagaaaaagaaaaacgctttggagaatctgacactgaaaatcagaataacaagtcggtgaagtacaccaccaatttagtcataagagaatctggtgaacttgagtcgaccctggagctccaggaaaatggcttggctggtttgtctgccagttcaattgtggaacagcagctgccactcaggcgtaattcccacctagaggagagtttcacatccaccgaagaatcttccgaagaaaatgtcaactttttgggtcagacagaggcacagtaccacctgatgctgcacatccagatgcagctgtgtgagctctcgctgtgggattggatagtcgagagaaacaagcggggccgggagtatgtggacgagtctgcctgtccttatgttatggccaatgttgcaacaaaaatttttcaagaattggtagaaggtgtgttttacatacataacatgggaattgtgcaccgagatctgaagccaagaaatatttttcttcatggccctgatcagcaagtaaaaataggagactttggtctggcctgcacagacatcctacagaagaacacagactggaccaacagaaacgggaagagaacaccaacacatacgtccagagtgggtacttgtctgtacgcttcacccgaacagttggaaggatctgagtatgatgccaagtcagatatgtacagcttgggtgtggtcctgctagagctctttcagccgtttggaacagaaatggagcgagcagaagttctaacaggtttaagaactggtcagttgccggaatccctccgtaaaaggtgtccagtgcaagccaagtatatccagcacttaacgagaaggaactcatcgcagagaccatctgccattcagctgctgcagagtgaacttttccaaaattctggaaatgttaacctcaccctacagatgaagataatagagcaagaaaaagaaattgcagaactaaagaagcagctaaacctcctttctcaagacaaaggggtgagggatgacggaaaggatgggggcgtgggatgaaagtggacttaacttttaaggtagttaactggaatgtaaatttttaatctttattagggtatagttggtacaatgcttcgttgtatttagtaagcctttacaagacttgttaaagatgtcagagtgccccaagctgccgttccttcccttcctgccccacaagctccttttcctgaatttcctacctaaatattaaccatatgcctagtctctgaaactaaaaacttggacctcatcctcaattattttctcctttcaactctgttgaccctctgtctggtcttcctctagaaggttctaccgcagaaattgatgtgtgctccctgccctcgtcactgcccaagcccgggcctgcacatactcactggactgttccagttttgacagctgccagtcttcctgcccctttcacactgcagctgaagttcattacctgaaggacgcctcatcatttcattccttggctccaaaccttctgctgcctctaagataaaagctcaacttcttaacagtgtacagtgtgcaacttccaacctttttatctgttctctccaccttcagtttagcgtcattccaaaaccacacccttgcaaagctttgtactccgcaccccagatgatctccaggcagctcagatctctttcctgcctttgccctgcactgttccccggtacttcctcctttattgtagcactcagctccccagccaatctgtacatccctcagaggcagcgatctgatgaattggtttttgaatcccagaaagggtctgccatggagttggcagtcatcacggtagatggcgtatgattttgctgaattttaaataaaatgaaaaccataaaaaaaaaaaaaaaa

SEQ ID NO: 2181 - protein, 630 aa, Homo sapiens
MQGGNSGVRKREEEGDGAGAVAAPPAIDFPAEGPDPEYDESDVPAEIQVLKEPLQQPTFPFAVANQLLLVSLLEHLSHVHEPNPLRSRQVFKLLCQTFIKMGLLSSFTCSDEFSSLRLHHNRAITHLMRSAKERVRQDPCEDISRIQKIRSREVALEAQTSRYLNEFEELAILGKGGYGRVYKVRNKLDGQYYAIKKILIKGATKTVCMKVLREVKVLAGLQHPNIVGYHTAWIEHVHVIQPRADRAAIELPSLEVLSDQEEDREQCGVKNDESSSSSIIFAEPTPEKEKRFGESDTENQNNKSVKYTTNLVIRESGELESTLELQENGLAGLSASSIVEQQLPLRRNSHLEESFTSTEESSEENVNFLGQTEAQYHLMLHIQMQLCELSLWDWIVERNKRGREYVDESACPYVMANVATKIFQELVEGVFYIHNMGIVHRDLKPRNIFLHGPDQQVKIGDFGLACTDILQKNTDWTNRNGKRTPTHTSRVGTCLYASPEQLEGSEYDAKSDMYSLGVVLLELFQPFGTEMERAEVLTGLRTGQLPESLRKRCPVQAKYIQHLTRRNSSQRPSAIQLLQSELFQNSGNVNLTLQMKIIEQEKEIAELKKQLNLLSQDKGVRDDGKDGGVG

SEQ ID NO: 2182 - DNA, 579 bp, Homo sapiens
atgcaggccatcaagtgtgtggtggtgggagacggagctgtaggtaaaacttgcctactgatcagttacacaaccaatgcatttcctggagaatatatccctactgtctttgacaattattctgccaatgttatggtagatggaaaaccggtgaatctgggcttatgggatacagctggacaagaagattatgacagattacgccccctatcctatccgcaaacagatgtgttcttaatttgcttttcccttgtgagtcctgcatcatttgaaaatgtccgtgcaaagtggtatcctgaggtgcggcaccactgtcccaacactcccatcatcctagtgggaactaaacttgatcttagggatgataaagacacgatcgagaaactgaaggagaagaagctgactcccatcacctatccgcagggtctagccatggctaaggagattggtgctgtaaaatacctggagtgctcggcgctcacacagcgaggcctcaagacagtgtttgacgaagcgatccgagcagtcctctgcccgcctcccgtgaagaagaggaagagaaaatgcctgctgttgtaa

SEQ ID NO: 2183 - protein, 192 aa, Homo sapiens
MQAIKCVVVGDGAVGKTCLLISYTTNAFPGEYIPTVFDNYSANVMVDGKPVNLGLWDTAGQEDYDRLRPLSYPQTDVFLICFSLVSPASFENVRAKWYPEVRHHCPNTPIILVGTKLDLRDDKDTIEKLKEKKLTPITYPQGLAMAKEIGAVKYLECSALTQRGLKTVFDEAIRAVLCPPPVKKRKRKCLLL

SEQ ID NO: 2184 - DNA, 1153 bp, Homo sapiens
gccgccgccgccatgaacattttccggctgactggggacctgtcccacctggcggccatcgtcatcctgctgctgaagatctggaagacgcgctcctgcgccggtatttctgggaaaagccagcttctgtttgcactggtcttcacaactcgttacctggatctttttacttcatttatttcattgtataacacatctatgaaggttatctaccttgcctgctcctatgccacagtgtacctgatctacctgaaatttaaggcaacctacgatggaaatcatgataccttccgagtggagtttctggtggtccctgtgggaggcctctcatttttagttaatcacgatttctctcctcttgagatcctctggaccttctccatctacctggagtccgtggctatccttccgcagctgtttatgatcagcaagactggggaggccgagaccatcaccacccactacctgttcttcctgggcctctatcgtgctttgtatcttgtcaactggatctggcgcttctactttgagggcttctttgacctcattgctgtggtggccggcgtagtccagaccatcctatactgtgacttcttctacttgtacattacaaaagtactcaagggaaagaagctcagtttgccagcataagtgccaaagaccatcaccagcatctgtccttcagggtgctcggacagaattcttaccacagcaaaggcataagatgcttgatacggaaaatcagaaacttaactcttttgttgcagatagtcatcagtggctctgtaaaaacgcagaggaaaagagccagaaggtttctgtttaatgcatcttgccttatctttttttattactgtgtacaaagatttttttacacaaagaaacttaatgctgtattaataaattcagtgtgtagcttcaattgggatagttccaaaagtgaagattttgtgaggaataagtgcaaattttttttttattttaaaaaattctttgaaactcttaagtctttgtgtctgcaatgaaattgtactccttgacagttgatagattatgtattcttccatccctcaaacttgcattccactatatttattttttggcaaaagatgagctgtatttgtttgaaatctgagacactatgttcaattgg

SEQ ID NO: 2185 - protein, 212 aa, Homo sapiens
MNIFRLTGDLSHLAAIVILLLKIWKTRSCAGISGKSQLLFALVFTTRYLDLFTSFISLYNTSMKVIYLACSYATVYLIYLKFKATYDGNHDTFRVEFLVVPVGGLSFLVNHDFSPLEILWTFSIYLESVAILPQLFMISKTGEAETITTHYLFFLGLYRALYLVNWIWRFYFEGFFDLIAVVAGVVQTILYCDFFYLYITKVLKGKKLSLPA

SEQ ID NO: 2186 - DNA, 1913 bp, Homo sapiens
atgagcgacatccgccactcgctgctgcgccgcgatgcgctgagcgccgccaaggaggtgttgtaccacctggacatctacttcagcagccagctgcagagcgcgccgctgcccatcgtggacaagggccccgtggagctgctggaggagttcgtgttccaggtgcccaaggagcgcagcgcgcagcccaagagactgaattcccttcaggagcttcaacttcttgaaatcatgtgcaattatttccaggagcaaaccaaggactctgttcggcagattattttttcatcccttttcagccctcaagggaacaaagccgatgacagccggatgagcttgttgggaaaactggtctccatggcggtggctgtgtgtcgaatcccggtgttggagtgtgctgcctcctggcttcagcggacgcccgtggtttactgtgtgaggttagccaaggcccttgtagatgactactgctgtttggtgccgggatccattcagacgctgaagcagatattcagtgccagcccgagattctgctgccagttcatcacctccgttaccgcgctctatgacctgtcatcagatgacctcattccacctatggacttgcttgaaatgattgtcacctggatttttgaggacccaaggttgattctcatcacttttttaaatactccgattgcggccaatctgccaataggattcttagagctcaccccgctcgttggattgatccgctggtgcgtgaaggcacccctggcttataaaaggaaaaagaagccccccttatccaatggccatgtcagcaacaaggtcacaaaggacccgggcgtggggatggacagagactcccacctcttgtactcaaaactccacctcagcgtcctgcaagtgctcatgacgctgcagctgcacctgaccgagaagaatctgtatgggcgcctggggctgatcctcttcgaccacatggtcccgctggtagaggagatcaacaggttggcggatgaactgaaccccctcaacgcctcccaggagattgagctctcgctggaccggctggcgcaggctctgcaggtggccatggcctcaggagctctgctgtgcacgagagatgacctgagaaccttgtgctccaggctgccccataataacctcctccagctggtgatctcgggtcccgtgcagcagtcgcctcacgccgcgctccccccggggttctacccccacatccacacgcccccgctgggctacggggctgtcccggcccaccccgccgcccaccccgccctgcccacgcaccccggccacaccttcatctccggcgtgacctttcccttcaggcccatccgctaggctggcccgtgtgtgccttctgcgctctcgctggacgaagcctttcgagatggaaggggtggccggactcccagaagagaacctcggggaaggggtcgggcagcccctccccgccggcagaaccgtcttggtgtcacggagtccaggtgcttcccacccggtcgcattctttgacatgcagattggatggtggagggaagagtccagcctctgccgagagcctgctgcgtgcatttttaaaagatgccgatcctgggagcctctgttctctgcgcatttcagacacagcctgtgtggcgaggagtgtgacggcaggagccacgggtgcaagcccgtgtgtctggcctctttcctcgtgaagacgatgtgtccccgccagaaaaagtgggcaccttctgcagccccgtgagctgagcccaggctgcgtagtgaccacaagcttatgtgcagcactgctcagggaggctgtcaggaattcccctcacctcggaaaggaacttctcagttttattgggggtgtctaaatttcctttcatatgttcaaataaatttttctaaacagt

SEQ ID NO: 2187 - protein, 449 aa, Homo sapiens
MSDIRHSLLRRDALSAAKEVLYHLDIYFSSQLQSAPLPIVDKGPVELLEEFVFQVPKERSAQPKRLNSLQELQLLEIMCNYFQEQTKDSVRQIIFSSLFSPQGNKADDSRMSLLGKLVSMAVAVCRIPVLECAASWLQRTPVVYCVRLAKALVDDYCCLVPGSIQTLKQIFSASPRFCCQFITSVTALYDLSSDDLIPPMDLLEMIVTWIFEDPRLILITFLNTPIAANLPIGFLELTPLVGLIRWCVKAPLAYKRKKKPPLSNGHVSNKVTKDPGVGMDRDSHLLYSKLHLSVLQVLMTLQLHLTEKNLYGRLGLILFDHMVPLVEEINRLADELNPLNASQEIELSLDRLAQALQVAMASGALLCTRDDLRTLCSRLPHNNLLQLVISGPVQQSPHAALPPGFYPHIHTPPLGYGAVPAHPAAHPALPTHPGHTFISGVTFPFRPIR

SEQ ID NO: 2188 - DNA, 1622 bp, Homo sapiens
ggcacgaggaagctactcagataagaggctccaagaggacatttttggatgtgaaaaacaatgagaaggaggacaacacacatttacaatcgtcttaattttgtactcagaaaaaggatgtgaagacaatgcacagggaatacaatagtttcagatctgtgtacagtttccttttgcttcatctcctgcaacaatgtaatgaagacaccatgatatcattaacatttcacacaaaaggaaaatgaggctgaaatggtgtgggcaaggcccaggaatctggagcatccctaaccaagcagcagagcacctgggatagagaaagtgctcaagaatgttcacttactgattactacaatcaaaaaaagatacgacactaatttaccacattcttcttacttattttatgagatactattcttccaaggtggagaaagtggagaaagtagagtgacgcagctaagggagtaaatcgaccctcagccaacaagtggcaaaagcctgaagaaagtgatcaagatcactgatgaccccgcggcccatctccaagggggcgggtatcacaaccccgacgccacaccacgtatcattccgcaaaactcccgcgcctcccacgcagaactggcaagagggaaggcgagacagcagtgaacagctggtacgcagcacccacagcaccgcggcagcagctagtgccgactcccgcctagctcttttgactctgttcgcgggaagaatggggaaacagtaaggttgcggcgcctcccgcgagacgaggtacctgaggctggccccgcagtcccccgccgcaccagcaccggagcttcacaccccacttccggggtcaagtcaccgccgggaatcctgtgatcgcagaaaggtagtctcaggttccgcccctatccaagtcccgcctccactgcctctcgccctgtatctgtcaacttccgggacgccgcgcgtcactaagcagccaatctccacttccggactcatccagccccttctccacccctttcagagacagcgcgattgcgatttaggtttccgcgcatttaattggcgaagctggagcgctagtcttcgctgattggtgccgagaaatctgccccatagacacccgcggggcgcacagtttcagtcgtccgtgggtttcccgccagccgcagtcttggaccataatcatggtggacatgatggacttgcccaggtcgcgcatcaacgccggcatgctagctcaattcatcgacaagcctgtctgcttcgtagggaggctggaaaagattcatcccaccggaaaaatgtttattctttcagatggagaaggaaaaaatggaaccatcgagttgatggaaccccttgatgaagaaatctctggaattgtggaagtggttggaagagtaaccgccaaggccaccatcttgtgtacatcttatgtccagtttaaagaagatagccatccttttgatcttggactttacaatgaagctgtgaaaattatccatgacttccctcagttttatcctttagggattgtgcaacatgattgatcttgatggattttcatacgattgtaaatgagctatattaaagtctattaaaggaaaaaaaaaaaaaaaaaaaaa

SEQ ID NO: 2189 - protein, 121 aa, Homo sapiens
MVDMMDLPRSRINAGMLAQFIDKPVCFVGRLEKIHPTGKMFILSDGEGKNGTIELMEPLDEEISGIVEVVGRVTAKATILCTSYVQFKEDSHPFDLGLYNEAVKIIHDFPQFYPLGIVQHD

SEQ ID NO: 2190 - DNA, 538 bp, Homo sapiens
caaccgaatggtcaaccattttattgctgagctcaagcgcaagcataagaaggacatcagtgagagcaagagagctgtaagatgcctccgtactgcttgtgaacatgctaagcgtactctctcttccagcacccaagtcagtattgagatcgattctctctatgtaggaattgacttctatacctccattacctgtgcccagtttgaagaattgaatgcctgggggattccctgttggtggagctcctccttctggtggtgcttccttagggcccaccatcgaagaggttgattaagccaacccaagtatagatgtagcattgttccacacatttaaaacatttgaaggacctaaatttgtagcaaattctgtggcagttttaaaaagttaagctgctatagtaagttactgggcattctcaatacttgaatatggaacatatgcacaggggaaggaaataacattgcactttataaacactgtattgtaagtggaaaatgcaatgtcttaaataaaactatttaaaattggcaccat

SEQ ID NO: 2191 - DNA, 1054 bp, Homo sapiens
cagccatcctgtctggagacaagtctgaaaatgttcaagatttgctgctcttggacgtcactcctctttcccttggtattgaaactgctagtggagtcatgaccatcctcatcaactgtaataccaccattcctaccaagcagacacagaccttcattacctattctgacaaccagcctggtgtgcttattcaggtttatgaaggtgagcgtgccatgtccaaggataacaacctgcttggcaagtttgaattcacgggcatacctcctgaaccccaaggtgttcctcagattgaagtcacttttgacattgatgccaatggtatcctcagtgtctctgctgtggacaaaagtacaggaaaagagaataaaattactatcactaataataagggccatttgagcaaggaagacattgaacgtatggtccaggaagctgagaattaaaaagctgaagatgagaagcagagggacaaggcgtcatccaagaattcacttgagtcctatgcattcaacatgaaagcaactgtcgaagatgagaaacttcaagacaagattaatgatgaggacaaacagaagattctggacaggtgtaatgaaattatcaactggcacaataagaatcggactgccaagaaggaagaatttgaacatcagcagaaagagctggaggaactttgcaacccaatcatcaccaagctgtaccagagtgcagaaggcatgccaggaagaatgcctgggggattccctgttggtggagctcctccttctggtggtgcttccttagggcccaccatcgaagaggttgattaagccaacccaagtatagatgtagcattgttccacacatttaaaacatttgaaggacctaaatttgtagcaaattctgtggcagttttaaaaagttaagctgctatagtaagttactgggcattctcaatacttgaatatggaacatatgcacaggggaaggaaataacattgcactttataaacactgtattgtaagtggaaaatgcaatgtcttaaataaaactatttaaaattggcaccat

SEQ ID NO: 2192 - protein, 115 aa, Homo sapiens [sequence omitted]

SEQ ID NO: 2193 - DNA, 518 bp, Homo sapiens
ccgtagtgtctcattgcagataatttttagcttagggcctggtggctaggtcggttctctcctttccagtcggagacctctgccgcaaacatgctccgccagatcatcggtcaggccaagaagcatccaagcttgatccccctctttgtatttattggaactggagctactggagcaacactgtatctcttgcgtctggcattgttcaatccagatgtttgttgggacagaaataacccagagccctggaacaaactgggtcccaatgatcaatacaagttctactcagtgaatgtggattacagcaagctgaagaaggaacgtccagatttctaaatgaaatgtttcactataacgctgctttagaatgaaggtcttccagaagccacatccgcacaattttccacttaaccaggaaatatttctcctctaaatgcatgaaatcatgttggagatctctattgtaatctctattggagattacaatgattaaatcaataaataactgaaaaaaaaaa

SEQ ID NO: 2194 - protein, 81 aa, Homo sapiens
MLRQIIGQAKKHPSLIPLFVFIGTGATGATLYLLRLALFNPDVCWDRNNPEPWNKLGPNDQYKFYSVNVDYSKLKKERPDF

SEQ ID NO: 2195 - DNA, 467 bp, Homo sapiens
gccatcttccagtaattcgccaaaatgacgaacacaaagggaaagaggagaggcacccgatatatgttctctaggccttttagaaaacatggagttgttcctttggccacatatatgcgaatctataagaaaggtgatattgtagacatcaagggaatgggtactgttcaaaaaggaatgccccacaagtgttaccatggcaaaactggaagagtctacaatgttacccagcatgctgttggcattgttgtaaacaaacaagttaagggcaagattcttgccaagagaattaatgtgcgtattgagcacattaagcactctaagagccgagatagcttcctgaaacgtgtgaaggaaaatgatcagaaaaagaaagaagccaaagagaaaggtacctgggttcaactaaagcgccagcctgagctgctggaacctattccctatgaattcatggcataataggtgtt

SEQ ID NO: 2196 - protein, 144 aa, Homo sapiens
MTNTKGKRRGTRYMFSRPFRKHGVVPLATYMRIYKKGDIVDIKGMGTVQKGMPHKCYHGKTGRVYNVTQHAVGIVVNKQVKGKILAKRINVRIEHIKHSKSRDSFLKRVKENDQKKKEAKEKGTWVQLKRQPELLEPIPYEFMA

SEQ ID NO: 2197 - DNA, 2452 bp, Homo sapiens
gctcgggcgcggggcgttcttggtgcgccgggccgtggtgagtccgggctcccgtggccgcgtgctgggaggagactggagcccggttaggaagaatggagttggcgactcgctaccagatccctaaagaagtggctgacatctttaacgcccccagtgatgatgaagagtttgttggcttccgagatgatgttcccatggaaaccctctcgtcagaggagagctgcgatagttttgactcactagagtcagggaaacagcaggatgtgcgctttcattccaaatacttcacagaagagctaagaagaatttttatagaggacactgactcagagactgaggattttgcaggatttacgcagagtgatctgaatggaaagactaacccagaagtaatggtcgtggagtcagatttgagtgatgatggcaaagcatctttggtgagcgaggaagaggaagatgaagaagaagataaggctacccctagaagaagcaggtctagaagaagtagtattggtcttcgagtagcctttcagttccccaccaagaagctggccaacaaaccagataaaaacagttcttccgagcagttgttttctagcgcacgcttacagaatgagaaaaaaacaattcttgaaagaaagaaagactgtagacaggtgatacaaagggaagattctacctctgagtctgaggatgactctcgggatgagagccaggagagttcagatgctttgctgaaaaggaccatgaacatcaaggagaacaaagccatgcttgcccagttattggcggaattgaactcgatgccagatttcttcccagtacgaaccccaacctcagcttctaggaagaagacagtgaggcgggccttctcggagggacagatcacgcggcgtatgaacccaacccggagtgcgcggcctcctgagaagtttgctctagagaacttcactgtctcagccgctaaatttgcggaagagttttacagcttccgaagaaggaagacaattggggggaaatgccgggagtacagacgacgtcaccgtatatcttcttttcggccagtggaggatatcaccgaagaggacttagaaaatgttgccataactgttcgagataaaatctatgataaagttctgggtaacacgtgccatcagtgtcgacaaaagaccatcgacaccaagacagtgtgtcggaaccagggttgctgtggtgtgcgaggacagttctgtggaccatgcctgcggaaccgctatggggaggatgtcagatcggcattgctggacccggattgggtgtgtcccccctgtcgtgggatctgcaattgcagctactgtcggaagcgtgacggccgctgtgccacaggaatcctcattcatctggccaagttttatggttatgacaatgttaaggaatatctggagagcttacaaaaggagctggtagaagacaattaagaggaaaacaaacagaaccagccacctcaccatagagtactccaacaagacatgcataccattggtgcctaagatttattaaaacttgactgaacaaaaggggaccatcaacattgtagacactggacactggaggccttacagagtgctagcctcttccttcaggactcacctggggcctgctgcttttatattttgaaagagtttaagggctaataatttaatttgttgtttgttaaaaattaaaatctccgttctttccggctgcattgcttttgcatgttcacatatgatgtacttttatgatgtacttttttttttttgagatggagtcttgttctgttgcccaggagggagtgcagtggtgcaacctcggctcactgcaacctttgcctcctaggttcaagtgattctcctacctcctgagtaactgggattacagtcgtgtgccaccacgctcagccctgagttagtttctagtatttttttctgactttcactctaaggatagcgttgaaaaaagaatgcacgtgtgagttactaaaaagttagaataatgtgcatgggaacagtgcagcaacatgctagaaaatcctcactgcactccagcagaggctagaggaatgccagtgttaccttacgcttctagaagcagagccactccagccagaacccattttgcagtcttctcttcgctcttcagcctgaaggtccagatgtagctggggcctctcagtttggttctatacacagggcactcgtaggtctgtttggtttcttgtctgtccacgggggtggcttttgcaaagatgaccggcatagggcatgccagctccttgagacgggcttcaacaatggttcctgcttgggtgtcccagcgggcgcctatggcaaaaacacagcggttgcaattgtgtggcagcttgctactaatgataatgatcaagtaagttgtttgatgcaataaacattcaacattctggttttgtcat

SEQ ID NO: 2198 - DNA, 1727 bp, Homo sapiens
ctttttcgcaacgggtttgccgccagaacacaggtgtcgtgaaaactacccctaaaagccaaaatgggaaaggaaaagactcatatcaacattgtcgtcattggacacgtagattcaggcaagtccaccactactggccatctgatctataaatgcggtggcatcgacaaaagaaccattgaaaaatttgagaaggaggctgctgagatgggaaagggctccttcaagtatgcctgggtcttggataaactgaaagctgagcgtgaacgtggtatcaccattgatatctccttgtggaaatttgagaccagcaagtactatgtgactatcattgatgccccaggacacagggacttcatcaaaaacatgattacagggacatctcaggctgactgtgctgtcctgattgttgctgctggtgttggtgaatttgaagctggtatctccaagaatgggcagacccgagagcatgcccttctggcttacacactgggtgtgaaacaactaattgtcggtgttaacaaaatggattccactgagccaccctacagccagaagagatatgaggaaattgttaaggaatcagcacttacattaagaaaattggctacaaccccgacacagtagcatttgtgccaatttctggttggaatggtgacaacatgctggagccaagtgctaacatgccttggttcaagggatggaaagtcacccgtaaggatggcaatgccagtggaaccacgctgcttgaggctctggactgcatcctaccaccaactcatccaactgacaagcccttgcgcctgcctctccaggatgtctacaaaattggtggtattggtactgttcctgttggccgagtggagactggtgttctcaaacccggtatggtggtcacctttgctccagtcaacgttacaacggaagtaaaatctgtcgaaatgcaccatgaagctttgagtgaagctcttcctggggacaatgtgggcttcaatgtcaagaatgtgtctgtcaaggatgttcgtcgtggcaacgtcgctggtgacagcaaaaatgacccaccaatggaagcagcgggcttcactgctcaggtgattatcctgaaccatccaggccaaataagcaccggctatgcccctgtattggattgccacacggctcacattgcatgcaagtttgctgagctgaaggaaaagattgatcgccgttctggtaaaaagctggaagatggccctaaattcttgaagtctggtgatgctgccattgttgatatggttcctggcaagcccatgtgtgttgagagcttctcagactatccacctttgggtcgctttgctgttcgtgatatgagacagacagttgcggtgggtgtcatcaaagcagtggacaagaaggctgctggagctggcaaggtcaccaagtctgcccagaaagctcagaaggctaaatgaatattatccctaatacctgccaccccactcttaatcagtggtggaagaatggtctcagaactgtttgtttcaattggccatttaagtttagtagtaaaagactggttaatgataacaatgcatcgtaaaaccttcagaaggaaaggagaatgttttgtggaccactttggttttcttttttgcgtgtggcagttttaagttattagtttttaaaatcagtactttttaatggaaacaactggaccaaaaatttgtcacagaattttgagacccatt

SEQ ID NO: 2199 - protein, 262 aa, Homo sapiens
MLEPSANMPWFKGWKVTRKDGNASGTTLLEALDCILPPTHPTDKPLRLPLQDVYKIGGIGTVPVGRVETGVLKPGMVVTFAPVNVTTEVKSVEMHHEALSEALPGDNVGFNVKNVSVKDVRRGNVAGDSKNDPPMEAAGFTAQVIILNHPGQISTGYAPVLDCHTAHIACKFAELKEKIDRRSGKKLEDGPKFLKSGDAAIVDMVPGKPMCVESFSDYPPLGRFAVRDMRQTVAVGVIKAVDKKAAGAGKVTKSAQKAQKAK

SEQ ID NO: 2200 - DNA, 1089 bp, Homo sapiens
gaaatttgagaccagcaagtactatgtgactatcattgatgccccaggacacagggacttcatcaaaaacatgattacagggacatctccaagaatgggcagacccgagagcatgcccttctggcttacacactgggtgtgaaacaactaattgtcggtgttaacaaaatggattccactgagccaccctacagccagaagagatatgaggaaattgttaaggaatcagcacttacattaagaaaattggctacaaccccgacacagtagcatttgtgccaatttctggttggaatggtgacaacatgctggagccaagtgctaacatgccttggttcaagggatggaaagtcacccgtaaggatggcaatgccagtggaaccacgctgcttgaggctctggactgcatcctaccaccaactcatccaactgacaagcccttgcgcctgcctctccaggatgtctacaaaattggtggtattggtactgttcctgttggccgagtggagactggtgttctcaaacccggtatggtggtcacctttgctccagtcaacgttacaacggaagtaaaatctgtcgaaatgcaccatgaagctttgagtgaagctcttcctggggacaatgtgggcttcaatgtcaagaatgtgtctgtcaaggatgttcgtcgtggcaacgtcgctggtgacagcaaaaatgacccaccaatggaagcagcgggcttcactgctcaggtgattatcctgaaccatccaggccaaataagcaccggctatgcccctgtattggattgccacacggctcacattgcatgcaagtttgctgagctgaaggaaaagattgatcgccgttctggtaatatggttcctggcaagcccatgtgtgttgagagcttctcagactatccacctttgggtcgctttgctgttcgtgatatgagacagacagttgcggtgggtgtcatcaaagcagtggacaagaaggctgctggagctggcaaggtcaccaagtctgcccagaaagctcagaaggctaaatgaatattatccctaatacctgccaccccactcttaatcagtggtggaagaa

SEQ ID NO: 2201 - protein, 233 aa, Homo sapiens
MVTTCWSQVLTCLGTMLLEALDCILPPTRPTDKPLHLPLQDVYKIGGIGSVPVGRVETGVLKPGMVVTFAPVNVTTEVKSVEMHHEALSEALPGDNVGFNVKNVSVKDVRHGNVAGDSKNDPPMEAAGFTAQVIILNHPGQISTGYAPVLDCHTAHIACKFAELKEKIDHRSGNMVPGKPMCVESFSDYPSLGCFAVRDMRQIVTVGVIKAVDKKTAGAGKVTKSAQKAQKAK

SEQ ID NO: 2202 - DNA, 796 bp, Homo sapiens
tataaatgcggtggcatcgacaaaagaaccattgaaaaatttgagaaggaggctgctgagatgggaaagggctccttcaagtatgcctgggtcttggataaactgaaagctgagcgtgaacgtggtatcaccattgatatctccttgtggaaatttgagaccagcaagtactatgtgactatcattgatgccccaggacacagggacttcatcaaaaacatgattacagggacatctcaggctgactgtgctgtcctgattgttgctgctggtgttggtgaatttgaagctggtatctccaagaatgggcagacccgagagcatgcccttctggcttacacactgggtgtgaaacaactaattgtcggtgttaacaaaatggattccactgagccaccctacagccagaagagatatgaggaaattgttaaggaatcagcacttacattaagaaaattggctacaaccccgacacagtagcatttgtgccaatttctggttggaatggtgacaacatgctggagccaagtgctaacatgccttggttcaagggatggaaagtcacccgtaaggatggcaatgccagtggaaccacgctgcttgagggctccagtcaacgttacaacggaagtaaaatctgtcgaaatgcaccatgaagctttgagtgaagctcttcctggggacaatgtgggcttcaatgtcaagaatgtgtctgtcaaggatgttcgtcgtggcaacgtcgctggtgacagcaaaaatgacccaccaatggaagcagcgggcttcactgctcagg

SEQ ID NO: 2203 - DNA, 305 bp, Homo sapiens
gtgaaaactacccctaaaagccaaaatgggaaaggaaaagactcatatcaacattgtcgtcattggacacgtagattcaggcaagtccaccactactggccatctgatctataaatgcggtggcatcgacaaaagaaccattgaaaaatttgagaaggaggctgctgagatgggaaagggctccttcaagtatgcctgggtcttggataaactgaaagctgagcgtgaacgtggtatcaccattgatatctccttgtggggcagacccgagagcatgcccttctggcttacacactgggtgtgaa

SEQ ID NO: 2204 - DNA, 406 bp, Homo sapiens
gaaaactacccctaaaagccaaaatgggaaaggaaaagactcatatcaacattgtcgtcattggacacgtagattcaggcaagtccaccactactggccatctgatctataaatgcggtggcatcgacaaaagaaccattgaaaaatttgagaaggaggctgctgagatgggaaagggctccttcaagtatgcctgggtcttggataaactgaaagctgagcgtgaacgtggtatcaccattgatatctccttgtggaaatttgagaccagcaagtactatgtgactatcattgatgcccgggacatctcaggctgactgtgctgtcctgattgttgctgctggtgttggtgaatttgaagctggtatctccaagaatgggcagacccgagagcatgcccttctgg

SEQ ID NO: 2205 - DNA, 469 bp, Homo sapiens
ctctctccggtccatgcctccaagatgacaaagaaaagaaggaacaacgttcgtgccaaaaagggccgcggccacgtgcagcctattcgctgcactaactgtgcccgatgcgtgcccaaggacaacgccattaagaaattcgtcattcgaaacatagtggaggctgcagcagtcagggacatttctgaagcgagcgtcttcgatgcctatgtgcttcccaagctgtgtgtgaagctacattactgtgtgagttgtgtaattcacagcaaagtagtcaggaatcgatctcgtgaagcccgcaaggaccgaacacccccaccccgatttagacctgcgggtgctgccgcacgtcccccaccaaagcccatgtaaggagctgagttcttaaagactgaagacagactattctctggagaaaaataaaatggacattgtacttaaaaaaaaacaaaaaaaaaaaaaaaaaaaa

SEQ ID NO: 2206 - DNA, 487 bp, Homo sapiens
  unsure 22: unknown base
ccgtgatgtggcgcctgcacantcctttccctttcggattcccgacgctgtggttgctgtaaggggtcctccctgcgccacacggccgtcgccatggtgaagctgagcaaagaggccaagcagagactacagcagctcttcaaggggagccagtttgccattcgctggggctttatccctcttgtgatttacctgggatttaagaggggtgcagatcccggaatgcctgaaccaactgttttgagcctactttggggataaaggattatttggtcttctggatttggaggcaatcagcggacagcatggaagatgtgtgctctggctcggataagagatgggacatcattcagtcactagttggatggcacaaggctcttcacagacgcatctgtagcagagtggaacttgtactaacttatgatagaatgtatcagaataaatgtttttaacagtgtaaaaaaaaaaaaaaaaaaaaaaaaaaaaa

SEQ ID NO: 2207 - protein, 55 aa, Homo sapiens
MVKLSKEAKQRLQQLFKGSQFAIRWGFIPLVIYLGFKRGADPGMPEPTVLSLLWG

SEQ ID NO: 2208 - DNA, 3990 bp, Homo sapiens
ggacgtccggcttcggagcgggagtgttcgttgtgccagcgactaaaaagagaattaaatatgggtgatgttgagaaaggcaagaagatttttattatgaagtgttcccagtgccacaccgttgaaaagggaggcaagcacaagactgggccaaatctccatggtctctttgggcggaagacaggtcaggcccctggatactcttacacagccgccaataagaacaaaggcatcatctggggagaggatacactgatggagtatttggagaatcccaagaagtacatccctggaacaaaaatgatctttgtcggcattaagaagaaggaagaaagggcagacttaatagcttatctcaaaaaagctactaatgagtaataattggccactgccttatttattacaaaacagaaatgtctcatgacttttttatgtgtaccatcctttaatagatctcatacaccagaattcagatcatgaatgactgacagaatattttgttgggcagtcctgatttaaaactaagactggcttgtggttaaatgaatatgttcagtttttgaattttaatagtaactccaattcagtaaatggtatcactgtttaccccttttaaagatatgattagacttcgttagtaatgttcaacttttcacaaagatggtgagtgccatcttaaaacttactggagattggttttatatttagatttatataactggttatgtgaatatatttaaatactggggaaattgcttcactgtcttagaaccaagcaagattcacctgtgttttgtgttcatgttcatttgcctcttaaaggcaagggttgaagataaataaggttgcaatgtctatagttttggccttaactatgccaatctaattataattccctgtatttaaaatggtttcttttacttattgaaaggcattttagtgtggtttatgtgtaatattaaagattattcaacacctctcacatcttacagatctataaggtcacatgcttttaaaatagtagcaagttaaacttcactcttgaattctttacaatctaagtcaaactaagttataatttaggattgtctttaaacagccattcagaaacaaaactgtagaactgtgtatttgattgggaatggtgcttttgccaacttaaaaggattaaagtaacggagatatacacaaattttaaaattatgtgtgatcacaagactaaagataattaaaaagaaaaccacagatcatgactttttgactgtgcttgatttcatgactgatgcacaaattttaatgattaaaaagtgcaggagccctaaatgtcagtgcagcagccctaaatgtcagtgcagcagtgttaaccagtcatggtgctagattgtttacttggttttctaggactgcctcaactagaataacacttcactaattgactcttagtttctttgctcagattgagaactgcagcatttatgccagacatggacagaggaatgcctgtggtcatagttttgtgatgtgtaacagtgtataattacatactgaattatttcatgcatagtctgtgccatacacatttagagtagtccttggagattttatggagatggtgagcacaaggtaagtcataaagaataatgagaaaataaatctatgctggtgcagctgagaactgtatctttgtgggacagtgagaagactgagaagatgtgaatccatggtctcaaaggtgatagggacgattagataggtgttttaaggcctgaaagcaatttataacatatgagtcttatttttatttatagaaatgtggaaagcttgctgtaattcatatttgaagtcctagtctgagttctggtggggaatttaaaaatgcatcctggaaatcctttaaagatttcagactttgaaaggccttgtagcagaggacttggtgactgtataaagttagtggtattcagggacagtgtagcaagtagcttacaaggggacaattctggactaatgagaaagacctgaagtgaaggctagagagttgattttttttttttttggcatcctggaaatgatacaggaaacatattaagatagatacagaaatgtgttcaaccttccatcttggctagttgtggcgtttagtttgttttttgagacatggtcacgctgtgtcgccaaggctggagtgcagtggtgcgatctcggctggctgcagcctctatttcccaggctcaagcgattctctcacttcagcttcccaagtagctgggactgcgggtgttcgccaccatgcccagctaatttttttgtagagatggagttttgccatgtggtcccaggctggtctcaaactcctgagctcaagcaatccgtccacttgccttggctccccaaagtgctgggattgcaggcgtgagccaccaggccctgcctggttttcaaattcagaaatcttattatttaacccagaagtaatcagcccagtagtaacttaggtttaattttttttcaggtttaaaatttttctcatttattttttctgagacggagtttcgcccttttcgcccaggctgagtacagtggtgcaatctcactgcaacctccgccttccagttgcaagtgattctcctgcctcagcctcctgagtagctgggattgcaggcacccgccaccacgcctggctaatttttgtatttttagtggagatggtgtttcaccatgttggccagactggtcttggactcctgacctcgtgatccacccaccttggcctcccaaagttctaggattacaggtgtgagccaccacgtccggccaatttttctcatttctatgcctcctatattaaggtctgtgttggcacagatgagtaactgccatgttctaggtcagttatacccaagcacttctggtggtttaaaatgtgattctgtaacttttttatttttatttttttgagataatttcactcttgttgcccaggctggagtgcaatggcgtgatcgctgctcaccgcaacctccgccttccaggttcaagcgattctcctgactcagcctctcaagtagctgggattacaagcatgcgccaccatgcccagcttattttgtgtttttagtagagacagggtttctccatgctggacaggctggtcttgaactcccgacgtcgggtgatctgcctgcctcggcctcccaaagtgctgggattacaggcgtgagccaccacgcctggccaattatgtaattttttaaaaaggacatttctatcagggatatataccttcagaaataaggaaataggggaaaaaaagagcactataaaccacatgttttcatttctagtgcttcgctgtaagtggctaggttggtagaatcaaaaacaagggccagatgtatttaaggggtattcagatgccacctacatgcttattttgtctagaacagtgctgtctaatagaactttctgtgacgatggatattttgtagacttttgctgtccagtgtggtagccactaaccacatgtggctgttaagcccttgaaatatagctagtgtgactagaaagtattttattttaaatttacataggcacaagtggctagtggctactgtattgacattctgggtctaggactagaaccagtggtctgtaacaaaagtactttctctttactctattaaatctagaattagccgggcatggtcgctcatgcctgtggtcccagcactttgggaggccaaggcaggcagatcacttgaggtcgggcgtttgagaccagcctggtcaacatggcgaaaccctgtctctacaaaaaacataaaagttagccaggtgtggtggtgggcacctgtagtctcagctacttgggaggctgaggcacaagaatcacttgaacttgggaggtggaggttgcagtgagccaggattgtgccactgcactcaagcctgggtgacgagtgaaactgtctccaaaaaaaaaaaaaaaaa

SEQ ID NO: 2209 - protein, 105 aa, Homo sapiens
MGDVEKGKKIFIMKCSQCHTVEKGGKHKTGPNLHGLFGRKTGQAPGYSYTAANKNKGIIWGEDTLMEYLENPKKYIPGTKMIFVGIKKKEERADLIAYLKKATNE

SEQ ID NO: 2210 - DNA, 1714 bp, Homo sapiens
agtagcagcagcgccgggtcccgtgcggaggtgctcctcgcagagttgtttctcgagcagcggcagttctcactacagcgccaggacgagtccggttcgtgttcgtccgcggagatctctctcatctcgctcggctgcgggaaatcgggctgaagcgactgagtccgcgatggagagagaaaaggaacagttccgtaagctctttattggtggcttaagctttgaaaccacagaagaaagtttgaggaactactacgaacaatggggaaagcttacagactgtgtggtaatgagggatcctgcaagcaaaagatcaagaggatttggttttgtaactttttcatccatggctgaggttgatgctgccatggctgcaagacctcattcaattgatgggagagtagttgagccaaaacgtgctgtagcaagagaggaatctggaaaaccaggggctcatgtaactgtgaagaagctgtttgttggcggaattaaagaagatactgaggaacatcaccttagagattactttgaggaatatggaaaaattgataccattgagataattactgataggcagtctggaaagaaaagaggctttggctttgttacttttgatgaccatgatcctgtggataaaatcgtattgcagaaataccataccatcaatggtcataatgcagaagtaagaaaggctttgtctagacaagaaatgcaggaagttcagagttctaggagtggaagaggaggcaactttggctttggggattcacgtggtggcggtggaaatttcggaccaggaccaggaagtaactttagaggaggatctgatggatatggcagtggacgtggatttggggatggctataatgggtatggaggaggacctggaggtggcaattttggaggtagccccggttatggaggaggaagaggaggatatggtggtggaggacctggatatggcaaccagggtgggggctacggaggtggttatgacaactatggaggaggaaattatggaagtggaaattacaatgattttggaaattataaccagcaaccttctaactacggtccaatgaagagtggaaactttggtggtagcaggaacatggggggaccatatggtggaggaaactatggtccaggaggcagtggaggaagtgggggttatggtgggaggagccgatactgagcttcttcctatttgccatgggcttcactgtataaataggagaggatgagagcccagaggtaacagaacagcttcaggttatcgaaataacaatgttaaggaaactcttatctcagtcatgcataaatatgcagtgatatggcagaagacaccagagcagatgcagagagccattttgtgaatggattggattatttaataacattaccttactgtggaggaaggattgtaaaaaaaaatgcctttgagacagtttcttagctttttaattgttgtttctttctagtggtctttgtaagagtgtagaagcattccttctttgataatgttaaatttgtaagtttcaggtgacatgtgaaaccttttttaagatttttctcaaagttttgaaaagctattagccaggatcatggtgtaataagacataacgtttttcctttaaaaaaatttaagtgcgtgtgtagagttaagaagctgttgtacatttatgatttaataaaataattctaaaggaaaaaa

SEQ ID NO: 2211 - protein, 341 aa, Homo sapiens
MEREKEQFRKLFIGGLSFETTEESLRNYYEQWGKLTDCVVMRDPASKRSRGFGFVTFSSMAEVDAAMAARPHSIDGRVVEPKRAVAREESGKPGAHVTVKKLFVGGIKEDTEEHHLRDYFEEYGKIDTIEIITDRQSGKKRGFGFVTFDDHDPVDKIVLQKYHTINGHNAEVRKALSRQEMQEVQSSRSGRGGNFGFGDSRGGGGNFGPGPGSNFRGGSDGYGSGRGFGDGYNGYGGGPGGGNFGGSPGYGGGRGGYGGGGPGYGNQGGGYGGGYDNYGGGNYGSGNYNDFGNYNQQPSNYGPMKSGNFGGSRNMGGPYGGGNYGPGGSGGSGGYGGRSRY

SEQ ID NO: 2212 - DNA, 1780 bp, Homo sapiens
agtagcagcagcgccgggtcccgtgcggaggtgctcctcgcagagttgtttctcgagcagcggcagttctcactacagcgccaggacgagtccggttcgtgttcgtccgcggagatctctctcatctcgctcggctgcgggaaatcgggctgaagcgactgagtccgcgatggagaaaactttagaaactgttcctttggagaggaaaaagagagaaaaggaacagttccgtaagctctttattggtggcttaagctttgaaaccacagaagaaagtttgaggaactactacgaacaatggggaaagcttacagactgtgtggtaatgagggatcctgcaagcaaaagatcaagaggatttggttttgtaactttttcatccatggctgaggttgatgctgccatggctgcaagacctcattcaattgatgggagagtagttgagccaaaacgtgctgtagcaagagaggaatctggaaaaccaggggctcatgtaactgtgaagaagctgtttgttggcggaattaaagaagatactgaggaacatcaccttagagattactttgaggaatatggaaaaattgataccattgagataattactgataggcagtctggaaagaaaagaggctttggctttgttacttttgatgaccatgatcctgtggataaaatcgtattgcagaaataccataccatcaatggtcataatgcagaagtaagaaaggctttgtctagacaagaaatgcaggaagttcagagttctaggagtggaagaggaggcaactttggctttggggattcacgtggtggcggtggaaatttcggaccaggaccaggaagtaactttagaggaggatctgatggatatggcagtggacgtggatttggggatggctataatgggtatggaggaggacctggaggtggcaattttggaggtagccccggttatggaggaggaagaggaggatatggtggtggaggacctggatatggcaaccagggtgggggctacggaggtggttatgacaactatggaggaggaaattatggaagtggaaattacaatgattttggaaattataaccagcaaccttctaactacggtccaatgaagagtggaaactttggtggtagcaggaacatggggggaccatatggtggaggaaactatggtccaggaggcagtggaggaagtgggggttatggtgggaggagccgatactgagcttcttcctatttgccatgggcttcactgtataaataggagaggatgagagcccagaggtaacagaacagcttcaggttatcgaaataacaatgttaaggaaactcttatctcagtcatgcataaatatgcagtgatatggcagaagacaccagagcagatgcagagagccattttgtgaatggattggattatttaataacattaccttactgtggaggaaggattgtaaaaaaaaatgcctttgagacagtttcttagctttttaattgttgtttctttctagtggtctttgtaagagtgtagaagcattccttctttgataatgttaaatttgtaagtttcaggtgacatgtgaaaccttttttaagatttttctcaaagttttgaaaagctattagccaggatcatggtgtaataagacataacgtttttcctttaaaaaaatttaagtgcgtgtgtagagttaagaagctgttgtacatttatgatttaataaaataattctaaaggaaaaaaaaaaaaaaaaaaaaaaaaaaaaaaaaaaaa

SEQ ID NO: 2213 - protein, 353 aa, Homo sapiens
MEKTLETVPLERKKREKEQFRKLFIGGLSFETTEESLRNYYEQWGKLTDCVVMRDPASKRSRGFGFVTFSSMAEVDAAMAARPHSIDGRVVEPKRAVAREESGKPGAHVTVKKLFVGGIKEDTEEHHLRDYFEEYGKIDTIEIITDRQSGKKRGFGFVTFDDHDPVDKIVLQKYHTINGHNAEVRKALSRQEMQEVQSSRSGRGGNFGFGDSRGGGGNFGPGPGSNFRGGSDGYGSGRGFGDGYNGYGGGPGGGNFGGSPGYGGGRGGYGGGGPGYGNQGGGYGGGYDNYGGGNYGSGNYNDFGNYNQQPSNYGPMKSGNFGGSRNMGGPYGGGNYGPGGSGGSGGYGGRSRY

SEQ ID NO: 2214 - DNA, 1837 bp, Homo sapiens
cgctgaggagactccggtcactgtcctcgccccgcctcccccttccctccccttggggaccaccgggcgccacgccgcgaacgtaatagctcttcaagtctgcaataaaaaatggcctccaacaaaactacattgcaaaaaatgggaaaaaaacagaatggaaagagtaaaaaagttgaagaggcagagcctgaagaatttgtcgtggaaaaagtactagatcgacgtgtagtgaatgggaaagtggaatatttcctgaagtggaagggatttacagatgctgacaatacttgggaacctgaagaaaatttagattgtccagaattgattgaagcgtttcttaactctcagaaagctggcaaagaaaaagatggtacaaaaagaaaatctttatctgacagtgaatctgatgacagcaaatcaaagaagaaaagagatgctgctgacaaaccaagaggatttgccagaggtcttgatcctgaaagaataattggtgccacagacagcagtggagaattgatgtttctcatgaaatggaaagattcagatgaggcagacttggtgctggcgaaagaggcaaatatgaagtgtcctcaaattgtaattgctttttatgaagagagactaacttggcattcttgtccagaagatgaagctcaataattgttcacattgttcttttatatatatttatatatatatataaaaattgggtcttagattttgatttactagtgtgacaaaataactacatcctaatgaaaatcaagtttgatatgtttgttttgaaagtagcgttggaagagttgttgggggttttttgcatccatagcactggttactttgaacaaataaataaaagctttctgtagttgcttcctttatcagaaaagaacatttgataccatggtatatcatttcctcttcattaaagaacagcttttctaaatgttgggggaaatgtccatagtcattactcagtcaaaacttgtgttctcatgagcctaaggaccattctagatttattacgtgttttttgtgtgtgtgtgtgtgtgtgtgtgtgtgtgtatccataaaatgcatatgtaaatttttttttgtttttaagcattcacccaaacaaaaaaatcacaggtaaacccatgtttctgagatgccattattccaagcaaaataagagataatcccttcaagttaaattgaaaattttcctgaaaccatacatttcaagtgaaataagtaattctagataggacaatttaaattggataattttaaagtgtctataattgcagtggtttatttgcaaaattcctaaaaggaaaaattttatcactgccatcacagcaggtttcctcatccagatgaggaaactagacaaatgctagtgtgttttaactagctaaacaaaactaagttaaatgaacatttaaaagtttccctagcgggccattccttagcaaaatgttggaatccctgttgctacattgactaaaaggtcatgatgaatggaatatgtaagacttggctcatagaaacctaatcagatggttagaggtgttggcagtttaggacctgctgtcataaatgtgtgaacaaccttttgtaacctaacctattgacctgcatgttttttctttaccccaattcattacatggaggctcaatcttgagtttgctttactggttcagcaaaagccaggaagaacaactttgtagtaatcaaaatgttatccaactgtatattgtttactttattgtaaatactggtgaacagtggttaataaatagttttatattcctttatgcaaaaaaaaaaaaaaaaaaaaaaaaaaaa

SEQ ID NO: 2215 - protein, 183 aa, Homo sapiens
MASNKTTLQKMGKKQNGKSKKVEEAEPEEFVVEKVLDRRVVNGKVEYFLKWKGFTDADNTWEPEENLDCPELIEAFLNSQKAGKEKDGTKRKSLSDSESDDSKSKKKRDAADKPRGFARGLDPERIIGATDSSGELMFLMKWKDSDEADLVLAKEANMKCPQIVIAFYEERLTWHSCPEDEAQ

SEQ ID NO: 2216 - DNA, 1851 bp, Homo sapiens
tccccccggcggccccgcgcgcagctcccggctccctcccccttcggatgtggcttgagctgtaggcgcggagggccggagacgctgcagacccgcgacccggagcagctcggaggcggtgaataatagctcttcaagtctgcaataaaaaatggcctccaacaaaactacattgcaaaaaatgggaaaaaaacagaatggaaagagtaaaaaagttgaagaggcagagcctgaagaatttgtcgtggaaaaagtactagatcgacgtgtagtgaatgggaaagtggaatatttcctgaagtggaagggatttacagatgctgacaatacttgggaacctgaagaaaatttagattgtccagaattgattgaagcgtttcttaactctcagaaagctggcaaagaaaaagatggtacaaaaagaaaatctttatctgacagtgaatctgatgacagcaaatcaaagaagaaaagagatgctgctgacaaaccaagaggatttgccagaggtcttgatcctgaaagaataattggtgccacagacagcagtggagaattgatgtttctcatgaaatggaaagattcagatgaggcagacttggtgctggcgaaagaggcaaatatgaagtgtcctcaaattgtaattgctttttatgaagagagactaacttggcattcttgtccagaagatgaagctcaataattgttcacattgttcttttatatatatttatatatatatataaaaattgggtcttagattttgatttactagtgtgacaaaataactacatcctaatgaaaatcaagtttgatatgtttgttttgaaagtagcgttggaagagttgttgggggttttttgcatccatagcactggttactttgaacaaataaataaaagctttctgtagttgcttcctttatcagaaaagaacatttgataccatggtatatcatttcctcttcattaaagaacagcttttctaaatgttgggggaaatgtccatagtcattactcagtcaaaacttgtgttctcatgagcctaaggaccattctagatttattacgtgttttttgtgtgtgtgtgtgtgtgtgtgtgtgtgtgtatccataaaatgcatatgtaaatttttttttgtttttaagcattcacccaaacaaaaaaatcacaggtaaacccatgtttctgagatgccattattccaagcaaaataagagataatcccttcaagttaaattgaaaattttcctgaaaccatacatttcaagtgaaataagtaattctagataggacaatttaaattggataattttaaagtgtctataattgcagtggtttatttgcaaaattcctaaaaggaaaaattttatcactgccatcacagcaggtttcctcatccagatgaggaaactagacaaatgctagtgtgttttaactagctaaacaaaactaagttaaatgaacatttaaaagtttccctagcgggccattccttagcaaaatgttggaatccctgttgctacattgactaaaaggtcatgatgaatggaatatgtaagacttggctcatagaaacctaatcagatggttagaggtgttggcagtttaggacctgctgtcataaatgtgtgaacaaccttttgtaacctaacctattgacctgcatgttttttctttaccccaattcattacatggaggctcaatcttgagtttgctttactggttcagcaaaagccaggaagaacaactttgtagtaatcaaaatgttatccaactgtatattgtttactttattgtaaatactggtgaacagtggttaataaatagttttatattcctttatgcaa

SEQ ID NO: 2217 - protein, 183 aa, Homo sapiens; identical to SEQ ID NO: 2215

SEQ ID NO: 2218 - DNA, 2486 bp, Homo sapiens
gacggcaaatggcggacttcgacacctacgacgatcaggcctacagcagcttcggcagcggcagagggtcccgcggcagtgctggtggccatggttcccgtagccagaaggagttgcccacagagcccccctacacagcatacgtaggaaatctacctttcaatacggttcggggcgacatagatgctatctttaaggatctcagcataaggagtgtacggctagtcagagacaaagacacagataaatttaaaggattctgctatgtagaattcgatgaagtggattcccttaaggaagccttgacatacgatggtgcactgttgggcgatcggtcacttcgtgtggacattgcagaaggcagaaaacaagataaaggtggctttggattcagaaaaggtggaccagatgacagaggcttcagggatgacttcttagggggcaggggaggtagtcgcccaggcgaccggcgaacaggcccccccatgggcagccgcttcggagatggccctcccctcggtggatccaacatggatttcagagaacccacagaagaggaaagcgcacagagaccacgactccagcttaaacctcgaacagtcgcgacgcccctcaatcaagtagccaatcccaactctgctatcttcgggggtgccaggcctagagaggaagttgttcaaaaggagcaaaaatgagcctgcggttgggagggaatggggcgtggggggttagagcaggaccacagcctggtgagtccccgggcagccgtcctgcagccgccactcctgcgcctgccattggcctcctcacagcggaaacacagcttgtgagtgcatgtcagctgttaacaagtggtttttagtacattctgggctttgctgtatctatctagtgcctgtttgtgcgtttttttctttcttccgctgcttccccattttccttctgtcctttttctcctgctccttgttttcccagcagcacacggggttcctcggaggagcagaggtggccgccgtgggggggcgtttgggctgcggtgctgcgtcatttttcctttgctttctctttactttagacactggcccaactccaggagtttcctttcattccctcagtgcttctcttctgacctgcatgttgagttctgtattgctggggcttccaacaaaaaccagagtcactgacagagggaactgcagagaccttgttggtattcagctgtgatggatatagagaatcggaggcaccttgttttcacaactaggataaaaatatctgcagggtcctttccattcctatttagagggagtcctggctccatgaccccctcccgagtggactgtccaagcagataggctcacacgagaaacagtgaggctgaaagggggggccatggaagagcggtagggagtccacggagaagatgcagtgaatgcttgcatgcattcacacgtgtgtgtgtcccagctagttcactcctttcgccgtgcgtggtggaggctcgcctctctggccgggtgcagtgaacggccagcgggtttcttttctgctgggccaaggcgctttgggggtggagggggtggtgctggcgctgcactgggctgactgcggcgctgacacagcgtttccccccatccctgttgcctgtgtgttgtgtggatctgttcctagtataggcaacataatgagatactgtgcttcccacctccccttcagttcagagccaaaatgggtctagaatctggcactttactcatttcctttgataaattgtactgtgcagagctgtcaggaaccttcagatagcagtagaggactgcagctgcctaggtctgcggccacatcttggggacacactggattgttcccatgtgcagggttcagcacttacgtgggagtgctaggggttaggcttttgagcttgaacgcctgcgtgtgaacagatgaaaaatccttcagtacccaagtcccagtctgtcctatggggagcagtttgggggcggccggcagcaggagcctgggaaagaggccctcgccaggtgatggcagggccagggtggcctggggcacccagcggaatgtgcttagtatttggtcaccagccgtcatcctgggcttttcctactgtgtcttgttacaaggcctcagcaatccacagaactctctctccttccttccacctgtcagcttctctgcttctgagataagaaccatttgtgtaacaccaacacttaacttcagaaagacatgcattatgtggtgtaatcaaacccgaggctttcagatgacctacttacatcttcaatgtggataagataaagaacaaaacacatgcatctaaactgctgggcaatccagttgacttttaaatgtaagaatggaattccaaacacttaacacattcagctatatgacagaaagtaaatctatggatatggtattttgtgaatgatcttttaaataaaagaaaaccttacgtaatattt

SEQ ID NO: 2219 - DNA, 890 bp, Homo sapiens
ggagcggagacggcaaatggcggacttcgacacctacgacgatcaggcctacagcagcttcggcagcggcagagggtcccgcggcagtgctggtggccatggttcccgtagccagaaggagttgcccacagagcccccctacacagcatacgtaggaaatctacctttcaatacggttcggggcgacatagatgctatctttaaggatctcagcataaggagtgtacggctagtcagagacaaagacacagataaatttaaaggattctgctatgtagaattcgatgaagtggattcccttaaggaagccttgacatacgatggtgcactgttgggcgatcggtcacttcgtgtggacattgcagaaggcagaaaacaagataaaggtggctttggattcagaaaaggtggaccagatgacagaggcttcagggatggccctcccctcggtggatccaacatggatttcagagaacccacagaagaggaaagcgcacagagaccacgactccagcttaaacctcgaacagtcgcgacgcccctcaatcaagtagccaatcccaactctgctatcttcgggggtgccaggcctagagaggaagttgttcaaaaggagcaaaaatgagcctgcggttgggagggaatggggcgtggggggttagagcaggaccacagcctggtgagtccccgggcagccgtcctgcagccgccactcctgcgcctgccattggcctcctcacagcggaaacacagcttgtgagtgcatgtcagctgttaacaagtggtttttagtacattctgggctttgctgtatctatctagtgcctgtttgtgcgtttttttctttcttccgctgcttccccattttccttccacctgtcagcttctct

SEQ ID NO: 2220 - DNA, 857 bp, Homo sapiens
ggagcggagacggcaaatggcggacttcgacacctacgacgatcaggcctacagcagcttcggcagcggcagagggtcccgcggcagtgctggtggccatggttcccgtagccagaaggagttgcccacagagcccccctacacagcatacgtaggaaatctacctttcaatacggttcggggcgacatagatgctatctttaaggatctcagcataaggagtgtacggctagtcagagacaaagacacagataaatttaaaggattctgctatgtagaattcgatgaagtggattcccttaaggaagccttgacatacgatggtgcactgttgggcgatcggtcacttcgtgtggacattgcagaaggcagaaaacaagataaaggtggctttggattcagaaaaggtggaccagatgacagaggcttcagggatgacttcttagggggcaggggaggtagtcgcccaggcgaccggcgaacaggcccccccatgggcagccgcttcggagatggccctcccctcggtggatccaacatggatttcagagaacccacagaagaggaaagcgcacagagaccacgactccagcttaaacctcgaacagtcgcgacgcccctcaatcaagtagccaatcccaactctgctatcttcgggggtgccaggcctagagaggaagttgttcaaaaggagcaaaaatgagcctgccattggcctcctcacagcggaaacacagcttgtgagtgcatgtcagctgttaacaagtggtttttagtacattctgggctttgctgtatctatctagtgcctgtttgtgcgtttttttctttcttccgctgcttccccattttccttc

SEQ ID NO: 2221 - protein, 228 aa, Homo sapiens
MADFDTYDDQAYSSFGSGRGSRGSAGGHGSRSQKELPTEPPYTAYVGNLPFNTVRGDIDAIFKDLSIRSVRLVRDKDTDKFKGFCYVEFDEVDSLKEALTYDGALLGDRSLRVDIAEGRKQDKGGFGFRKGGPDDRGFRDDFLGGRGGSRPGDRRTGPPMGSRFGDGPPLGGSNMDFREPTEEESAQRPRLQLKPRTVATPLNQVANPNSAIFGGARPREEVVQKEQK

SEQ ID NO: 2222 - DNA, 1971 bp, Homo sapiens
cgcgtcaggccgctcctctcggctccgcgctccttccctcgcgcgtgggcacccgcccccgagcggtgagagcgcgtgcgcgcgcgcccttctccgtgggcgagccagccagtcccgctgcacacgctcgcagtctgtgggccctccgggaggcggcggaggtcaccgcggggagaggggcgggcgcagcatggcagcctccttacggctcctcggagctgcctccggtctccggtactggagccggcggctgcggccggcagccggcagctttgcagcggtgtgttctaggtcagtggcttcaaagactccagttggattcattggactgggcaacatggggaatccaatggcaaaaaatctcatgaaacatggctatccacttattatttatgatgtgttccctgatgcctgcaaagagtttcaagatgcaggtgaacaggtagtatcttccccagcagatgttgctgaaaaagctgacagaattattacaatgctgcccaccagtatcaatgcaatagaagcttattccggagcaaatgggattctaaaaaaagtgaagaagggctcattattaatagattccagcactattgatcctgcagtttcaaaagaattggccaaagaagttgagaaaatgggagcagttttcatggatgcccctgtttctggtggtgtaggagctgcacgatctgggaacctcacgtttatggtgggaggagttgaagatgaatttgctgctgcccaagagttgctggggtgcatgggctccaacgtggtgtactgtggagctgttgggactgggcaggcggcaaagatctgcaacaacatgctgttagctattagtatgattggaactgctgaagctatgaatcttggaatcaggttagggcttgacccaaaactactggctaaaatcctaaatatgagctcaggacggtgttggtcaagtgacacttataatcctgtacctggagtgatggatggcgttccctcggctaataactatcagggtggatttggaacaacactcatggctaaggatctgggattggcacaagactctgctaccagcacaaagagcccaatccttcttggcagtctggcccatcagatctacaggatgatgtgtgcaaagggctactcaaagaaagacttctcatccgtgttccagttcctacgagaggaggagaccttctgagtgtgccctttggccacggacactgttgggaaccaaactctgtcttggagcctccttttagctcactccacaagtaaatggatttaatcaaaggtcacctatctgcttttgattgtctaggtcacagtaatccctaggatttttcaccgcttattctttttgtctttttaacaaacatattatccgaattttttttctgcaagccactgatagtctctgctaactagcttaattgacctttttacaaagtttgatccccaagcatcctcaactaaatcattgaatacttcaatcaggatattatctgctttactttacaaataaaaccaaatcttttgtcaacaggatgaaacccatcttaaaggaaagaaaaggaattggtgtgaagagagaagttagagaagggaaatgcagtgaattactatctgtgtccatcaggaagtttgtcctgttaaccaaatggttactgcactaccagggttactggtttattttccagggagctgataaagcaggagaactgttgctgcatgttttctatttggactccgtcacaatatggtaggatatccctcaccaactcccgacactcagcagacttgtttttatatttttttctttcttgttcattcttactacgtattttttgacttaagaatgacatctttagatgcatttcagagccaatgatgatatttgctttagataattattatattattataaatatagccatattattttgaattcaaataaatttctatactggt

SEQ ID NO: 2223 - protein, 336 aa, Homo sapiens
MAASLRLLGAASGLRYWSRRLRPAAGSFAAVCSRSVASKTPVGFIGLGNMGNPMAKNLMKHGYPLIIYDVFPDACKEFQDAGEQVVSSPADVAEKADRIITMLPTSINAIEAYSGANGILKKVKKGSLLIDSSTIDPAVSKELAKEVEKMGAVFMDAPVSGGVGAARSGNLTFMVGGVEDEFAAAQELLGCMGSNVVYCGAVGTGQAAKICNNMLLAISMIGTAEAMNLGIRLGLDPKLLAKILNMSSGRCWSSDTYNPVPGVMDGVPSANNYQGGFGTTLMAKDLGLAQDSATSTKSPILLGSLAHQIYRMMCAKGYSKKDFSSVFQFLREEETF

SEQ ID NO: 2224 - DNA, 2956 bp, Homo sapiens
gacgcaaggcctactgtcggctgggaggggaggtgtagccggtctttgggggtaggcggtagtggcggaagaggttcggcggctgatggcggatcaggatcggaagcctgcgtaactttctcccttgatccgggagtctttccactggattcacaatgacatcctttcaagaagtcccattgcagacttccaactttgcccatgtcatctttcaaaatgtggccaagagttaccttcctaatgcacacctggaatgtcattacaccttaactccatatattcatccacatccaaaagattgggttggtatattcaaggttggatggagtactgctcgtgattattacacgtttttatggtcccctatgcctgaacattatgtggaaggatcaacagtcaattgtgtactagcattccaaggatattaccttccaaatgatgatggagaattttatcagttctgttacgttacccataagggtgaaattcgtggagcaagtacacctttccagtttcgagcttcttctccagttgaagagctgcttactatggaagatgaaggaaattctgacatgttagtggtgaccacaaaagcaggccttcttgagttgaaaattgagaaaaccatgaaagaaaaagaagaactgttaaagttaattgccgttctggaaaaagaaacagcacaacttcgagaacaagttgggagaatggaaagagaacttaaccatgagaaagaaagatgtgaccaactgcaagcagaacaaaagggtcttactgaagtaacacaaagcttaaaaatggaaaatgaagagtttaagaagaggttcagtgatgctacatccaaagcccatcagcttgaggaagatattgtgtcagtaacacataaagcaattgaaaaagaaaccgaattagacagtttaaaggacaaactcaagaaggcacaacatgaaagagaacaacttgaatgtcagttgaagacagagaaggatgaaaaggaactttataaggtacatttgaagaatacagaaatagaaaataccaagcttatgtcagaggtccagactttaaaaaatttagatgggaacaaagaaagcgtgattactcatttcaaagaagagattggcaggctgcagttatgtttggctgaaaaggaaaatctgcaaagaactttcctgcttacaacctcaagtaaagaagatacttgttttttaaaggagcaacttcgtaaagcagaggaacaggttcaggcaactcggcaagaagttgtctttctggctaaagaactcagtgatgctgtcaacgtacgagacagaacgatggcagacctgcatactgcacgcttggaaaacgagaaagtgaaaaagcagttagctgatgcagtggcagaacttaaactaaatgctatgaaaaaagatcaggacaagactgatacactggaacacgaactaagaagagaagttgaagatctgaaactccgtcttcagatggctgcagaccattataaagaaaaatttaaggaatgccaaaggctccaaaaacaaataaacaaactttcagatcaatcagctaataataataatgtcttcacaaagaaaacggggaatcagcagaaagtgaatgatgcttcagtaaacacagacccagccacttctgcctctactgtagatgtaaagccatcaccttctgcagcagaggcagattttgacatagtaacaaaggggcaagtctgtgaaatgaccaaagaaattgctgacaaaacagaaaagtataataaatgtaaacaactcttgcaggatgagaaagcaaaatgcaataaatatgctgatgaacttgcaaaaatggagctgaaatggaaagaacaagtgaaaattgctgaaaatgtaaaacttgaactagctgaagtacaggacaattataaagaacttaaaaggagtctagaaaatccagcagaaaggaaaatggaaggtcagaattcccagagtcctcaatgtttcaaaacatgctcagagcaaaatggttatgttctcacattgtcaaatgcacaaccagttctgcaatatggtaatccttatgcatctcaggaaacaagagatggagcagatggtgctttttacccagatgaaatacaaaggccacctgtcagagtcccctcttggggactggaagacaatgttgtctgcagccagcctgctcgaaactttagtcggcctgatggcttagaggactctgaggatagcaaagaagatgagaatgtgcctactgctcctgatcctccaagtcaacatttacgtgggcatgggacaggcttttgctttgattccagctttgatgttcacaagaagtgtcccctctgtgagttaatgtttcctcctaactatgatcagagcaaatttgaagaacatgttgaaagtcactggaaggtgtgcccgatgtgcagcgagcagttccctcctgactatgaccagcaggtgtttgaaaggcatgtgcagacccattttgatcagaatgttctaaattttgactagttactttttattatgagttaatatagtttagcagtaaaaaaaaaaaaaaaaaccacacctaaaatagaccactgaggagaccatagagcggatgctttcatgcaccctttactgcactttctgaccaggagctactttgagtttggtgttactaggatcagggtcagtctttggcttatcaataaattttaatctctgttaatcttacctgctttaaaaaaaagttcttgtgtgttcgtatctttatttattccctagtttgcagaactgtctgaataaaggatacaaggattatttcaatgttactgcactgaaaaacgtgtatgtattagtgtgctagattatttagcagaatattcacaagtttctgttgaccttgttgattgagcatgactactaaatattatgtaataaaaagcatttgtcataac

SEQ ID NO: 2225 - DNA, 543 bp, Homo sapiens
atggagaagcagagagggaagtgcagagacaggtcacccaggcgcctggaaactgcctctatggccttcacgggaaacggcctctttctactccggatcccagactgtgtttctttgaaactgaccgtcagaggagagcggctggaggcggacagacgtctgcagtgggaggcgctccaggcgttccaggcagtgtcctgccggcgagtcacccgcgaccgcgagtcacctcaccaagccctgaattgggacaggagacgagacgtgtcgacgagctgcggagttcctcgcttctctgggccctgccagctcacagccaaggtgcaccagagcctccgtcaccgcccctacagagcacgtacttttatcacacgaactatgactcagacaccacaaacccagaccaggcctccaggtcagaagttgactcccctgaggcctgtggtaggagaatgtggtctggaaaatgaggtgtcactggtgatcagacatcatcacttttctagtgactgtcagcttagttttgtcctacagttgtcttga

SEQ ID NO: 2226 - DNA, 6702 bp, Homo sapiens
ccccgactagcccgacagtccccgactagcccgacagccccagcaggatctgcatcgtcatcgagccggcccagcttctgaagggagatgtcatggtgaaatgctaccacaagaaataccgctcggccacccgtgacgtcattttccgcctgcagtttcacactggggctgtgcagggctacgggctggtgtttgggaaggaggatctggacaatgccagcaaagatgaccgttttcctgactatgggaaggttgaattagtcttctctgccacgcctgagaagattcaagggtccgaacacttgtacaacgaccacggtgtgattgtggactacaacacaacagacccactgatacgctgggactcgtacgagaacctcagtgcagatggagaagtgctacacacgcagggccctgtcgatggcagcctttacgcgaaggtgaggaagaaaagctcctcggatcctggcatcccaggtggcccccaggcaatcccggccaccaacagcccagaccacagtgaccacaccttgtctgtcagcagtgactccggccactctacagcctctgccaggacggataagacggaagagcgcctggccccaggaaccaggaggggcctgagtgcccaggagaaggcagagttggaccagctgctcagtggctttggcctggaagatcctggaagctccctcaaggaaatgactgatgctcgaagcaagtacagtgggacccgccacgtggtgccagcccaggttcacgtgaatggagacgctgctctgaaggatcgggagacagacattctggatgacgagatgccccaccacgacctgcacagtgtggacagccttgggaccctgtcctcctcggaagggcctcagtcggcccacctgggtcccttcacctgccacaagagcagccagaactcactcctatctgacggttttggcagcaacgttggtgaagatccgcagggcaccctcgttccggacctgggccttggcatggacggcccctatgagcgggagcggacttttgggagtcgagagcccaagcagccccagcccctgctgagaaagccctcagtgtccgcccagatgcaggcctatgggcagagcagctactccacacagacctgggtgcgccagcagcagatggttgtagctcaccagtatagcttcgccccagatggggaggcccggctggtgagccgctgccctgcagacaatcctggcctcgtccaggcccagcccagagtgccactcacccccacccgagggaccagcagtagggtggctgtccagaggggtgtaggcagtgggccacatccccctgacacacagcagccctctcccagcaaagcgttcaaacccaggtttccaggagaccaggttgtgaatggagccggcccagagctgagcacaggcccctccccaggctcgcccaccctggacatcgaccagtccatcgagcagctcaacaggctgatcctggagctggatcccaccttcgagcccatccctacccacatgaacgccctcggtagccaggccaatggctctgtgtctccagacagcgtgggaggtgggctccgggcaagcagcaggctgcctgacacaggagagggccccagcagggccaccgggcggcaaggctcctctgctgaacagcccctgggcgggagactcaggaagctgagcctggggcagtacgacaacgatgctggggggcagctgcccttctccaaatgtgcatggggaaaggctggtgtggactatgccccaaacctgccgccattcccctcaccagcggacgtcaaagagacgatgacccctggctatccccaggacctcgatattatcgatggcagaattttaagtagcaaggagtccatgtgttcaactccagcatttcctgtgtctccagagacaccgtatgtgaaaacagcgctgcgccatcctccgttcagcccacctgagcccccgctgagcagcccagccagtcagcacaaaggaggacgtgaaccacgaagctgccctgagacgctcactcacgctgtggggatgtcagagagccccatcggacccaaatccacgatgctccgggctgatgcgtcctcgacgccctcctttcagcaggcttttgcttcttcctgcaccatttccagcaacggccctgggcagaggagagagagctcctcttctgcagaacgccagtgggtggagagcagccccaagcccatggtttccctgctggggagcggccggcccaccggaagtcccctcagcgctgagttctccggtaccaggaaggactccccagtgctgtcctgcttcccgccgtcagagctccaggctcctttccacagccatgagctgtccctagcagagccaccggactccctggcgcctcccagcagccaggccttcctgggcttcggcaccgccccagtgggaagtggccttccgcccgaggaggacctgggggccttgctggccaattctcatggagcgtcaccgacccccagcatcccgctgacagcgacaggggctgccgacaatggcttcctgtcccacaactttctcacggtggcgcctggacacagcagccaccacagtccaggcctgcagggccagggtgtgaccctgcccgggcagccacccctccctgagaagaagcgggcctcggagggggatcgttctttgggctcagtctctccctcctccagtggcttctccagcccgcacagcgggagcaccatcagtatccccttcccaaatgtccttcccgacttttccaaggcttcagaagcggcctcacctctgccagatagtccaggtgataaacttgtgatcgtgaaatttgttcaagacacttccaagttctggtacaaggcggatatttcaagagaacaagccatcgccatgttgaaggacaaggagccgggctcattcattgttcgagacagccattccttccgaggggcctatggcctggccatgaaggtggccacgcccccaccttcagtcctgcagctgaacaagaaagctggagatttggccaatgaactcgtccggcactttttgatcgagtgtaccccgaagggagtgcggttgaaagggtgctcgaatgaaccatatttcgggagcctgacggccttggtgtgccagcattccatcacgcccttggccttgccgtgcaagctgcttatcccagagagagatccattggaggaaatagcagaaagttctccccagacggcagccaattcagcagctgagctgttgaagcagggggcagcctgcaacgtgtggtacttgaactctgtggagatggagtccctcaccggccaccaggcgatccagaaggccctgagcatcaccctggtccaggagcctccacctgtgtccacagttgtgcacttcaaggtgtcagcccagggcatcaccctgacagacaatcagaggaagctcttcttccggaggcattaccccgtgaacagtgtgattttctgtgccttggacccacaagacaggaagtggatcaaagatggcccttcctcaaaagtctttggatttgtggcccggaagcagggcagtgccacggataatgtgtgccacctgtttgcagagcatgaccctgagcagcctgccagtgccattgtcaacttcgtatcaaaggtcatgattggttccccaaagaaggtctgagaactcccctccctccctggacccaccgatgcctctcgaagccctggagacagccgttgggtgagggtggggcccccactttttaccaaactagtaaacctgacattccaggcccatgaggggaaagaggatcttccagctctgcaaaaacaagaacaaacaacatcaccgtgaattggcctttcctgaaagtgacttatctgacacatctctgtagccacatgctttttgggtagaagaagctgggcatgggtgcaccccaccccctagggtccccatgggaaagggacatgcaaggaaacagcacagaacacgaggtggtccccatgtccctggcacactagcattccgggggatgaggaatccccagcccttgaggcagaggtgccgagtgactgccatgcttcgcccgtccgcatgggcgcttctgtccagctgcacccgaggccgggggtttccctcacctcggtcttcccaagatggagatgctaacgaaactgagaagggggcgtatgtttgacgaaggtttgtgcaagtcaggcccttctggaacacagcagggcctacaacgaggggcctttgcgatgggctgtgaggatgggggtggtgggaagaattggccacgttagagaccccatgccaccccaccatggtgagtgctctgtgcctcctgctcacctgtggtgagctgggcgagctgggcgagctgggcgagctgggctggggagagcctgtgaggaccgagaggagaaatgagaagaaggaacaaaaatattatttctatgtaatttatattttacttatgccaaattatttatgataatttgccattgctatactgtaccagtgtcaaatgctgcagcctgccaagctgtgattttgtgaggcttgtccctatgtaggatgcaccgcaggcccctggccactgaaagagtgtgcagtggactgtgggtctcccatatgcggtgccgcccaaaggtggctttgcctcaagcaacctaccctgatgttttactcattggaatgtttttccccgattgtggatgacttcttttctgatggagagagtccaggagggatggaaaactcctggatttaagctcagcatcccccacatgggcttttcgatcatcttcaggcctgaagctgcacgacctgaagttcgcctgcatttatcagccctctttgtgctgctccttgccaccttggggttcctgctggggaccatgtgtggttgtggcatgtgtgagcagaagggaggatgaggaaaaagagaagaaaccccggtactgacaagctgtttttgagtgccactgtttgccatcatctaagccactgaatcaagtgtatttcaggcttatttcaacattccaatgccctggttttcctgcttgaatctgttcgtggtcaaaggtttgggggaatttgtgaccctggaacatccccagagtgaaagatggagctgggccacatcagaataaggccttggccccatcctctcacagcctaggtgctctgcaggcatgctgactgtcctgattgcgatccagcccgaaattccctcctctgctttcaaaagtcaaatcccccattcttaggccacactggtgtcacaagctcctgtcagggagctggggtttgggaatgtgctttgtgaactctgctttaaagtgaggggccgaggaaaacttagaaacaggcagagttggaagcagccaaatcacagtgggtgttgtgtgtgtgtgcgtgtgtgcatgcgtgcgtgtatgcgtgtgtgaaagcaggtggaccattccactttttagctcctattgatgcaccaaaccaagtgcctcatttctgtgccaaatgtttgccttggtcgttgtggacctccttctctaacttgcggtggcatgactgtcaggaggtgctggcattttcagcagatcctcatgtgttgaccctgatgtctttagcagaggcctctagcatctcggtttttcatccactgcaggaatgtggccacagggagcagaggtttgtactttccccaagaggtcctcatcctgagacggtctctacccatgtttaacccaaagagtgcaggccaggttccttatccttctgatgaaggatgagagagctcatttagaagtcagagcaaactagggtctcagtattgagaaacgcagcctgccagggaatcacagagacatcggggtgcccgcgatggccctcatgaagccatgcctcgacggcattcaggaagccctgcaaacgtgctttttgaactcattggccaggtgtgatttttacacaaggtaaacgtggtcaagggcatcggggaatttgctccaagcagatagctccctctgaggaaccaaaggaagcaagtttccacgatttctgaagagctggtataggaagtttctttcttccttttgtgttacatgtgcattaaacagaacaagctgtgtgtcatcacagattgtactgtgggctcagaaaccgtgagagagcccccaccgtggacaccggctctagggccacaggaaaaggaacgtttccaggcattttgtctccagggctcccgctggacaggcacgtactgccctggggagtaaatgcggagagttcacgaactgtgcccaacgcatgttatagccagggtcctactaactactcagtaaaagaacgtattgttgtattcctccagtgttaagctatagccatgttaaaagtcactgtgcatttattctcagcatcaaataccttgtaacgtcttctctgccttgttagtgcatatttttacttttctgatactgtaaagaatatatccagtatgtaaatgaatgttctataaatcttttgtatagtcattttctctgctccttaaatatcatctctattcagagtataataaaattatgaacttggtaaaaaaaaaaaaaaaaaaaaaaaaaaaaaaaaaaaaaaaaaaaaaaaaaaaaaaaaaaaaaaaaaaaaaaaa

SEQ ID NO: 2227 - protein, 1205 aa, Homo sapiens
MVKCYHKKYRSATRDVIFRLQFHTGAVQGYGLVFGKEDLDNASKDDRFPDYGKVELVFSATPEKIQGSEHLYNDHGVIVDYNTTDPLIRWDSYENLSADGEVLHTQGPVDGSLYAKVRKKSSSDPGIPGGPQAIPATNSPDHSDHTLSVSSDSGHSTASARTDKTEERLAPGTRRGLSAQEKAELDQLLSGFGLEDPGSSLKEMTDARSKYSGTRHVVPAQVHVNGDAALKDRETDILDDEMPHHDLHSVDSLGTLSSSEGPQSAHLGPFTCHKSSQNSLLSDGFGSNVGEDPQGTLVPDLGLGMDGPYERERTFGSREPKQPQPLLRKPSVSAQMQAYGQSSYSTQTWVRQQQMVVAHQYSFAPDGEARLVSRCPADNPGLVQAQPRVPLTPTRGTSSRVAVQRGVGSGPHPPDTQQPSPSKAFKPRFPGDQVVNGAGPELSTGPSPGSPTLDIDQSIEQLNRLILELDPTFEPIPTHMNALGSQANGSVSPDSVGGGLRASSRLPDTGEGPSRATGRQGSSAEQPLGGRLRKLSLGQYDNDAGGQLPFSKCAWGKAGVDYAPNLPPFPSPADVKETMTPGYPQDLDIIDGRILSSKESMCSTPAFPVSPETPYVKTALRHPPFSPPEPPLSSPASQHKGGREPRSCPETLTHAVGMSESPIGPKSTMLRADASSTPSFQQAFASSCTISSNGPGQRRESSSSAERQWVESSPKPMVSLLGSGRPTGSPLSAEFSGTRKDSPVLSCFPPSELQAPFHSHELSLAEPPDSLAPPSSQAFLGFGTAPVGSGLPPEEDLGALLANSHGASPTPSIPLTATGAADNGFLSHNFLTVAPGHSSHHSPGLQGQGVTLPGQPPLPEKKRASEGDRSLGSVSPSSSGFSSPHSGSTISIPFPNVLPDFSKASEAASPLPDSPGDKLVIVKFVQDTSKFWYKADISREQAIAMLKDKEPGSFIVRDSHSFRGAYGLAMKVATPPPSVLQLNKKAGDLANELVRHFLIECTPKGVRLKGCSNEPYFGSLTALVCQHSITPLALPCKLLIPERDPLEEIAESSPQTAANSAAELLKQGAACNVWYLNSVEMESLTGHQAIQKALSITLVQEPPPVSTVVHFKVSAQGITLTDNQRKLFFRRHYPVNSVIFCALDPQDRKWIKDGPSSKVFGFVARKQGSATDNVCHLFAEHDPEQPASAIVNFVSKVMIGSPKKV

SEQ ID NO: 2228 - DNA, 2506 bp, Homo sapiens
ggcacgaggcacagcttcgcgccgtgtactgtcgccccatccctgcgcgcccagcctgccaagcagcgtgccccggttgcaggcgtcatgcagcgggcgcgacccacgctctgggccgctgcgctgactctgctggtgctgctccgcgggccgccggtggcgcgggctggcgcgagctcggggggcttgggtcccgtggtgcgctgcgagccgtgcgacgcgcgtgcactggcccagtgcgcgcctccgcccgccgtgtgcgcggagctggtgcgcgagccgggctgcggctgctgcctgacgtgcgcactgagcgagggccagccgtgcggcatctacaccgagcgctgtggctccggccttcgctgccagccgtcgcccgacgaggcgcgaccgctgcaggcgctgctggacggccgcgggctctgcgtcaacgctagtgccgtcagccgcctgcgcgcctacctgctgccagcgccgccagctccaggaaatgctagtgagtcggaggaagaccgcagcgccggcagtgtggagagcccgtccgtctccagcacgcaccgggtgtctgatcccaagttccaccccctccattcaaagataatcatcatcaagaaagggcatgctaaagacagccagcgctacaaagttgactacgagtctcagagcacagatacccagaacttctcctccgagtccaagcgggagacagaatatggtccctgccgtagagaaatggaagacacactgaatcacctgaagttcctcaatgtgctgagtcccaggggtgtacacattcccaactgtgacaagaagggattttataagaaaaagcagtgtcgcccttccaaaggcaggaagcggggcttctgctggtgtgtggataagtatgggcagcctctcccaggctacaccaccaaggggaaggaggacgtgcactgctacagcatgcagagcaagtagacgcctgccgcaaggttaatgtggagctcaaatatgccttattttgcacaaaagactgccaaggacatgaccagcagctggctacagcctcgatttatatttctgtttgtggtgaactgattttttttaaaccaaagtttagaaagaggtttttgaaatgcctatggtttctttgaatggtaaacttgagcatcttttcactttccagtagtcagcaaagagcagtttgaattttcttgtcgcttcctatcaaaatattcagagactcgagcacagcacccagacttcatgcgcccgtggaatgctcaccacatgttggtcgaagcggccgaccactgactttgtgacttaggcggctgtgttgcctatgtagagaacacgcttcacccccactccccgtacagtgcgcacaggctttatcgagaataggaaaacctttaaaccccggtcatccggacatcccaacgcatgctcctggagctcacagccttctgtggtgtcatttctgaaacaagggcgtggatccctcaaccaagaagaatgtttatgtcttcaagtgacctgtactgcttggggactattggagaaaataaggtggagtcctacttgtttaaaaaatatgtatctaagaatgttctagggcactctgggaacctataaaggcaggtatttcgggccctcctcttcaggaatcttcctgaagacatggcccagtcgaaggcccaggatggcttttgctgcggccccgtggggtaggagggacagagagacagggagagtcagcctccacattcagaggcatcacaagtaatgtcacaattcttcggatgactgcagaaaatagtgttttgtagttcaacaactcaagacgaagcttatttctgaggataagctctttaaaggcaaagctttattttcatctctcatcttttgtcctccttagcacaatgtaaaaaagaatagtaatatcagaacaggaaggaggaatggcttgctggggagcccatccaggacactgggagcacatagagattcacccatgtttgttgaacttagagtcattctcatgcttttctttataattcacacatatatgcagagaagatatgttcttgttaacattgtatacaacatagccccaaatatagtaagatctatactagataatcctagatgaaatgttagagatgctatttgatacaactgtggccatgactgaggaaaggagctcacgcccagagactgggctgctctcccggaggccaaacccaagaaggtctggcaaagtcaggctcagggagactctgccctgctgcagacctcggtgtggacacacgctgcatagagctctccttgaaaacagaggggtctcaagacattctgcctacctattagcttttctttatttttttaactttttggggggaaaagtatttttgagaagtttgtcttgcaatgtatttataaatagtaaataaagtttttaccattaaaaaaataaaaaaaaaaaaaaaaaaaaaaaaaaaaaaaaaaaaaaaaaaaa

SEQ ID NO: 2229 - protein, 291 aa, Homo sapiens
MQRARPTLWAAALTLLVLLRGPPVARAGASSGGLGPVVRCEPCDARALAQCAPPPAVCAELVREPGCGCCLTCALSEGQPCGIYTERCGSGLRCQPSPDEARPLQALLDGRGLCVNASAVSRLRAYLLPAPPAPGNASESEEDRSAGSVESPSVSSTHRVSDPKFHPLHSKIIIIKKGHAKDSQRYKVDYESQSTDTQNFSSESKRETEYGPCRREMEDTLNHLKFLNVLSPRGVHIPNCDKKGFYKKKQCRPSKGRKRGFCWCVDKYGQPLPGYTTKGKEDVHCYSMQSK

SEQ ID NO: 2230 - DNA, 4739 bp, Homo sapiens
gcgggtgttcgcctacgtcactggggcgctacagtacctggagctgggcagtcttctcatcagagtggggactaataacagtgacctccccgccaggtcctgtgtgttgccggctgaagaaggatgatgattattccccaccttctgagagacaaagaccaacgagccaccacagccaccagtcccagaacccgccaatgctggggaacggaaaatgagggagttcaactctggccctcacaatccagtggaggagacgaaactcatctgcctctgtccctctgggcacgcttcatgccaggtgcatctgtggacaggggccatgctcctgggcttccaaagttggagaaagctgccaggctcagagccacctaagctgaagattcccttgagaacaagtactgtcctgtggtttcatggcctttcttccatttgtggttcttgtgaagtggaatttaaatgacatcttatcaagatggataaaccctagtttcccagtgctggaatatagaaaatggatggacaagtaaatcccactcatcacccatagtccaggcatggggacctcaacacacctgagccccagacatcacctttcattctggacctaccatgaaagacttctgaatccaggaagagagactgactgggcaacatgttgttcagaaacaggaccttgccctgtcatttaggatggagttcagtggtccaatcatggctcattgtagcctcaaactcccaggctcaagcaatcctaccatgtcagccttcccagtagctgggactacagctggatctaccatgaaagacttctgaatccaggaagagagactgactgggcaacatgttattcagggtctccctctcttgtccaaggctggagtgtagtagtgctatcacagctgactgcagcctcaaccttccaggctgaagcgatcctcccatctcaacctcccacgtggctgagactataggtgcttgccactatgcccaactaatatttggaattttcctatacgtggattccagaggggtgacagcgaaacgtgagaccatccagttgcagaaaaacaagcttaacacgcccactgattctacattatgcccctacctcccggcagcctctccaggcccagaactttctccagtcagcctccacagaccaagctcatgactcacaatggcctatttaggcccataccctacctcacggcagtctctgcagatgaggctactgcctcacaacagcctccacaggcacagctccaccgttacaatggcctctttagacccagctcctgcctcccagccttctctccaggccctgagctttctcaagtcgacctcaccaggcccagctcatgcttcttggcagcctctccaggcccagctcctgcatcttggcagcctctccaggcccagcctctgcctcctgtcagcctctacagtcccaacatctgcctcacagcagattcttcaggcccagtatctgcctcactgtggaccacccaagccaagctcccaacctttcagcagcttctacacacccagctcctgccacccagtggcctctttaggccaagctcatgcctcacaagggcctttccaggcccaacttttgtctcatggcaaccttccctggccacattcctgcctgtctcccagcagcctagacaggcccaggtcttgcctcacactggcctgtctacatccagctcttgcctcacggtggcctctccaggcccagctcctgtcccaggacgtcatctccaggcccaaaacttcctcaagtcagcctctctagtcccaactgctgcctcctggtggcctatgaaggcccaaaatctcctcaagttgacctctccaggcccagctcctgcctcctgtcagcgtctacaggcccaacctctgcctcatgggggcttctccaggcccagctcttcctctgggctgagtctacaggcacaactgctgcctcacaacagccttttttggcccagttcctgtccagctcacagcgaccaatgtaggcccaaaacttcctcaagtcaaactctccaggcctgccttcttcctggtggcatgaacaggcccagctttgacttgagaacagcctctgcaggccctgctcttgcctcccaggggcttctccaggcccagctcttgcctcatggcggctgccccaggccaagtttctgcctgcctgccagcagcctcaacaggcacagctcttccctcacagtggcccatttaggcccaactcatgactgtcgggccatttccaggcctagtgcctgcctcctggctgactcttgaagcccaaaacttcctcaaatcagccttttgcccaacttctgtctactgtcggactctacaggccagcctctgcctcacagtggaccctccagacccagatggtgtctcactgtggcatcctcaggcgaagctcctgcctttcagcagcctctacgggcccagctcctgccttgcaatggcctctttaggccaagctcatgccccacggcgacttttccaggcacagcttttgccttttgcagcctgtccaggcccagaatgtccttaactcggcgtctccaggacgagctcatcctcccagtgcgtctacaggcccgtctcctgcctcacaacaacctcctttggtccaactcctgctgagctgcttggcagcctctgtaggccacagagttcttaaagtaaagctttccaggcccaccttcggcctcccggcagcctcagcaatcaaactattccctcactgcggccaccgaaagccaagtttctccctgcctcacagcatcctccgaaaactgagcatttgcctcacggtggcctccccaggccacgaatctgcctgcctcccaggcagctgctgcctcacaatggtctctttaggcccagctcttgctaaaagacagactctccaggcacagctcttgcctcctggcaggctctgcaggcccaaattctccaaaagttggcctctcctaactcagctcctgcctcatgtcggcctacacaggcccagactcttaccacacagtagaccctccaggcccaccacttgcctgagcatagcctcctaaggccaagctcctgcctttcggcagcctctacaggcccagctcctgcctcgcaattgcctttgtaggccaagatcatgccgcgaagtggcctttcctagcctaacttttgctttttgacgcatactccggtcccaaaacttcctccagtcagccagtccaggccaagctcttcctcccaaaggcttctgcaggccaaaatcgtcctgaagtcaccctctgcaggcccagctcctgcctccaagtgctgtgtaggccaagctaatgcctcacagcacactttccaggctgagcatttccttttgtgcatcctctccaagccctgaacttactccagttggcctctccagaccaagctctccctcccagtggcctctacaggccaaaattgtcctcaagtcagcctctccagggccaactcctagctaccggtggcttctgcaggccaaaatcgacctcaagtcagcctcttcacacccagctcttgtctgtaagtggcctctgcaggagcaaaactgcctcaagtcggcctctccaggcccagcctcctgcttcccgagggcatgtacaggcccagcctctgcctcacagcagactctccatgcccagctcttccctgtctgctgcctctccagtccaaagctgcgcctgcctttcggcaacttgtacgggcccagctcctccctcacggtggcctcttttcgcccaactcatgcctcttgcaacctgcccaagtgtcagctcctgcctcacactggcctcttgaggctcagctcatgcctctcgtggcctcaacgggcccagcccctgcctgtcggcggcctctacaggcccagcctctacctcacagtgggctctccaggcccacctctttctcaccgtggcctcctggggcaatgctccccgctctcgggagcctctgcgggcccagctcctgcctcccagtggcctctgtaggccaagcccgtgcctcagggcagcctttccaggcctagcgtttgctgctttgcatcctctccaggctctggacttcctccagtcggcctctccaggcccagctcttcctcccggcggcctctgcaggcccagactgttgtcaagtcggcctgtccagggccagctcctgcctcccggtgccctctgcaggcccaagtcgtcctcaagtcggcctccccaggcccagctccggcctctcggcggccgctccaggtgcaaaagttcctcgagtcagcctctccaggcccagctcctcctgcctcccagcggcctctttcggcccagcccagctcatgcctcccggctgcgtctctaggcccgactccggcctcccaacaacctctttggactcagctcctgcctctcgaaggcctgcacgggcccagcctcagcctcacagcggactctccacgcccagctagctctcgcctcactgcggcctccccagtcgaaagctcctgcctttcggccgctttggcaggcccagctcctgcctgccagtggcctctttaggcccagctcattcctcacaacggcctttccaggccccgtttttcccttccggcagccttttggcctctaatttgtttatcttttgtgtataaatcccaaaatatggaattttggaatattgctaccatt

SEQ ID NO: 2231 - protein, 389 aa, Homo sapiens
MLLPPGSLSRPRTFSSQPLQTKLMTHNGLFRPIPYLTAVSADEPTASQQPPQAQLHRYNGLFRPSSCLPAFSPGPELSQVDLTRPSSCFFAASPGPAPASWWPLQAQPLPPVGLYSPNICLTADSSGPASASLWTPQAKLPTFQQLLHTQLLPPSGLSRPSSCFTRAFAGPTFVSWQPSLARFLLVSQQPRQAQVLPHTGLSTSSSCLTLASPGPTPVPGRHLRAQNLLKSDSLVPTAAFWWPMKAQNLLKLTSPGPAPASCQHLQAQPLPHGVFSRPTSSSWLGLQAQLLPHNSLFWPSSCPAHGGQCRPKTSSSQTLQAHLLLPGGMNRPSFDLRTASAGPALASQGLFPGPALASWQLPEAKFLLACQQPQQAQLLPHSGPFSPNS

SEQ ID NO: 2232 - DNA, 4432 bp, Homo sapiens
gggaagcgcgccgcgcacctcatggttccggggacagttagggcggcggatggaggtcagcggtggtgctcgctgcggtttggaatcacttgctaggagtcttgtctctctgccacccaggacatcatggcagctcacctggtaaagcgatgcacgtgcctcctgagagaagctgctcgtcaggcccctgccatggctccagttggccgactgagacttgcctgggtagcccataagactctgacttcctcagccacctcacccatttcccacctcccaggttccttgatggagccggtggagaaggaacgagcatctactccctacatagagaagcaggtggaccacctcatcaagaaggccacaaggccagaggagctcctggagctacttggtggcagtcacgacttggacagcaatcaagcagcaatggtacttatccggctctctcacttgctgtctgagaagccagaagataaaggcttgctcatacaggatgcccactttcatcaacttctctgtctgctcaacagtcagattgcctcggtctggcatggtaccctctcgaagctgctgggaagcctgtatgctctgggcatccccaaggcctccaaggagctgcagtcggtggagcaggaggtccgctggcgcatgcggaagctcaagtacaagcacctggccttcctggcagagtcctgtgccaccctctcacaggagcagcactcgcaggagctgctggctgagctgctcacacacctggaaaggcgttggacagaaattgaagattcccacacattagtgaccgtcatgatgaaggtgggacacctctcggagccactaatgaaccgcctggaagacaagcacgtcctgaacagagcgcaggacatcaccctgccccacctgtgcagcgtacttctggcttttgcgcgtctgaacttccatccagaccaagaggatcagttcttcagcctggtacatgagaagctggggtcagagctgccaggcctggagccagccctgcaggtggacctggtgtgggccctgtgtgtgctgcagcaggcacgggaagcagagctgcaagccgtcctccaccctgaatttcacatccaatttctagggggcaagtctcagaaggatcagaacaccttccagaagctgctccacatcaacgccactgccctgctggagtaccccgagtactcgggtccccttctgcctgcctcggctgtggcccctgggccctcagcccttgacaggaaggtgacccccctgcaaaaggagctgcaggagacgctgaaggggctgctggggagcgccgacaagggcagcctcgaggtggccacgcagtatggctgggtgctggatgctgaggtgctgctggacagtgacggcgagtttctgcccgtaagggactttgtggcacctcaccttgcccagccaactgggagccagtcaccacctccagggtctaagaggctagcgttcttgcggtgggagttccccaacttcaacagccgaagcaaggacttgctgggtcgctttgttctggcccggcgacacatagtggctgcaggcttcctgatagtggacgtcccattctatgagtggctggaactcaagtctgaatggcagaaaggcgcctacctcaaggacaagatgcgcaaagcggtggctgaggagctggccaagtgacttgtgccagcagcatggactgcgtgcctctccgccggaggtctagctgtgggcggccaagaagggtcacccttgaggacaaacctctgtgcaggaccttggccagagtggggagggtggccagccactctgagggacagaacgtcctcttgtgtataataaacctttaattttggtgttggacccctggggccttcccaggcttggtcaccctctgcactgtcagcacttgtctgtctgctttgttgagcagggcgtggttctccagtctgccctgtgcactcccccgccacgcccagcccaagagggctgctttagggacagacctgggttgttacctgcctgtctctcccagcttcttccctccatgagtgcttattcacatatgccggcctcttgcgtaggggtctgtatcagccccagcaggcaggtggagtcctagaattctgaacctccagagcagaggagcttcccagggaagctgattggagattcagtgcatggctgggggttctgatggagctgtggctactgaaccacagccatcctgggaggctttctcccatcagttgtctcacacttagctgagtgaaaggcaccctgacagcatgtggtgacaggtgatgtgagggctgggtgagcacttgggaggcgctggctctgggagaggagaagatcccacttggctgacaccacggcaccaagagccaaactccatcgttgtcttcaccaccctgaccagagccttgtgctgtcatctaggaactggctgcccaaacaggaccctggcagcctccctgctgctgcggggattaccaggtgctgggaggcaacaagctttctaccttccagcctctccttagagacacctattggcagaacctgactaaatagcagtcagggaactgggttgcctccagccatacagaacagagagtaggacagtggggtggagctgagatggagaggcccacagccctcagcactgtaggctcccaaccctaggctgtttccccaaaaagaaaaagtctagtcactgctctgatgcttggccactcacccaagcattggggtagtttgtgctggcttcactgggcaccatcaggcacacccagcctgtagtttttgttttatattacctaagtcggccaggtgtggtgggatcacgcctgtaatcccagcacttagggaggctggggcgggcgaatcgcctgaggccaggaattcaagaccaacctggccaacattgtgaaaccctgtctctactaaaaatataaaaattagtcgggcatgatgacaggcacctgtaatcccagctactcaggaggctgaggcaggtgaatcacttgaacccgggaggtggaggctgcagtgagttaagattgtgccactgcactccagcctgggtaacagagcaagactctgtctcaaaaaatatatatgtgtgtgtgtgtgtgtgtatatatatgtacatgtgtatataagtatatatgtgtgtatatatgtatatatacacgtatatacacacacacccctaagtcatgattttggagcaattgtaagtggtgtagtgcttaattttggcattcacacattgattgttagcatatagaaatgggattgatttttatgtgatcttgctaaactttatgcatttttaaaattcctttggatttcctatgtagatatttatgtcctgaaaacaggaatgtatttatcctttcaaatcaatatgctttttattttgttatttatgaccacttcattaaaatataattcacatgccatacacttcacccatttaaaatgtataattaggccaggtgtggtggctcacgtctgtaatcccagcagtttgggaggccaaggccctcagatcttgagcccaggagttcaagaccaccctgggcaacaggcaaaaccctgtctctattttttaaaatacaagaattagccgcagtggcacgcacctgtcgtcccagcaacccaggaggctgaggtaggaggatcacttaagcctgggaagtcaagcctgcagtgaaccatgatagcaccactgcagtccagcctgggcgacagagtgagaccccatctcgaaaacaaaaatgtataattcagtggtttttagtctctttgcagatacatgcaaccatcaccacaatttgcacattttctaagcctcatatactgatgtgatattttggtgttttgtgactggcttcatttacttagcatattgttttcatgtttcattcatgtcgcatgtatgagtattcattcctttatttggctgaataatattccattatagtttgtgccacattttgtttatccattcatccattgatggacatgtggattgtttccaccttctggataatatgaactgatacagtttggatattttgtcccctccaaatctcatgaaataggatcaccagtgttggagaatggggcctgttaggaagtgtttggatcataggaacatctgtcataaatggcttggtgccatccttgtaatgagtgagttcttgctctatattagttcacttgaaagctggttgttgggaactcctgccctatctgttctgccctctctcgtcatgtgacatgcctgctccttgttcaccttctgtcatgagtaaaagcttcctaaggccttcccaggagccaagcagatgtcagtaccatgcttgtacagcctgcagaactgtgagccaaataaacttctttataaatt

SEQ ID NO: 2233 - protein, 521 aa, Homo sapiens
MAAHLVKRCTCLLREAARQAPAMAPVGRLRLAWVAHKTLTSSATSPISHLPGSLMEPVEKERASTPYIEKQVDHLIKKATRPEELLELLGGSHDLDSNQAAMVLIRLSHLLSEKPEDKGLLIQDAHFHQLLCLLNSQIASVWHGTLSKLLGSLYALGIPKASKELQSVEQEVRWRMRKLKYKHLAFLAESCATLSQEQHSQELLAELLTHLERRWTEIEDSHTLVTVMMKVGHLSEPLMNRLEDKHVLNRAQDITLPHLCSVLLAFARLNFHPDQEDQFFSLVHEKLGSELPGLEPALQVDLVWALCVLQQAREAELQAVLHPEFHIQFLGGKSQKDQNTFQKLLHINATALLEYPEYSGPLLPASAVAPGPSALDRKVTPLQKELQETLKGLLGSADKGSLEVATQYGWVLDAEVLLDSDGEFLPVRDFVAPHLAQPTGSQSPPPGSKRLAFLRWEFPNFNSRSKDLLGRFVLARRHIVAAGFLIVDVPFYEWLELKSEWQKGAYLKDKMRKAVAEELAK

SEQ ID NO: 2234 - DNA, 1837 bp, Homo sapiens
ggcacgaggcccgggtcgagcatgtagcggctgctggcggcggggctcccggggcgggccgggcgggccgcgggagccgcacgcggcgatatggaagaggagggcaagaagggcaagaagcctggaattgtctcgccatttaaacgagtattcctaaaaggtgaaaagagtagagataagaaagcccatgagaaggtgacagagaggcgccctctgcacactgtggtgttgtcattgcctgagcgcgtcgagccagacagactgctgagcgactatattgagaaggaggtaaagtatttaggtcagttaacgtccataccaggatacctgaatccctccagtaggactgaaatcctgcatttcatagacaatgcaaagagagcccaccagcttccgggacacttgactcaggagcacgatgctgtgctcagcctgtctgcgtacaacgtcaagctggcctggagggacggggaggatatcatcctcagggtgcccatccatgacatcgccgccgtctcctatgttcgggatgacgctgcacacctggtggtcctgaagacagcccaggacccagggatctcccccagccagagtctgtgtgcggaaagttccagaggcctcagtgcaggctccctgtcggagagtgcagttgggcccgtggaggcatgctgcctggtcatcctggctgcagagagcaaggtcgctgcggaggagctttgctgtctgctaggccaggtcttccaggttgtttacacggagtccaccatcgactttctggacagagcgatatttgatggggcctctaccccgacccaccacctgtccctgcacagcgatgactcttctacaaaagtggacattaaggagacctacgaggtggaagccagcactttctgcttccctgaatctgtggatgtgggtggtgcatcaccccacagcaagaccatcagtgagagcgagctgagcgccagcgccactgagctgctgcaggactacatgctgacgctgcgcaccaagctgtcatcacaggagatccagcagtttgcagcactgctgcacgagtaccgcaatggggcctctatccacgagttctgcatcaacctgcggcagctctacggggacagccgcaagttcctgctgcttggtctgaggcccttcatccctgagaaggacagccagcacttcgagaacttcctggagaccattggcgtgaaggatggccgcggcatcatcactgacagctttggcaggcaccggcgggccctgagcaccacatccagttccaccaccaatgggaacagggccacgggcagctctgatgaccggtcggcaccctcagagggggatgagtgggaccgcatgatctcggacatcagcagcgacattgaggcgctgggctgcagcatggaccaggactcagcatgatggacagtggatgggggggcacccacaccttccgcgcagtcgtcataggccttcccagaaggagctgcccagacctgcgtgtcagcccttggtggtggccagggagaggcgcccggtgcagatggccccgggcggcccaggtcctctactgtgaaggagcagggagctgccgagggacacgagcctcagtgcggggtggaaggctctttgccttgtccaccagggctcagccaagccctgcagtgtgtccccgctcggggagggcccggccgagcgggcagggagagccagtcctgtcggctgggcccttggacggctgtcagttttgcacatgatgttcctattgtaactctcagagaccttaaaaagaagtttactgcaatgtgaataatttaaaaaaaaaaaaaaaaaa

SEQ ID NO: 2235 - protein, 444 aa, Homo sapiens
MEEEGKKGKKPGIVSPFKRVFLKGEKSRDKKAHEKVTERRPLHTVVLSLPERVEPDRLLSDYIEKEVKYLGQLTSIPGYLNPSSRTEILHFIDNAKRAHQLPGHLTQEHDAVLSLSAYNVKLAWRDGEDIILRVPIHDIAAVSYVRDDAAHLVVLKTAQDPGISPSQSLCAESSRGLSAGSLSESAVGPVEACCLVILAAESKVAAEELCCLLGQVFQVVYTESTIDFLDRAIFDGASTPTHHLSLHSDDSSTKVDIKETYEVEASTFCFPESVDVGGASPHSKTISESELSASATELLQDYMLTLRTKLSSQEIQQFAALLHEYRNGASIHEFCINLRQLYGDSRKFLLLGLRPFIPEKDSQHFENFLETIGVKDGRGIITDSFGRHRRALSTTSSSTTNGNRATGSSDDRSAPSEGDEWDRMISDISSDIEALGCSMDQDSA

SEQ ID NO: 2236 - DNA, 847 bp, Homo sapiens
tggggttcgaaccagcaagacaagcgggcattggccacagcagcgcgaggcgggcacggggtattgtccggctccggcggcggcggtcggtgctgcgagagcggcggcggcggcgcgggtcggcagcgggagggcgcgcggccgagcggaggcggagtcggcgccgagaacatggctggaggcaaagctggaaaggacagtgggaaggccaaggctaaggcagtatctcgctcacagagagctgggctacagtttcctgtgggccgcatccacagacacttgaagactcgcaccacaagccatggaagggtgggtgccactgctgccgtgtacagtgctgcgattctggagtacctcactgcagaggtgctggagctggcaggtaatgcttctaaggatctcaaagtaaagcgtatcactccgcgtcacttgcagcttgcaatccgtggtgatgaagagttggattctcttatcaaggctaccatagctgggggtggtgtgatccctcacatccacaaatctctgattggaaagaagggacagcagaaaactgcttagagggatgctttaaccaaccctcttcctccccgtcattgtactgtaactgggacagaagaaataatggggatatgtggaatttttaacaacagttaaatggaaaagcatagacaattactgtagacatgataaaagaaacatttgtatgttcttagactcgaagtttgataaaagtaccttttcatgtggtgacagttgtgtgttgattggctaggtttctcccgtgtgttttatacaaaaatggaattgataaaccattttttacaaaattaaaaaaaaaaaaaaaaaa

SEQ ID NO: 2237 - protein, 128 aa, Homo sapiens
MAGGKAGKDSGKAKAKAVSRSQRAGLQFPVGRIHRHLKTRTTSHGRVGATAAVYSAAILEYLTAEVLELAGNASKDLKVKRITPRHLQLAIRGDEELDSLIKATIAGGGVIPHIHKSLIGKKGQQKTA

SEQ ID NO: 2238 - DNA, 753 bp, Homo sapiens
gttttgcagacgccaccgccgaggaaaaccgtgtactattagccatggtcaaccccaccgtgttcttcgacattgccgtcgacggcgagcccttgggccgcgtctcctttgagctgtttgcagacaaggtcccaaagacagcagaaaattttcgtgctctgagcactggagagaaaggatttggttataagggttcctgctttcacagaattattccagggtttatgtgtcagggtggtgacttcacacgccataatggcactggtggcaagtccatctatggggagaaatttgaagatgagaacttcatcctaaagcatacgggtcctggcatcttgtccatggcaaatgctggacccaacacaaatggttcccagtttttcatctgcactgccaagactgagtggttggatggcaagcatgtggtgtttggcaaagtgaaagaaggcatgaatattgtggaggccatggagcgctttgggtccaggaatggcaagaccagcaagaagatcaccattgctgactgtggacaactcgaataagtttgacttgtgttttatcttaaccaccagatcattccttctgtagctcaggagagcacccctccaccccatttgctcgcagtatcctagaatctttgtgctctcgctgcagttccctttgggttccatgttttccttgttccctcccatgcctagctggattgcagagttaagtttatgattatgaaataaaaactaaataacaattgtc

SEQ ID NO: 2239 - protein, 165 aa, Homo sapiens
MVNPTVFFDIAVDGEPLGRVSFELFADKVPKTAENFRALSTGEKGFGYKGSCFHRIIPGFMCQGGDFTRHNGTGGKSIYGEKFEDENFILKHTGPGILSMANAGPNTNGSQFFICTAKTEWLDGKHVVFGKVKEGMNIVEAMERFGSRNGKTSKKITIADCGQLE

SEQ ID NO: 2240 - DNA, 4094 bp, Homo sapiens
gcagttgtgaaaaacttcaggacaaaaatgtttcatttaaggacttgtgctgctaagttgaggccattgacggcttcccagactgttaagacattttcacaaaacagaccagcagcagctaggacatttcaacagattcggtgctattctgcacctgttgctgctgagccctttctcagtgggactagttcgaactatgtggaggagatgtactgtgcttggctggaaaaccccaaaagtgtacataagtcatgggacattttttttcgcaacacgaatgccggagccccaccgggcactgcctaccagagtccccttcccctgagccgaggctccctggctgctgtggcccatgcacagtccctggtagaagcacagcccaacgtggacaagctcgtggaggaccacctggcagtgcagtcgctcatcagggcatatcagatacgagggcaccatgtagcacagctggaccccctggggattttggatgctgatctggactcctccgtgcccgctgacattatctcatccacagacaaacttgggttctatggcctggatgagtctgacctcgacaaggtcttccacttgcccaccaccactttcatcgggggacaggaatcagcacttcctctgcgggagatcatccgtcggctggagatggcctactgccagcatattggggtggagttcatgttcatcaatgacctggagcagtgccagtggatccggcagaagtttgagacccctgggatcatgcagttcacaaatgaggagaaacggaccctgctggccaggcttgtgcggtccaccaggtttgaggagttcctacagcggaagtggtcctctgagaagcgctttggtctagaaggctgcgaggtactgatccctgccctcaagaccatcattgacaagtctagtgagaatggcgtggactacgtgatcatgggcatgccacacagagggcggctgaacgtgcttgcaaatgtcatcaggaaggagctggaacagatcttctgtcaattcgattcaaagctggaggcagctgatgagggctccggagatgtgaagtaccacctgggcatgtatcaccgcaggatcaatcgtgtcaccgacaggaacattaccttgtccttggtggccaacccttcccaccttgaggccgctgaccccgtggtgatgggcaagaccaaagccgaacagttttactgtggcgacactgaagggaaaaaggtcatgtccatcctgttgcatggggatgctgcatttgctggccagggcattgtgtacgagaccttccacctcagcgacctgccatcctacacaactcatggcaccgtgcacgtggtcgtcaacaaccagatcggcttcaccaccgaccctcggatggcccgctcctccccctaccccactgacgtggcccgagtggtgaatgcccccattttccacgtgaactcagatgaccccgaggctgtcatgtacgtgtgcaaagtggcggccgagtggaggagcaccttccacaaggacgtggttgtcgatttggtgtgttaccggcgcaacggccacaacgagatggatgagcccatgttcacgcagccgctcatgtacaagcagatccgcaagcagaagcctgtgttacagaagtacgctgagctgctggtgtcgcagggtgtggtcaaccagcctgagtatgaggaggaaatttccaagtatgataagatctgtgaggaagcttttgccagatctaaagatgagaagatcttgcacattaagcactggctggactctccctggcctggcttcttcaccctggacgggcagcccaggagcatgtcctgcccctccacgggtctgacggaggatattctgacacacatcgggaatgtggctagttctgtgcctgtggaaaactttactattcatggagggctgagccggatcttgaagactcgtggggaaatggtgaagaaccggactgtggactgggctctagcggagtacatggcgtttggctcgctcctgaaggagggcatccacattcggctgagcggccaggacgtggagcggggcacattcagccaccgccaccatgtgctccatgaccagaatgtggacaagagaacctgcatccccatgaaccatctctggcccaatcaggccccctatactgtgtgcaacagctcactgtctgagtacggcgtgctgggctttgagctgggcttcgccatggccagtcctaatgccctggtcctctgggaagcccaatttggtgacttccacaacacggcccagtgtatcatcgaccagttcatctgcccgggacaagccaagtgggtgcggcagaatggcatcgtgttgctgctgccccatggcatggagggcatgggtccagaacattcctccgcccgcccagagcggttcttgcagatgtgcaacgatgacccagatgtcctgccagaccttaaagaagccaacttcgacatcaatcagctatatgactgcaattgggttgttgtcaactgctccactcctggcaacttcttccacgtgctacgacgccagatcctgctgccattccggaagccgttaattatcttcacccccaaatccctgttgcgccaccccgaggccagatccagctttgatgagatgcttccaggaacccacttccagcgggtgatcccagaagatggccctgcagctcagaacccagaaaatgtcaaaaggcttctcttctgcaccggcaaagtgtattatgacctcacccgggagcgcaaagcacgcgacatggtggggcaggtggccatcacaaggattgagcagctgtcgccattcccctttgacctcctgctgaaggaggtgcagaagtaccccaatgctgagctggcctggtgccaggaggagcacaagaaccaaggctactatgactacgtgaagccaagacttcggaccaccatcagccgcgccaagcccgtctggtatgccggccgggacccagcggctgctccagccaccggcaacaagaagacccacctgacggagctgcagcgcctcctggacacggccttcgacctggacgtcttcaagaacttctcgtagatgctgcctagggttgcttgggccactgccctctccacacccatgactgccccttgcttctcaactaaagaatagtgcctcagcgctgcccacaccaccgccctcctcgctgtgccaccacccctccctctgctctcataggagttaggctgtcgtccccctccagtgcttggctgccccacaggccacacgctgcccaggctctgctgacttctgagcagttttccaggaggccggggggagcaggaggaggaaaggtagcccccgagggatgtccttggggaggggtcagctctggccacaatcctccccaccagtctcacccactaggataggaactgggccttgtgtgctggcttccgctgtcacccagcaaggcacaggctcctgtatttgagactaggatagcttcatcttgagcctgagccttagaatctgtagaggagcctggagtcggatctagccatggctggcagaggtttctagggtgggccccagccgtggcgtgaactgaggatgacccggggcagctggcaggagagagccttggcctgacctggcacagaaagggcagcttcagtctctgcagtgtccattatctgctgttccttcgagggttccaggctgtgtgtggggcccaagcatgccccacccacccctcctgggcccaggcagcacctggagcccacagagtctgtgtgtagccaggaagccccgctcaggtagccaccaccggggcactggctgctctgtcttggtcctgttaaccctccacctcctctcttggactccctccccaccccaaccactctttctttctcctttaacccaatggagactttctgatgcatcgttttctttgctgtgccaaagcaggtcagaagagggagaggaggggctgggggtgaggggccaggccatggccaaggggccagctgcccctcatttatcactctgaccttcacagggacagatctgatttatttattttggtt

SEQ ID NO: 2241 - protein, 1023 aa, Homo sapiens
MFHLRTCAAKLRPLTASQTVKTFSQNRPAAARTFQQIRCYSAPVAAEPFLSGTSSNYVEEMYCAWLENPKSVHKSWDIFFRNTNAGAPPGTAYQSPLPLSRGSLAAVAHAQSLVEAQPNVDKLVEDHLAVQSLIRAYQIRGHHVAQLDPLGILDADLDSSVPADIISSTDKLGFYGLDESDLDKVFHLPTTTFIGGQESALPLREIIRRLEMAYCQHIGVEFMFINDLEQCQWIRQKFETPGIMQFTNEEKRTLLARLVRSTRFEEFLQRKWSSEKRFGLEGCEVLIPALKTIIDKSSENGVDYVIMGMPHRGRLNVLANVIRKELEQIFCQFDSKLEAADEGSGDVKYHLGMYHRRINRVTDRNITLSLVANPSHLEAADPVVMGKTKAEQFYCGDTEGKKVMSILLHGDAAFAGQGIVYETFHLSDLPSYTTHGTVHVVVNNQIGFTTDPRMARSSPYPTDVARVVNAPIFHVNSDDPEAVMYVCKVAAEWRSTFHKDVVVDLVCYRRNGHNEMDEPMFTQPLMYKQIRKQKPVLQKYAELLVSQGVVNQPEYEEEISKYDKICEEAFARSKDEKILHIKHWLDSPWPGFFTLDGQPRSMSCPSTGLTEDILTHIGNVASSVPVENFTIHGGLSRILKTRGEMVKNRTVDWALAEYMAFGSLLKEGIHIRLSGQDVERGTFSHRHHVLHDQNVDKRTCIPMNHLWPNQAPYTVCNSSLSEYGVLGFELGFAMASPNALVLWEAQFGDFHNTAQCIIDQFICPGQAKWVRQNGIVLLLPHGMEGMGPEHSSARPERFLQMCNDDPDVLPDLKEANFDINQLYDCNWVVVNCSTPGNFFHVLRRQILLPFRKPLIIFTPKSLLRHPEARSSFDEMLPGTHFQRVIPEDGPAAQNPENVKRLLFCTGKVYYDLTRERKARDMVGQVAITRIEQLSPFPFDLLLKEVQKYPNAELAWCQEEHKNQGYYDYVKPRLRTTISRAKPVWYAGRDPAAAPATGNKKTHLTELQRLLDTAFDLDVFKNFS

SEQ ID NO: 2242 - DNA, 1926 bp, Homo sapiens
gctgctcccgctcgcgtcggtggcgtttttcctgcagcgcgtgcgtgctgcgctactgagcagcgccatggaggactctgaagcactgggcttcgaacacatgggcctcgatccccggctccttcaggctgtcaccgatctgggctggtcgcgacctacgctgatccaggagaaggccatcccactggccctagaagggaaggacctcctggctcgggcccgcacgggctccgggaagacggccgcttatgctattccgatgctgcagctgttgctccataggaaggcgacaggtccggtggtagaacaggcagtgagaggccttgttcttgttcctaccaaggagctggcacggcaagcacagtccatgattcagcagctggctacctactgtgctcgggatgtccgagtggccaatgtctcagctgctgaagactcagtctctcagagagctgtgctgatggagaagccagatgtggtagtagggaccccatctcgcatattaagccacttgcagcaagacagcctgaaacttcgtgactccctggagcttttggtggtggatgaagctgaccttcttttttcctttggctttgaagaagagctcaagagtctcctctgtcacttgccccggatttaccaggcttttctcatgtcagctacttttaacgaggacgtacaagcactcaaggagctgatattacataacccggttacccttaagttacaggagtcccagctgcctgggccagaccagttacagcagtttcaggtggtctgtgagactgaggaagacaaattcctcctgctgtatgccctgctcaagctgtcattgattcggggcaagtctctgctctttgtcaacactctagaacggagttaccggctacgcctgttcttggaacagttcagcatccccacctgtgtgctcaatggagagcttccactgcgctccaggtgccacatcatctcacagttcaaccaaggcttctacgactgtgtcatagcaactgatgctgaagtcctgggggccccagtcaagggcaagcgtcggggccgagggcccaaaggggacaaggcctctgatccggaagcaggtgtggcccggggcatagacttccaccatgtgtctgctgtgctcaactttgatcttcccccaacccctgaggcctacatccatcgagctggcaggacagcacgcgctaacaacccaggcatagtcttaacctttgtgcttcccacggagcagttccacttaggcaagattgaggagcttctcagtggagagaacaggggccccattctgctcccctaccagttccggatggaggagatcgagggcttccgctatcgctgcagggatgccatgcgctcagtgactaagcaggccattcgggaggcaagattgaaggagatcaaggaagagcttctgcattctgagaagcttaagacatactttgaagacaaccctagggacctccagctgctgcggcatgacctacctttgcaccccgcagtggtgaagccccacctgggccatgttcctgactacctggttcctcctgctctccgtggcctggtacgccctcacaagaagcggaagaagctgtcttcctcttgtaggaaggccaagagagcaaagtcccagaacccactgcgcagcttcaagcacaaaggaaagaaattcagacccacagccaagccctcctgaggttgttgggcctctctggagctgagcacattgtggagcacaggcttacacccttcgtggacaggcgaggctctggtgcttactgcacagcctgaacagacagttctggggccggcagtgctgggccctttagctccttggcacttccaagctggcatcttgccccttgacaacagaataaaaattttagctgccccaaaaaaaaaaaaaaaaaa

SEQ ID NO: 2243 - protein, 547 aa, Homo sapiens
MEDSEALGFEHMGLDPRLLQAVTDLGWSRPTLIQEKAIPLALEGKDLLARARTGSGKTAAYAIPMLQLLLHRKATGPVVEQAVRGLVLVPTKELARQAQSMIQQLATYCARDVRVANVSAAEDSVSQRAVLMEKPDVVVGTPSRILSHLQQDSLKLRDSLELLVVDEADLLFSFGFEEELKSLLCHLPRIYQAFLMSATFNEDVQALKELILHNPVTLKLQESQLPGPDQLQQFQVVCETEEDKFLLLYALLKLSLIRGKSLLFVNTLERSYRLRLFLEQFSIPTCVLNGELPLRSRCHIISQFNQGFYDCVIATDAEVLGAPVKGKRRGRGPKGDKASDPEAGVARGIDFHHVSAVLNFDLPPTPEAYIHRAGRTARANNPGIVLTFVLPTEQFHLGKIEELLSGENRGPILLPYQFRMEEIEGFRYRCRDAMRSVTKQAIREARLKEIKEELLHSEKLKTYFEDNPRDLQLLRHDLPLHPAVVKPHLGHVPDYLVPPALRGLVRPHKKRKKLSSSCRKAKRAKSQNPLRSFKHKGKKFRPTAKPS

SEQ ID NO: 2244 - DNA, 503 bp, Homo sapiens
tcttcctcggcgctgcctacggaggtggcagccatctcctcctcggcatcatggccgccctcagaccccttgtgaagcccaagatcgtcaaaaagagaaccaagaagttcatccagcaccagtcagaccaatatgtcaaaattaagcgtaactggcggaaacccagaggcactgacaacagggttcgtagaagattcaagggccagatcttgatgcccaacattggttatgggagcaacaaaaaaacaaagcacatgctgcccagtggcttccggaagttcctggtccacaacatcaaggagctggaagtgctgctgatgtgcaacaaatcttactgtgccgagatcgctcacaatgtttcctccaagaaccgcaaagccatcgtggaaacagctgcccaactggccatcagagtcaccaaccccaatgccaggctgcgcagcgaagaaaatgagtagacagctcgtgtgcacgttttctgtttaaataaatgtaaaaactgc

SEQ ID NO: 2245 - DNA, 735 bp, Homo sapiens
gctgctccctgagaacgggtcccgcagctgggcaggcgggcggcctgagggcgcggagccatgaagctgtacagcctcagcgtcctctacaaaggcgaggccaaggtggtgctgctcaaagccgcatacgatgtgtcttccttcagctttttccagagatccagcgttcaggaattcatgaccttcacgagtcaactgattgtggagcgctcatcgaaaggcactagagcttctgtcaaagaacaagactatctgtgccacgtctacgtccggaatgatagtcttgcaggtgtggtcattgctgacaatgaatacccatcccgggtggcctttaccttgctggagaaggtactagatgaattctccaagcaagtcgacaggatagactggccagtaggatcccctgctacaatccattacccagccctggatggtcacctcagtagataccagaacccacgagaagctgatcccatgactaaagtgcaggccgaactagatgagaccaaaatcattctgcacaacaccatggagtctctgttagagcgaggtgagaagctagatgacttggtgtccaaatccgaggtgctgggaacacagtctaaagccttctataaaactgcccggaaacaaaactcatgctgtgccatcatgtgatgcagcctgccagaggcccaatgctggaatggcaccatcattcacatcagaactgcagcccctggaaaagaagagaca

SEQ ID NO: 2246 - DNA, 1584 bp, Homo sapiens
cgggatgcggcgcgccgcgcgttgaacctccttggcctgggcgaagctgtgtggaccaagcaagtcaggagtgtggccatgttttctgagcaggctgcccagagggcccacactctactgtccccaccatcagccaacaatgccacctttgcccgggtgccagtggcaacctacaccaactcctcacaacccttccggctaggagagcgcagctttagccggcagtatgcccacatttatgccacccgcctcatccaaatgagacccttcctggagaaccgggcccagcagcactggggcagtggagtgggagtgaagaagctgtgtgaactgcagcctgaggagaagtgctgtgtggtgggcactctgttcaaggccatgccgctgcagccctccatcctgcgggaggtcagcgaggagcacaacctgctcccccagcctcctcggagtaaatacatacacccagatgacgagctggtcttggaagatgaactgcagcgtatcaaactaaaaggcaccattgacgtgtcaaagctggttacggggactgtcctggctgtgtttggctccgtgagagacgacgggaagtttctggtggaggactattgctttgctgaccttgctccccagaagcccgcacccccacttgacacagataggtttgtgctactggtgtccggcctgggcctgggtggcggtggaggcgagagcctgctgggcacccagctgctggtggatgtggtgacggggcagcttggggacgaaggggagcagtgcagcgccgcccacgtctcccgggttatcctcgctggcaacctcctcagccacagcacccagagcagggattctatcaataaggccaaatacctcaccaagaaaacccaggcagccagcgtggaggctgttaagatgctggatgagatcctcctgcagctgagcgcctcagtgcccgtggacgtgatgccaggcgagtttgatcccaccaattacacgctcccccagcagcccctccacccctgcatgttcccgctggccactgcctactccacgctccagctggtcaccaacccctaccaggccaccattgatggagtcagatttttggggacatcaggacagaacgtgagtgacattttccgatacagcagcatggaggatcacttggagatcctggagtggaccctgcgggtccgtcacatcagccccacagccccggacactctaggttgttaccccttctacaaaactgacccgttcatcttcccagagtgcccgcatgtctacttttgtggcaacacccccagctttggctccaaaatcatccgaggtcctgaggaccagacagtgctgttggtgactgtccctgacttcagtgccacgcagaccgcctgccttgtgaacctgcgcagcctggcctgccagcccatcagcttctcgggcttcggggcagaggacgatgacctgggaggcctggggctgggcccctgactcaaaaaagtggttttgaccagagaggcccagatggaggctgttcattccctgcagtgtcggcattgtaaataaagcctggcacttgctgatgcg

SEQ ID NO: 2247 - protein, 469 aa, Homo sapiens
MFSEQAAQRAHTLLSPPSANNATFARVPVATYTNSSQPFRLGERSFSRQYAHIYATRLIQMRPFLENRAQQHWGSGVGVKKLCELQPEEKCCVVGTLFKAMPLQPSILREVSEEHNLLPQPPRSKYIHPDDELVLEDELQRIKLKGTIDVSKLVTGTVLAVFGSVRDDGKFLVEDYCFADLAPQKPAPPLDTDRFVLLVSGLGLGGGGGESLLGTQLLVDVVTGQLGDEGEQCSAAHVSRVILAGNLLSHSTQSRDSINKAKYLTKKTQAASVEAVKMLDEILLQLSASVPVDVMPGEFDPTNYTLPQQPLHPCMFPLATAYSTLQLVTNPYQATIDGVRFLGTSGQNVSDIFRYSSMEDHLEILEWTLRVRHISPTAPDTLGCYPFYKTDPFIFPECPHVYFCGNTPSFGSKIIRGPEDQTVLLVTVPDFSATQTACLVNLRSLACQPISFSGFGAEDDDLGGLGLGP

SEQ ID NO: 2248 - DNA, 3914 bp, Homo sapiens
tccctcgctcaccccatcctctctcccgccccttcctggattccctcacccgtctcgatcccctctccgccctttcccagagacccagagcccctgaccccccgcgccctccccggagccccccgcgcgtgccgcggccatggcggccgtgcgcggggcgcccctgctcagctgcctcctggcgttgctggccctgtgccctggagggcgcccgcagacggtgctgaccgacgacgagatcgaggagttcctcgagggcttcctgtcagagctagaacctgagccccgggaggacgacgtggaggccccgccgcctcccgagcccaccccgcgggtccgaaaagcccaggcggggggcaagccagggaagcggccagggacggccgcagaagtgcctccggaaaagaccaaagacaaagggaagaaaggcaagaaagacaaaggccccaaggtgcccaaggagtccttggaggggtcccccaggccgcccaagaaggggaaggagaagccacccaaggccaccaagaagcccaaggagaagccacctaaggccaccaagaagcccaaggagaagccacccaaggccaccaagaagcccaaagagaagccacccaaggccaccaagaagcccccgtcagggaagaggccccccattctggctccctcagaaaccctggagtggccactgcccccaccccccagccctggccccgaggagctaccccaggagggaggggcgcccctctcaaataactggcagaatccaggagaggagacccatgtggaggcacgggagcaccagcctgagccggaggaggagaccgagcaacccacactggactacaatgaccagatcgagagggaggactatgaggactttgagtacattcggcgccagaagcaacccaggccacccccaagcagaaggaggaggcccgagcgggtctggccagagccccctgaggagaaggccccggccccagccccggaggagaggattgagcctcctgtgaagcctctgctgcccccgctgccccctgactatggtgatggttacgtgatccccaactacgatgacatggactattactttgggcctcctccgccccagaagcccgatgctgagcgccagacagacgaagagaaggaggagctgaagaaacccaaaaaggaggacagcagccccaaggaggagaccgacaagtgggcagtggagaagggcaaggaccacaaagagccccgaaagggcgaggagttggaggaggagtggacgcctacggagaaagtcaagtgtccccccattgggatggagtcacaccgtattgaggacaaccagatccgagcctcctccatgctgcgccacggcctgggggcacagcgcggccggctcaacatgcagaccggtgccactgaggacgactactatgatggtgcgtggtgtgccgaggacgatgccaggacccagtggatagaggtggacaccaggaggactacccggttcacaggcgtcatcacccagggcagagactccagcatccatgacgattttgtgaccaccttcttcgtgggcttcagcaatgacagccagacatgggtgatgtacaccaacggctatgaggaaatgacctttcatgggaacgtggacaaggacacacccgtgctgagtgagctcccagagccggtggtggctcgtttcatccgcatctacccactcacctggaatggcagcctgtgcatgcgcctggaggtgctggggtgctctgtggcccctgtctacagctactacgcacagaatgaggtggtggccaccgatgacctggatttccggcaccacagctacaaggacatgcgccagctcatgaaggtggtgaacgaggagtgccccaccatcacccgcacttacagcctgggcaagagctcacgaggcctcaagatctatgccatggagatctcagacaaccctggggagcatgaactgggggagcccgagttccgctacactgctgggatccatggcaacgaggtgctgggccgagagctgttgctgctgctcatgcagtacctgtgccgagagtaccgcgatgggaacccacgtgtgcgcagcctggtgcaggacacacgcatccacctggtgccctcactgaaccctgatggctacgaggtggcagcgcagatgggctcagagtttgggaactgggcgctgggactgtggactgaggagggctttgacatctttgaagatttcccggatctcaactctgtgctctggggagctgaggagaggaaatgggtcccctaccgggtccccaacaataacttgcccatccctgaacgctacctttcgccagatgccacggtatccacggaggtccgggccatcattgcctggatggagaagaaccccttcgtgctgggagcaaatctgaacggcggcgagcggctagtatcctacccctacgatatggcccgcacgcctacccaggagcagctgctggccgcagccatggcagcagcccggggggaggatgaggacgaggtctccgaggcccaggagactccagaccacgccatcttccggtggcttgccatctccttcgcctccgcacacctcaccttgaccgagccctaccgcggaggctgccaagcccaggactacaccggcggcatgggcatcgtcaacggggccaagtggaacccccggaccgggactatcaatgacttcagttacctgcataccaactgcctggagctctccttctacctgggctgtgacaagttccctcatgagagtgagctgccccgcgagtgggagaacaacaaggaggcgctgctcaccttcatggagcaggtgcaccgcggcattaagggggtggtgacggacgagcaaggcatccccattgccaacgccaccatctctgtgagtggcattaatcacggcgtgaagacagccagtggtggtgattactggcgaatcttgaacccgggtgagtaccgcgtgacagcccacgcggagggctacaccccgagcgccaagacctgcaatgttgactatgacatcggggccactcagtgcaacttcatcctggctcgctccaactggaagcgcatccgggagatcatggccatgaacgggaaccggcctatcccacacatagacccatcgcgccctatgaccccccaacagcgacgcctgcagcagcgacgcctacaacaccgcctgcggcttcgggcacagatgcggctgcggcgcctcaacgccaccaccaccctaggcccccacactgtgcctcccacgctgccccctgcccctgccaccaccctgagcactaccatagagccctggggcctcataccgccaaccaccgctggctgggaggagtcggagactgagacctacacagaggtggtgacagagtttgggaccgaggtggagcccgagtttgggaccaaggtggagcccgagtttgagacccagttggagcctgagtttgagacccagctggaacccgagtttgaggaagaggaggaggaggagaaagaggaggagatagccactggccaggcattccccttcacaacagtagagacctacacagtgaactttggggacttctgagatcagcgtcctaccaagaccccagcccaactcaagctacagcagcagcacttcccaagcctgctgaccacagtcacatcacccatcagcacatggaaggcccctggtatggacactgaaaggaagggctggtcctgcccctttgagggggtgcaaacatgactgggacctaagagccagaggctgtgtagaggctcctgctccacctgccagtctcgtaagagatggggttgctgcagtgttggagtaggggcagagggagggagccaaggtcactccaataaaacaagctcatggc

SEQ ID NO: 2249 - DNA, 2571 bp, Homo sapiens
gtttccctctgcgttcgctccgcgctgctggaggctgtcgtcccaatgctccccaaacggcggcgagcgcgggtcgggtcccctagcggcgatgccgcttcctccacgccgccctcgacgcgcttcccgggagtcgccatctacctggtcgagcctcgcatgggtcgcagccgccgggccttcctcacaggcctggcgcgctccaaaggcttccgcgtccttgacgcctgcagctccgaagcgacacatgttgtgatggaagagacctcagcagaggaggccgtcagctggcaggagcgcaggatggcagctgctcccccgggttgcacccccccagctctgctggacataagctggttaacagagagcctgggagctgggcagcctgtacctgtggagtgccggcaccgcctggaggtggctgggccaaggaaggggcctctgagcccagcatggatgcctgcctatgcctgccagcgccctacgcccctcacacaccacaacactggcctctccgaggctctggagatactggccgaggcagcaggctttgaaggcagtgagggccgcctcctcaccttctgcagagcagcctcggtgctcaaggcccttcccagccctgtcacaaccctgagccagctgcaggggcttccccactttggagaacactcctctagggttgtccaggagctgctggagcatggagtgtgtgaggaggtggagagagttcggcgctcagagaggtaccagaccatgaagctcttcacccagatcttcggggtcggtgtgaagactgctgaccggtggtaccgggaaggactgcgaaccttagatgacctccgagagcagccccagaaactaacccaacagcagaaagcggggctccagcaccaccaggacctgagcaccccagtcctgcggtccgatgtagatgccctgcagcaggtggtggaggaagctgtggggcaggccctgcctggggccaccgtcacgctgaccggcggcttccgcagggggaagttgcagggccatgacgtggacttcctcatcacccaccccaaggagggtcaggaggcggggctgctgcctagagtgatgtgccgcctgcaggaccagggcctcatcctgtaccaccagcaccagcacagctgctgtgagtcccctacccgcctggcccaacagagccacatggacgcttttgagagaagtttctgcattttccgcctaccacaacctccaggggctgctgtggggggatccacgaggccctgcccatcctggaaggccgtgagagtggacttggtagttgcacccgtcagccagttccctttcgccctgctcggttggactggctccaagcttttccagcgggagctgcgccgcttcagccggaaggagaagggcctgtggctgaacagccatgggctgtttgacccggagcagaagacatttttccaagcggcttcagaggaagacatcttcagacacctgggccttgagtaccttcctccagagcagagaaacgcctgagcctgcctgtgtcccccacttccactcaggaaattgggctgcccccaacctggccactgaatgtctccaggcagatatgctgccccctgacccccaccttcacccctccccgccaaggcctggctcttccggaggtcaattgtgcctgcaggatcagttgagcccctgctggtgtgctgcagggtgtgatgaggtgggagccctcagtgccagcctcatcactgtgtgaccctgggtctgctcttagcctccccatggctcacgttcctgccctggatgggatgtgagtggggcccacatcgtggagctgtggtggggcctgcagtcatgaatggcaagtggtccctgatgtgcagtgtctcattagttgcactgcagttaactgtggctcctgcagggcaccctgcccagaatgcccagaagagaaccatgcatacctgcactgcatttgagagccatgagctggaggctgtggttcgtgccagcaaggagcctactgtctggtgtgctgtaggcatctggagagggagagggcctgggtaggagctgggaggaagataattttcaactatggggcttcagtactgcagcgccccgagccaggctctgtgcttctgcctttaaggcctgttctcagcacaatgtctcaaaaataggtcatatcctgccactcccgtcgcagagccctttaatggttccaaaccctaagtccacacatagcccctggctctggcatctctccagccccactggccccgagctgcttgactcaccggcttcctatttgatgcacccaggcccccttgtggccaactccctccccttctcactgaggcagaagcactgaggtgggctggacatgggtgccctccacgtccctcatatccccaggcacactctggcctcaggttttgccctggccatgtcatctacctggagtgggccctccccttcttcaggccttgaatcaaaagccactttgttaggcgaggatttcccagaccactcatcacattaaaaaatattttgaaaacatgcagt

SEQ ID NO: 2250 - protein, 494 aa, Homo sapiens
MLPKRRRARVGSPSGDAASSTPPSTRFPGVAIYLVEPRMGRSRRAFLTGLARSKGFRVLDACSSEATHVVMEETSAEEAVSWQERRMAAAPPGCTPPALLDISWLTESLGAGQPVPVECRHRLEVAGPRKGPLSPAWMPAYACQRPTPLTHHNTGLSEALEILAEAAGFEGSEGRLLTFCRAASVLKALPSPVTTLSQLQGLPHFGEHSSRVVQELLEHGVCEEVERVRRSERYQTMKLFTQIFGVGVKTADRWYREGLRTLDDLREQPQKLTQQQKAGLQHHQDLSTPVLRSDVDALQQVVEEAVGQALPGATVTLTGGFRRGKLQGHDVDFLITHPKEGQEAGLLPRVMCRLQDQGLILYHQHQHSCCESPTRLAQQSHMDAFERSFCIFRLPQPPGAAVGGSTRPCPSWKAVRVDLVVAPVSQFPFALLGWTGSKLFQRELRRFSRKEKGLWLNSHGLFDPEQKTFFQAASEEDIFRHLGLEYLPPEQRNA

SEQ ID NO: 2251 - DNA, 2170 bp, Homo sapiens
ggcacgagggcggagactgcggggcgggccatggcggcgaacctgagccggaacgggccagcgctgcaagaggcctacgtgcgggtggtcaccgagaagtccccgaccgactgggctctctttacctatgaaggcaacagcaatgacatccgcgtggctggcacaggggagggtggcctggaggagatggtggaggagctcaacagcgggaaggtgatgtacgccttctgcagagtgaaggaccccaactctggactgcccaaatttgtcctcatcaactggacaggcgagggcgtgaacgatgtgcggaagggagcctgtgccagccacgtcagcaccatggccagcttcctgaagggggcccatgtgaccatcaacgcacgggccgaggaggatgtggagcctgagtgcatcatggagaaggtggccaaggcttcaggtgccaactacagctttcacaaggagagtggccgcttccaggacgtgggaccccaggccccagtgggctctgtgtaccagaagaccaatgccgtgtctgagattaaaagggttggtaaagacagcttctgggccaaagcagagaaggaggaggagaaccgtcggctggaggaaaagcggcgggccgaggaggcacagcggcagctggagcaggagcgccgggagcgtgagctgcgtgaggctgcacgccgggagcagcgctatcaggagcagggtggcgaggccagcccccagagcaggacgtgggagcagcagcaagaagtggtttcaaggaaccgaaatgagcaggagtctgccgtgcacccgagggagattttcaagcagaaggagagggccatgtccaccacctccatctccagtcctcagcctggcaagctgaggagccccttcctgcagaagcagctcacccaaccagagacccactttggcagagagccagctgctgccatctcaaggcccagggcagatctccctgctgaggagccggcgcccagcactcctccatgtctggtgcaggcagaagaggaggctgtgtatgaggaacctccagagcaggagaccttctacgagcagcccccactggtgcagcagcaaggtgctggctctgagcacattgaccaccacattcagggccaggggctcagtgggcaagggctctgtgcccgtgccctgtacgactaccaggcagccgacgacacagagatctcctttgaccccgagaacctcatcacgggcatcgaggtgatcgacgaaggctggtggcgtggctatgggccggatggccattttggcatgttccctgccaactacgtggagctcattgagtgaggctgagggcacatcttgcccttcccctctcagacatggcttccttattgctggaagaggaggcctgggagttgacattcagcactcttccaggaataggacccccagtgaggatgaggcctcagggctccctccggcttggcagactcagcctgtcaccccaaatgcagcaatggcctggtgattcccacacatccttcctgcatcccccgaccctcccagacagcttggctcttgcccctgacaggatactgagccaagccctgcctgtggccaagccctgagtggccactgccaagctgcggggaagggtcctgagcaggggcatctgggaggctctggctgccttctgcatttatttgccttttttctttttctcttgcttctaaggggtggtggccaccactgtttagaatgacccttgggaacagtgaacgtagagaattgtttttagcagagtttgtgaccaaagtcagagtggatcatggtggtttggcagcagggaatttgtcttgttggagcctgctctgtgctccccactccatttctctgtccctctgcctgggctatgggaagtggggatgcagatggccaagctcccaccctgggtattcaaaaacggcagacacaacatgttcctccacgcggctcactcgatgcctgcaggccccagtgtgtgcctcaactgattctgacttcaggaaaagtaacacagagtggccttggcctgttgtcttcccctattttctgtcccagctcatccgtgtctctgaagaacaaatatgcttttggaccacgaaaaaaaaaaaaaaaaaaaaaaaaaaaaaaaaaaaaaaaaaaaaaa

SEQ ID NO: 2252 - protein, 431 aa, Homo sapiens
MAANLSRNGPALQEAYVRVVTEKSPTDWALFTYEGNSNDIRVAGTGEGGLEEMVEELNSGKVMYAFCRVKDPNSGLPKFVLINWTGEGVNDVRKGACASHVSTMASFLKGAHVTINARAEEDVEPECIMEKVAKASGANYSFHKESGRFQDVGPQAPVGSVYQKTNAVSEIKRVGKDSFWAKAEKEEENRRLEEKRRAEEAQRQLEQERRERELREAARREQRYQEQGGEASPQSRTWEQQQEVVSRNRNEQESAVHPREIFKQKERAMSTTSISSPQPGKLRSPFLQKQLTQPETHFGREPAAAISRPRADLPAEEPAPSTPPCLVQAEEEAVYEEPPEQETFYEQPPLVQQQGAGSEHIDHHIQGQGLSGQGLCARALYDYQAADDTEISFDPENLITGIEVIDEGWWRGYGPDGHFGMFPANYVELIE

SEQ ID NO: 2253 - DNA, 2643 bp, Homo sapiens
ggggagagcgggtgtttgaaggctccgcggaccggcactaggagccgggggcgggtccgtgaccctccggctgctcggagtgaacaggcggccaggaaagaagcgggcctgaacaccatgatccctttggagaagccaggcagcggcggctcctccccaggcgccacctcaggctcgggccgggcaggccggggtctgagcgggccgtgccggccgccgccgccgccccaggcccgcgggctgctgacagagatacgcgccgtggtgcgcaccgagcccttccaggacggctacagcctgtgcccgggccgggagctgggcagggggaaatttgcagtggtgagaaaatgtataaagaaagattctgggaaagaatttgctgcaaagttcatgagaaaaagaagaaaaggccaagattgtcggatggaaataattcatgagattgctgtacttgaactagcacaagacaatccttgggtcattaatttacatgaagtttatgagactgcatcagaaatgatcttagttctggaatatgctgctgggggtgaaatctttgaccagtgtgttgcagacagagaagaagcctttaaagaaaaagatgttcaaagacttatgcgacagattttagaaggtgttcactttttacacactcgtgatgtagttcatcttgatttgaagcctcagaatattctgttgacaagtgaatctccattgggtgacattaagattgttgattttggcctttcaagaatattgaagaacagtgaagagctccgagaaattatgggtacccctgaatatgtggctcctgaaattcttagttatgatcctataagcatggcaacagatatgtggagcattggagtgttaacatatgtcatgcttacaggaatatcacctttcttaggcaatgataaacaagaaacattcttaaacatctcacagatgaatttaagttattctgaggaagaatttgatgttttgtctgagtcggctgttgatttcatcaggacacttttagttaagaaacctgaagatcgagccactgctgaagaatgtctaaagcacccctggttgacacagagcagtattcaagagccttctttcaggatggaaaaggcactagaagaagcaaatgccctccaagaaggtcattctgtgcctgaaattaattcggataccgacaaatcagaaaccaaggaatccattgtaaccgaagagttaattgtagttacttcatatactctaggacaatgcagacagtctgaaaaagagaaaatggagcaaaaggccatttccaaacgatttaaatttgaggaacctttgctacaagaaattccaggagaatttatctactgagcaatatttccctttagaacttcaagatttctacattgaaaatgttaatattatttatggacctctggccaaatggtacatgtactggaagtggataaccagtatcacttacacaaacaaaaataactttgtcaaatttgtggagttaggtggaagccagattttaaaagttgccaaccaggagatttaacaggtacagttacccgtttcaatgttatttttaagaagggagatgttggcacctttgaattctacatcctgtttctccagaatgagaatttgtgtacaaagatatttgtattcactttctttaaaaaatccaagtaaaagtgccaaaactacacttctgtaaatctcttgcattattcatatgtgtatctatatctgcataatgtttgttaatgtctactaaaattgctactttttcactttggatttgtttttggcaaaattttagtctaaacagacatctaaattttcgagacttagaataacattcactaaagtttgataatgtcttttttaaatattttcttactgctttatagtgacttgatttggtttctgttgtgtttttgcctaaatactagtaacatatcagtgaaaaaccctaattttttttctcttcaatgtcactagtaagagaggtggtaatttttcacctctgaaattattctgggtttaggtgtcagctcttgagctgcttccctcatcacaccacactcacatgcatctgttctctctcacactctatacccctgccacttcctggcacctccccccatgcttgtcatttaattttggccacttgtaggtatcagtgtgatctgatcaacactctggttaccttggtcagtgaaaagatgctactatattgcttttgtcccaaagtgagtaaaatcccctagagcagagagagagagagagagagagagtgtcttcatgccaaccacagcctgtttctgctgagtttcttatcagccctcaagctatgctaggaaaagttataaaatgccaaaatatttataaacatttactttgtccataaaaaatttacattggatactctgtaagtaggaggtactttgtcccaaaaagatgtataagaatgtactaatagttttatttgattaggattgaacagttcagttgtatctatgccccacagtgaccagtaaagtccaattaaaatatggaaatgtaaaagtgtatgccgaataccttaaagtaactaattatccttacacacaaaaggctcagtgcattaaatatttgcctatc

SEQ ID NO: 2254 - DNA, 866 bp, Homo sapiens
atggcggagcgcgggtacagcttttcgctgactacattcagcccgtctggtaaacttgtccagattgaatatgctttggctgctgtagctggaggagccccgtccgtgggaattaaagctgcaaatggtgtggtattagcaactgagaaaaaacagaaatccattctgtatgatgagcgaagtgtacacaaagtagaaccaattaccaagcatataggtttggtgtacagtggcatgggccccgattacagagtgcttgtgcacagagctcgaaaactagctcaacaatactatcttgtgtaccaagaacccattcctacagctcagctggtacagagagtagcttctgtgatgcaagaatatactcagtcaggtggtgttcgtccatttggagtttctttacttatttgtggttggaatgagggacgaccatatttatttcagtcagatccatctggagcttactttgcctggaaagctacagcaatgggaaagaactatgtgaatgggaagactttccttgagaaaagatataatgaagatctggaacttgaagatgccattcatacagccatcttaaccctaaaggaaagctttgaagggcaaatgacagaggataacatagaagttggaatctgcaatgaagctggatttaggaggcttactccaactgaagttaaggattacttggctgccatagcataacaatgaagtgactgaaaaatccagaatttcagataatctatctacttaaacatgtttaaagtatgttttgttttgcagactttttgcatacttatttctacatggtttaaatcgactgtttttaaaatgacacttataaatcctaataaactgttaaaccc

SEQ ID NO: 2255 - protein, 234 aa, Homo sapiens
MAERGYSFSLTTFSPSGKLVQIEYALAAVAGGAPSVGIKAANGVVLATEKKQKSILYDERSVHKVEPITKHIGLVYSGMGPDYRVLVHRARKLAQQYYLVYQEPIPTAQLVQRVASVMQEYTQSGGVRPFGVSLLICGWNEGRPYLFQSDPSGAYFAWKATAMGKNYVNGKTFLEKRYNEDLELEDAIHTAILTLKESFEGQMTEDNIEVGICNEAGFRRLTPTEVKDYLAAIA

SEQ ID NO: 2256 - DNA, 1323 bp, Homo sapiens
gctcggcgccctcttccctgcaaaccatgtttgccaaaggcagaggctcggcggtgccctcggatgggcaggcttgggaaaagttagcttcatacgtctacgaatatttactgcacgtaagagtacagaaatctgcagagaccttcttgtcggagattcgatgggaaaaaaacatcacgttgggagaaccgcctgggtttttgcactcgtggtggtgtgtatttggggacctttactgtgcagctcctcaaaggagagacacttgtgaacattcaagtgaagcaaaagcctttcatgattatagtgcagcagctgccccgagccccgtgcttggcaacattccccccaacgatgggatgccgggaggccccatcccgccaggtttctttcagggtcctccggggtcacagccctcgccgcacgcacagcctccacctcacaatcctagcagcatgatgggaccccacagtcagcctccgggaggagttcttgggacacagccattgctgcccaattctatggatcccacacgacaacaaggccaccccaacatgggaggatcaatgcagagaatgaaccctccccgaggcatggggcccatgggtcccggcccacagaattacggcagcggcatgagaccaccacccaactccctcggcccgccatgcccgggattaacatgggcccgggagctggcagaccctggcccaatcctaacagtgctaactcaattccatattcctcctcatcacctggtacctatgtgggacccccggtggtggcggccctccaggaacacccattatgcccagtcccgcagattcaacaaattccagtgacaacatctacacaatgacctggcggcaggtccaacttcccgatgggtcccggctcggacggtccgatgggcggcatgggtggcatggagccacaccacatgaatggatcattagggtcaggcgacatagacggacttccaaaaaattctcctaacaacataagtggcattagcaatcctccaggcacccctcgagatgacggcgagctaggagggagcttcctccactcctttcagaatgacaattattctccaagcatgacgatgagtgtgtgatccccccttctccgagacgctgagagagccggcattgcaggcgggaagacgccagaaattatgcaagaagtgaggtgttattatccaggagctggtggggagggcatctccctgctcccctaaaccccctcccaccccatccacgccccctacctttcccaattttagtttcatgcaataaaaaggccaaactttttattccataaaac

SEQ ID NO: 2257 - protein, 263 aa, Homo sapiens
MFAKGRGSAVPSDGQAWEKLASYVYEYLLHVRVQKSAETFLSEIRWEKNITLGEPPGFLHSWWCVFGDLYCAAPQRRDTCEHSSEAKAFHDYSAAAAPSPVLGNIPPNDGMPGGPIPPGFFQPFMSPRYVGGPGPPIRMGNQPPGGVLGTQPLLPNSMDPTRQQGHPNMGGSMQRMNPPRGMGPMGPGPQNYGSGMRPPPNSLGPPCPGLTWARELADPGPILTVLTQFHIPPHHLVPMWDPRWWRPSRNTHYAQSRRFNKFQ

SEQ ID NO: 2258 - DNA, 2817 bp, Homo sapiens
ggcgggttcgcgccccgaaggctgagagctggcgctgctcgtgccctgtgtgccagacggcggagctccgcggccggaccccgcggccccgctttgctgccgactggagtttgggggaagaaactctcctgcgccccagaggatttcttcctcggcgaagggacagcgaaagatgagggtggcaggaagagaagggcgctttctgtctgccggggtcgcagcgcgagagggcagtgccatgttcctctccatcctagtggcgctgtgcctgtggctgcacctggcgctgggcgtgcgcggcgcgccctgcgaggcggtgcgcatccctatgtgccggcacatgccctggaacatcacgcggatgcccaaccacctgcaccacagcacgcaggagaacgccatcctggccatcgagcagtacgaggagctggtggacgtgaactgcagcgccgtgctgcgcttcttcctctgtgccatgtacgcgcccatttgcaccctggagttcctgcacgaccctatcaagccgtgcaagtcggtgtgccaacgcgcgcgcgacgactgcgagcccctcatgaagatgtacaaccacagctggcccgaaagcctggcctgcgacgagctgcctgtctatgaccgtggcgtgtgcatctcgcctgaagccatcgtcacggacctcccggaggatgttaagtggatagacatcacaccagacatgatggtacaggaaaggcctcttgatgttgactgtaaacgcctaagccccgatcggtgcaagtgtaaaaaggtgaagccaactttggcaacgtatctcagcaaaaactacagctatgttattcatgccaaaataaaagctgtgcagaggagtggctgcaatgaggtcacaacggtggtggatgtaaaagagatcttcaagtcctcatcacccatccctcgaactcaagtcccgctcattacaaattcttcttgccagtgtccacacatcctgccccatcaagatgttctcatcatgtgttacgagtggcgctcaaggatgatgcttcttgaaaattgcttagttgaaaaatggagagatcagcttagtaaaagatccatacagtgggaagagaggctgcaggaacagcggagaacagttcaggacaagaagaaaacagccgggcgcaccagtcgtagtaatccccccaaaccaaagggaaagcctcctgctcccaaaccagccagtcccaagaagaacattaaaactaggagtgcccagaagagaacaaacccgaaaagagtgtgagctaactagtttccaaagcggagacttccgacttccttacaggatgaggctgggcattgcctgggacagcctatgtaaggccatgtgccccttgccctaacaactcactgcagtgctcttcatagacacatcttgcagcatttttcttaaggctatgcttcagtttttctttgtaagccatcacaagccatagtggtaggtttgccctttggtacagaaggtgagttaaagctggtggaaaaggcttattgcattgcattcagagtaacctgtgtgcatactctagaagagtagggaaaataatgcttgttacaattcgacctaatatgtgcattgtaaaataaatgccatatttcaaacaaaacacgtaatttttttacagtatgttttattaccttttgatatctgttgttgcaatgttagtgatgttttaaaatgtgatcgaaaatataatgcttctaagaaggaacagtagtggaatgaatgtctaaaagatctttatgtgtttatggtctgcagaaggatttttgtgatgaaaggggattttttgaaaaatctagagaagtagcatatggaaaactataatgtgtcttttttacaatgacttcagctctgtttttagctagaaactctaaaaacaaaaataataataaagaaaaataaataaaaaggagaggcagacaatgtctggattcctgttttttggttacctgatttcatgatcatgatgcttcttgtcaacaccctcttaagcagcaccagaaacagtgagtttgtctgtaccattaggagttaggtactaattagttggctaatgctcaagtattttatacccacaagagaggtatgtcactcatcttacttcccaggacatccaccctgagaataatttgacaagcttaaaaatggccttcatgtgagtgccaaattttgttttcttcatttaaatattttctttgcctaaatacatgtgagaggagttaaatataaatgtacagagaggaaagttgaggttccacctctgaaatgagaattacttgacagttgggatactttaatcagaaaaaaagaacttatcttgcagcattttatcaacaaatttcataattgtggacaattggaggcatttattttaaaaaacaattttattggccttttgctaacacagtaagcatgtattctctataaggcattcaataaatgcacaacgcccaaaggaaataaaatcctatctaatcctactctccactacacagaggtaatcactattagtattttggcatattattctccaggtgtttcttatgcacttataaaatgatttgaacaaataaaactaggaacctgctatacatgtgtttcataacctgcctcctttgcttggccctttattgagataagttttcctgtcaagaaagcagaaaccatctcatttctaacagctgtgttatattccatagtatgcattactcaacaaactgttgtgctattggatacttaggtggtttcttcactgacaatactgaataaacatctca

SEQ ID NO: 2259 - DNA, 3625 bp, Homo sapiens
gcgtgtgctggggcgagcgggagcgggcgaggatgggcacaggatagaggcagagccacccacgccgccgcggccccacgctgggcgacagagcctccagttccccttcaatggtggcgggtcgccggagctctgatcgccgggaacccttgccgctgctgtcctgcgaccccaagcaggtatagacacgtgtggccgtttacgctgtaggatcctcattcccactggctttgaacattttggggacttacaatgccgccacccgcggacatcgtcaaggtggccatagaatggccgggcgcctaccccaaactcatggaaattgatcagaaaaaaccactgtctgcaataataaaggaagtctgtgatgggtggtctcttgccaaccatgaatattttgcactccagcatgccgatagttcaaacttctatatcacagaaaagaaccgcaatgagataaaaaatggcactatccttcgattaaccacatctccagctcagaacgcccagcagctccatgaacgaatccagtcctcgagtatggatgccaagctggaagccctgaaggacttggccagcctctcccgggatgtcacgtttgcccaggagtttataaacctggacggtatctctctcctcacgcagatggtggagagcggcactgagcgataccagaaattgcagaagatcatgaagccttgctttggagacatgctgtccttcaccctgacggccttcgttgagctgatggaccatggcatagtgtcctgggatacattttcggtggcgttcattaagaagatagcaagttttgtgaacaagtcagccatagacatctcgatcctgcagcggtccttggccattttggagtcgatggtgctcaatagccatgacctctaccagaaagtggcgcaggagatcaccatcggccagctcattccacacctgcaagggtcagatcaagaaatccaaacctatactattgcagtgattaatgcgcttttcctgaaggctcctgatgagaggaggcaggagatggcgaatattttggctcagaagcaactgcgttccatcattttaacacatgtcatccgagcccagcgggccatcaacaatgagatggcgcaccagctgtatgttctacaagtgctcacctttaacctcctggaagacaggatgatgaccaaaatggacccccaggaccaggctcagagggacatcatatttgaacttcgaagaattgcttttgatgctgagtctgaacctaacaacagcagtggcagcatggagaaacgcaagtccatgtacacgcgagattataagaagcttgggttcattaatcatgtcaaccctgccatggacttcacgcagactccacctgggatgttggctctggacaacatgctgtactttgccaagcaccaccaagatgcctacatccggattgtgcttgagaacagtagtcgagaagacaagcatgaatgtccctttggccgcagtagtatagagctgaccaagatgctatgtgagatcttgaaagtgggcgagttgcctagtgagacctgcaacgacttccacccgatgttcttcacccacgacagatcctttgaggagtttttctgcatctgtatccagctcctgaacaagacatggaaggaaatgagggcaacttctgaagacttcaacaaggtaatgcaggtggtgaaggagcaggttatgagagcacttacaaccaagcctagctccctggaccagttcaagagcaaactgcagaacctgagctacactgagatcctgaaaatccgccagtccgagaggatgaaccaggaagatttccagtcccgcccgattttggaactaaaggagaagattcagccagaaatcttagagctgatcaaacagcaacgcctgaaccgccttgtggaagggacctgctttaggaaactcaatgcccggcggaggcaagacaagttttggtattgtcggctttcgccaaatcacaaagtcctgcattacggagacttagaagagagtcctcagggagaagtgccccacgattccttgcaggacaaactgccggtggcagatatcaaagccgtggtgacgggaaaggactgccctcatatgaaagagaaaggtgcccttaaacaaaacaaggaggtgcttgaactcgctttctccatcttgtatgactcaaactgccaactgaacttcatcgctcctgacaagcatgagtactgtatctggacggatggactgaatgcgctactcgggaaggacatgatgagcgacctgacgcggaatgacctggacaccctgctcagcatggaaatcaagctccgcctcctggacctggaaaacatccagatccctgacgcacctccgccgattcccaaggagcccagcaactatgacttcgtctatgactgtaactgaagtggccgggcccagacatgccccttccaaaactggaacacctagctaacaggagagaggaatgaaaacacacccacgccttggaaccgtcctttggtaaagggaagctgtgggtccacattcccttcagcatcacctctagccctggcaactttcagcccctagctggcatcttgctcaccgccctgattctgttcctcggctccactgcttcaggtcacttcccatggctgcagtccactggtgggacaagagcaaagcccactgccagtaagaaggccaaagggcccttccatcctagccctctgcaggcatgcccttccttcccttgggcaggaaagccagcagccccagactgcccaaaaacttgcccaccagaccaagggcagtgccccaaggcccctgtctggaggaaatggcctagctatttgatgagaagaccaaaccccacatcctcctttcccctctctctagaatcatctcgcaccaccagttacacttgaattaagatctgcgctcaaatctcctcccacctctctccctgcttttgccttgctctgttcctctttggtcccaagagcagcagccgcagcctcctcgtgatcctccctagcataaatttcccaaacagtccacaggtcccatgcccactttgcgtctgcactgtgatcgtgacaaatcttccctcctcaccagctagtctggggtttcctctccctgccccaggccagaactgccttcttcatttccacccacgctcccagcctcttagctgaaagcacaaatggtgaaatcagtagtctcgctccatctctaatagactaaacctaaatgcctctaggacggactgttgctatccaagcgtttggtgttaccttctcctgggaggtcctgctgcaactcaagttccacaggatggtcaagctgtcagacatccaagtttacatcattgtaattattactggtatttacaatttgcaagagttttgggttagtttttttttttttttttgctttgtttttgtacaaaagagtctaacattttttgccaaacagatatatatttaatgaaaagaagagatacataaatgtgtgaatttccagtttttttttaattattttaatcccaaacatcttcctgaaaataacattcccttaaacatgctgtggaataaaatggattgtgatg

SEQ ID NO: 2260 - DNA, 2162 bp, Homo sapiens
catttaaaggtgtgcggcgggtctctgttcacatggctcaactggaaacctgtttcatgaacaagcttactcaggaaccatctggtggtattccagcacattgttcttcagggggacgactctaagtcgctttgtggtggcagcagcttagaatcagtatttgtggttgggaaagatggacttacgggagcttggtaatgcaggtggtgaaggagcaggttatgagagcacttacaaccaagcctagctccctggaccagttcaagagcaaactgcagaacctgagctacactgagatcctgaaaatccgccagtccgagaggatgaaccaggaagatttccagtcccgcccgattttggaactaaaggagaagattcagccagaaatcttagagctgatcaaacagcaacgcctgaaccgccttgtggaagggacctgctttaggaaactcaatgcccggcggaggcaagacaagttttggtattgtcggctttcgccaaatcacaaagtcctgcattacggagacttagaagagagtcctcagggagaagtgccccacgattccttgcaggacaaactgccggtggcagatatcaaagccgtggtgacgggaaaggactgccctcatatgaaagagaaaggtgcccttaaacaaaacaaggaggtgcttgaactcgctttctccatcttgtatgactcaaactgccaactgaacttcatcgctcctgacaagcatgagtactgtatctggacggatggactgaatgcgctactcgggaaggacatgatgagcgacctgacgcggaatgacctggacaccctgctcagcatggaaatcaagctccgcctcctggacctggaaaacatccagatccctgacgcacctccgccgattcccaaggagcccagcaactatgacttcgtctatgactgtaactgaagtggccgggcccagacatgccccttccaaaactggaacacctagctaacaggagagaggaatgaaaacacacccacgccttggaaccgtcctttggtaaagggaagctgtgggtccacattcccttcagcatcacctctagccctggcaactttcagcccctagctggcatcttgctcaccgccctgattctgttcctcggctccactgcttcaggtcacttcccatggctgcagtccactggtgggacaagagcaaagcccactgccagtaagaaggccaaagggcccttccatcctagccctctgcaggcatgcccttccttcccttgggcaggaaagccagcagccccagactgcccaaaaacttgcccaccagaccaagggcagtgccccaaggcccctgtctggaggaaatggcctagctatttgatgagaagaccaaaccccacatcctcctttcccctctctctagaatcatctcgcaccaccagttacacttgaattaagatctgcgctcaaatctcctcccacctctctccctgcttttgccttgctctgttcctctttggtcccaagagcagcagccgcagcctcctcgtgatcctccctagcataaatttcccaaacagtccacaggtcccatgcccactttgcgtctgcactgtgatcgtgacaaatcttccctcctcaccagctagtctggggtttcctctccctgccccaggccagaactgccttcttcatttccacccacgctcccagcctcttagctgaaagcacaaatggtgaaatcagtagtctcgctccatctctaatagactaaacctaaatgcctctaggacggactgttgctatccaagcgtttggtgttaccttctcctgggaggtcctgctgcaactcaagttccacaggatggtcaagctgtcagacatccaagtttacatcattgtaattattactggtatttacaatttgcaagagttttgggttagttttttttttttttttgctttgtttttggacaaaagagtctaacattttttgccaaacagatatatatttaatgaaaagaagagatacataaatgtgtgaatttccagtttttttttaattattttaatcccaaacatcttcctgaaaataacattcccttaaacatgctgtggaataaaatggattgtgatgaaaaaaaaaaaaaaaaaaaaaaaaaaaaaaaaa

SEQ ID NO: 2261 - protein, 247 aa, Homo sapiens
MQVVKEQVMRALTTKPSSLDQFKSKLQNLSYTEILKIRQSERMNQEDFQSRPILELKEKIQPEILELIKQQRLNRLVEGTCFRKLNARRRQDKFWYCRLSPNHKVLHYGDLEESPQGEVPHDSLQDKLPVADIKAVVTGKDCPHMKEKGALKQNKEVLELAFSILYDSNCQLNFIAPDKHEYCIWTDGLNALLGKDMMSDLTRNDLDTLLSMEIKLRLLDLENIQIPDAPPPIPKEPSNYDFVYDCN

SEQ ID NO: 2262 - DNA, 1662 bp, Homo sapiens
gcacccggcagcggtctcaggccaagccccctgccagcatggccagcgagttcaagaagaagctcttctggagggcagtggtggccgagttcctggccacgaccctctttgtcttcatcagcatcggttctgccctgggcttcaaatacccggtggggaacaaccagacggcggtccaggacaacgtgaaggtgtcgctggccttcgggctgagcatcgccacgctggcgcagagtgtgggccacatcagcggcgcccacctcaacccggctgtcacactggggctgctgctcagctgccagatcagcatcttccgtgccctcatgtacatcatcgcccagtgcgtgggggccatcgtcgccaccgccatcctctcaggcatcacctcctccctgactgggaactcgcttggccgcaatgacctggctgatggtgtgaactcgggccagggcctgggcatcgagatcatcgggaccctccagctggtgctatgcgtgctggctactaccgaccggaggcgccgtgaccttggtggctcagccccccttgccatcggcctctctgtagcccttggacacctcctggctattgactacactggctgtgggattaaccctgctcggtcctttggctccgcggtgatcacacacaacttcagcaaccactggattttctgggtggggccattcatcgggggagccctggctgtactcatctacgacttcatcctggccccacgcagcagtgacctcacagaccgcgtgaaggtgtggaccagcggccaggtggaggagtatgacctggatgccgacgacatcaactccagggtggagatgaagcccaaatagaaggggtctggcccgggcatccacgtagggggcaggggcaggggcgggcggagggaggggaggggtgaaatccatactgtagacactctgacaagctggccaaagtcacttccccaagatctgccagacctgcatggtcaagcctcttatgggggtgtttctatctctttctttctctttctgtttcctggcctcagagcttcctggggaccaagatttaccaattcacccactcccttgaagttgtggaggaggtgaaagaaagggacccacctgctagtcgcccctcagagcatgatgggaggtgtgccagaaagtcccccctcgccccaaagttgctcaccgactcacctgcgcaagtgcctgggattctaccgtaattgctttgtgcctttgggcaggccctccttcttttcctaacatgcaccttgctcccaatggtgcttggagggggaagagatcccaggaggtgcagtggagggggcaagctttgctccttcagttctgcttgctcccaagcccctgacccgctcggacttactgcctgaccttggaatcgtccctatatcagggcctgagtgacctccttctgcaaagtggcagggaccggcagagctctacaggcctgcagcccctaagtgcaaacacagcatgggtccagaagacgtggtctagaccagggctgctctttccacttgccctgtgttctttccccaggggcatgactgtcgccacacgcctctgcatatatgtctctttggagttggaatttcattatatgttaagaaaataaaggaaaatgacttgtaaggtc

SEQ ID NO: 2263 - protein, 269 aa, Homo sapiens
MASEFKKKLFWRAVVAEFLATTLFVFISIGSALGFKYPVGNNQTAVQDNVKVSLAFGLSIATLAQSVGHISGAHLNPAVTLGLLLSCQISIFRALMYIIAQCVGAIVATAILSGITSSLTGNSLGRNDLADGVNSGQGLGIEIIGTLQLVLCVLATTDRRRRDLGGSAPLAIGLSVALGHLLAIDYTGCGINPARSFGSAVITHNFSNHWIFWVGPFIGGALAVLIYDFILAPRSSDLTDRVKVWTSGQVEEYDLDADDINSRVEMKPK

SEQ ID NO: 2264 - DNA, 4171 bp, Homo sapiens
tcagtccccgtgcacagacctgcacaaatggctgagcctcatcattcctgacagcgaggagatcttggatgtgccaggcctagtgaaagaccaacaatctcactgcagggcccgccagccccagggaaggggaggagttcttgccgcgccgacgccgccgtcgccacggcaacgcggccatactgcgccggacagacccagttgcctggtgctgcggcccggcgtgggcctcgtgggcagagccagagccagagccatggacagcctcttcgtggaggaggtggccgcctccttggtcagggagttcctcagcagaaagggcttaaagaagacatgtgtgaccatggaccaggaacgcccacgctctgacctcagcataaacaacagaaatgatcttcgaaaggttttgcatcttgaatttctctataaggagaacaaggcaaaggaaaatcctctaaaaacaagccttgaactcatcaccagatactttctggatcactttggaaatacggctaacaatttcactcaagataccccaatccctgcactctcagttccaaagaaaaataacaaagtgccatcaagatgctcagagactacactggtaaatatatatgacctttcagatgaagatgcaggatggagaacatcattgtcagaaacaagcaaagccagacatgacaatcttgatggagatgtacttggtaattttgtatcatctaaaaggcccccgcacaaaagtaagcccatgcagacggtcccgggtgaaactcctgtgttgacttctgcatgggagaagatagacaagcttcactcggagccttccttggatgtgaagaggatgggagagaattccaggccaaagtctggtctgattgtgcgaggcatgatgtctgggcccatcgccagctccccacaggtgaggaaatcagggacagagaagttaagcagcttgccacaggtgacacagttggtaggtggtgatgcagactggagcgacggcttcacctgctgcatgaacctgctctctgattcttttcacagacactatctgagacggtcctcaccgtcaagcagctccacccaaccccaagaagagagccggaaggtccctgagctctttgtctgcacccaacaggacattctggcttcgagcaacagctccccctccaggacctccctgggtcagcttagtgaactgaccgtagaaaggcagaaaaccactgccagcagccctccccatctgcccagcaaacggctgcccccatgggacagggccaggccgagggatccctccgaggacaccccagcagtggacggcagcacagacacggacaggatgcccttgaagctctacttgcctggtggtaattccaggatgacccaggagaggctggaaagagcgttcaaacggcagggcagccagcccgcacctgtcaggtattacagtaaagataaactgcaaagcctgtccctggatatcaccttagatgcattggatgccctggggggaaagtttgctggtatccctggggtctcattcctaaagactgaagcagctctcttgttcttccccagcgtgtttttctacggcctgcattgggttttgctgcatttgcagacatttttggataatgtacacttatggaaaaatcagttgctgccgtctgacaaggtggatggtgagctgggtgccctgcggctcgaggatgtggaggatgagttgataagggaagaggtcatcctgtcgccagtcccatcagtgctcaagttgcagacagcatcaaaaccaattgacctctcagtagcaaaggcacttcagatgtggctggtgcagcaagagctggggaataagaccctctgctttggagatgttaaaattgaacatggatttaaggagcacttgcttcccactagcctttgccaatgtgtcccaggagtcagatcctgtgctaagccccgtgatgcctacagagatgagctcctcaagaagcctctgcaccacaggggtggtccttgcggagtcctggcagctgtccaaggctgtgtcctacagaaactcctgtttgaaggagatagcaaagccgactgtgctcagggactgcagccttcagatgcccaccggacccgctgcctcgtcctggccctcgcagacattgtgtggcgggcagggggccgagagagagccgttgttgcactggcttcgagaacacagcagttcagtccaacagggaaatacaaagcagatggagtcttagaaacacttacgcttcacagtttgacctgctatgaggacctggtgacttttcttcaacaaagcattcatcagaactttcccaaagaccctgaaggcctgggcacagccctgggaaatgatcaggccctggcagcaccagatgtcccttgggtaggcaatggggcctaccctaggaacaaaaggaggcagtttgaagtgggcccctatggctgcatcctgctcaccctttctgccatcctgtccaggtctacagagctgggcctctgctgtggattcgggggaggacagtgggggctctgtggcctcgtgcgccaggctgcctgctgcttgctgcttctgaccttattaaatgcgtaccagagccagggtgaggacatcatggacagatgtaaacctagccgagtgctgccgaccactgcctgcctggccacttcattgtcagaggccccaagaagagtcgagaaacagacctttgagggagctctcacaagccccaaggatgctcagggtcctggggtcaggacagctctgaaccagacctgggcagcactgagcatgggctgctctggtgcctcagtggagcacagacctggccaggtcattgaggccctgagaagggtccagtgtgacccccagggccgtgtgtgcccccagggttgtgtgtacccccctgggtcaggggccctcaatggacctcacaggggcaaagaagaccctgagcacagttgcttgtcatcagtcctctcagtcacccaggaacttgtcaatctgctcctgactgggaaagctgtgtccaacgttttcaacgatgtggttgagctggattctggggatgggaacatcacacttctcagaggcattgctgcacgcagtgatattggcttcttatctctctttgagcattacaacatgtgccaggttggctgcttcctgaagaccccgaggttccccatctgggtggtttgcagtgagagccacttcagcatcctctttagcctgcagccggggctcctgcgtgactggaggactgagaggctctttgacttgtactactacgatggcctggccaaccagcaggagcagatccggctgaccattgacaccacccaaaccatctctgaggacacagacaacgaccttgtcccacccctcgagctctgcatcagaaccaagtctgtgttccatgtctgcgagaactttgctgacaccagctgcctgcctgttccacttcccccatcaatcccccatcatggtgggtccaccttggcagttgttcctagaaaagctgagtgggctctatcaggcacctttttccccatgaaaaacactgggtccatcaacgttgaaaagcagttaaggcagtatcagcaatgggcactcactgccgaggagaagtctgacttcaccaagccaagccagtttgtctccaaatacggcaccagtgtctcttatttgagcagtgaagatgaacgctctgatatggataaattccatcaaagtggctcaaccccaaaacccaatagactcctctggatctgcttgacacacagaagcccagtaaatagtctgaagcacttggatagcatagaagcacttaattcttccacatccaatggatttcaaaaagaagatgagaacatgcagaagtgcggtggcctgctgatgaagaaggggaccccagcagcctcttcccaaactgcccctggctgcctgcagccttccctggtgttctttgattcacctgggtccttgccctctggctccccatgtccatctgtcaaatcctacccatcccacaaggccagctccaaggcccctcctctaagaagccctcctggattacccagccgacagttcaagtcctcccctctgagtgctcacaggactcaatcacctcctctttcacaagcctag

SEQ ID NO: 2265 - DNA, 2742 bp, Homo sapiens
gtcactcgtataaaaacctatgctttgaaggttctcgtgtgtctcggcctgcaggtctcgctcagagctgtgtccctgaacatccaccctgctggggtggcttgacgcacttctgtgcaaatctgttcgctcgcaaccctacctacctctctcccgaaccggagaaaaccttcggcggggtccttccgggttttgtgtcgaatctgcggcggcgacccggcgccgcgtcacgcggtggtgaatgtgcggcagtacgcgcgccgcgtcgtttacgcggcgatttcatcatgctccgagccggcggcgcgcgccgcttccgtcgccaccctctctggacagcccagggccgcaggctcatgccctctccgcgtccagtgctgcttagaggtgctcgcgccgctctgctgctgctgctgccgccccggctcttagcccgaccctcgctcctcctccgccggtccctcagcgcggcctcctgcgccccgatctccttgcccgccgccgcctcccggagcagcatggacggcgcgggggctgaggaggtgctggcacctctgaggctagcagtgcgccagcagggagatcttgtgcgaaaactcaaagaagataaagcaccccaagtagacgtagacaaagcagtggctgagctcaaagcccgcaagagggttctggaagcaaaggagctggcgttacagcccaaagatgatattgtagaccgagcaaaaatggaagataccctgaagaggaggtttttctatgatcaagcttttgctatttatggaggtgttagtggtctgtatgactttgggccagttggctgtgctttgaagaacaatattattcagacctggaggcagcactttatccaagaggaacagatcctggagatcgattgcaccatgctcacccctgagccagttttaaagacctctggccatgtagacaaatttgctgacttcatggtgaaagacgtaaaaaatggagaatgttttcgtgctgaccatctattaaaagctcatttacagaaattgatgtctgataagaagtgttctgtcgaaaagaaatcagaaatggaaagtgttttggcccagcttgataactatggacagcaagaacttgcggatctttttgtgaactataatgtaaaatctcccattactggaaatgatctatcccctccagtgtcttttaacttaatgttcaagactttcattgggcctggaggaaacatgcctgggtacttgagaccagaaactgcacaggggattttcttgaatttcaaacgacttttggagttcaaccaaggaaagttgccttttgctgctgcccagattggaaattcttttagaaatgagatctcccctcgatctggactgatcagagtcagagaattcacaatggcagaaattgagcactttgtagatcccagtgagaaagaccaccccaagttccagaatgtggcagaccttcacctttatttgtattcagcaaaagcccaggtcagcggacagtccgctcggaaaatgcgcctgggagatgctgttgaacagggtgtgattaataacacagtattaggctatttcattggccgcatctacctctacctcacgaaggttggaatatctccagataaactccgcttccggcagcacatggagaatgagatggcccattatgcctgtgactgttgggatgcagaatccaaaacatcctacggttggattgagattgttggatgtgctgatcgttcctgttatgacctctcctgtcatgcacgagccaccaaagtcccacttgtagctgagaaacctctgaaagaacccaaaacagtcaatgttgttcagtttgaacccagtaagggagcaattggtaaggcatataagaaggatgcaaaactggtgatggagtatcttgccatttgtgatgagtgctacattacagaaatggagatgctgctgaatgagaaaggggaattcacaattgaaactgaagggaaaacatttcagttaacaaaagacatgatcaatgtgaagagattccagaaaacactatatgtggaagaagttgttccgaatgtaattgaaccttccttcggcctgggtaggatcatgtatacggtatttgaacatacattccatgtacgagaaggagatgaacagagaacattcttcagtttccctgctgtagttgctccattcaaatgttccgtcctcccactgagccaaaaccaggagttcatgccatttgtcaaggaattatcggaagccctgaccaggcatggagtatctcacaaagtagacgattcctctgggtcaatcggaaggcgctatgccaggactgatgagattggcgtggcttttggtgtcaccattgactttgacacagtgaacaagaccccccacactgcaactctgagggaccgtgactcaatgcggcagataagagcagagatctctgagctgcccagcatagtccaagacctagccaatggcaacatcacatgggctgatgtggaggccaggtatcctctgtttgaagggcaagagactggtaaaaaagagacaatcgaggaatgaggacaattttgacaacttttgaccacttgcgctaataaaaaaaaaaaaactactcttatgtccactttacaaaagaaaacagcattgtgattactcccagggaccgtattttatcttcagtggctgcctgattttacccccacaattaaagttgaaggaatcctga

SEQ ID NO: 2266 - protein, 685 aa, Homo sapiens
MDGAGAEEVLAPLRLAVRQQGDLVRKLKEDKAPQVDVDKAVAELKARKRVLEAKELALQPKDDIVDRAKMEDTLKRRFFYDQAFAIYGGVSGLYDFGPVGCALKNNIIQTWRQHFIQEEQILEIDCTMLTPEPVLKTSGHVDKFADFMVKDVKNGECFRADHLLKAHLQKLMSDKKCSVEKKSEMESVLAQLDNYGQQELADLFVNYNVKSPITGNDLSPPVSFNLMFKTFIGPGGNMPGYLRPETAQGIFLNFKRLLEFNQGKLPFAAAQIGNSFRNEISPRSGLIRVREFTMAEIEHFVDPSEKDHPKFQNVADLHLYLYSAKAQVSGQSARKMRLGDAVEQGVINNTVLGYFIGRIYLYLTKVGISPDKLRFRQHMENEMAHYACDCWDAESKTSYGWIEIVGCADRSCYDLSCHARATKVPLVAEKPLKEPKTVNVVQFEPSKGAIGKAYKKDAKLVMEYLAICDECYITEMEMLLNEKGEFTIETEGKTFQLTKDMINVKRFQKTLYVEEVVPNVIEPSFGLGRIMYTVFEHTFHVREGDEQRTFFSFPAVVAPFKCSVLPLSQNQEFMPFVKELSEALTRHGVSHKVDDSSGSIGRRYARTDEIGVAFGVTIDFDTVNKTPHTATLRDRDSMRQIRAEISELPSIVQDLANGNITWADVEARYPLFEGQETGKKETIEE

SEQ ID NO: 2267 - DNA, 684 bp, Homo sapiens
atgacagatgccgctgtgtccttcgccaaggacttcctggcaggtggagtggccgaagccatctccaagacagcggtagcgcccatcgagcaggtcaagctgctgctgcaggcttttaacttcgccttcaaagataaatacaagcagatcttcctgggtgggaatctggcatcaggaggtgccgctggggccacatacttgtgttttgtgtaccctcttgattttgcccgtacctgtctagcagctaatgtgggtaaagctgaagctgaaagggaattccgaggcctctgtgactgcctggttaagatctacaaatctgatgggattaagggcctgtaccaaggctttaacgtgtctatgcagggtattatccgagctgcctacttcggtatctatgacaccgcaaagggaatgcttccggatcccaaggacactcacatcgtcatcagctggatgaccacacagactgtcactgccttttctgggttgacttcctattcatttgacatctcagggcgcaaagtaactgacatcatgtacacaggcacacttgactgctggaggaagattgctggtgatgaaggaggcaaagcttttttcaagggttcatggtccagtgttctcagaggcatgggtggtgcttttgtgcttgtcttgtttgatgaaatcaagaagtacaggtaa

SEQ ID NO: 2268 - protein, 227 aa, Homo sapiens
MTDAAVSFAKDFLAGGVAEAISKTAVAPIEQVKLLLQAFNFAFKDKYKQIFLGGNLASGGAAGATYLCFVYPLDFARTCLAANVGKAEAEREFRGLCDCLVKIYKSDGIKGLYQGFNVSMQGIIRAAYFGIYDTAKGMLPDPKDTHIVISWMTTQTVTAFSGLTSYSFDISGRKVTDIMYTGTLDCWRKIAGDEGGKAFFKGSWSSVLRGMGGAFVLVLFDEIKKYR

SEQ ID NO: 2269 - DNA, 2873 bp, Homo sapiens
tcggcgggacggctcccggctgcagtctgcccgcccgccccgcgcgggggccgagtcgcgaagcgcgcctgcgacccggcgtccgggcgcgctggagaggacgcgaggagccatgaggcgccagcctgcgaaggtggcggcgctgctgctcgggctgctcttggagtgcacagaagccaaaaagcattgctggtatttcgaaggactctatccaacctattatatatgccgctcctacgaggactgctgtggctccaggtgctgtgtgcgggccctctccatacagaggctgtggtacttctggttccttctgatgatgggcgtgcttttctgctgcggagccggcttcttcatccggaggcgcatgtaccccccgccgctgatcgaggagccagccttcaatgtgtcctacaccaggcagcccccaaatcccggcccaggagcccagcagccggggccgccctattacaccgacccaggaggaccggggatgaaccctgtcgggaattccatggcaatggctttccaggtcccacccaactcaccccaggggagtgtggcctgcccgccccctccagcctactgcaacacgcctccgcccccgtacgaacaggtagtgaaggccaagtagtggggtgcccacgtgcaagaggagagacaggagagggcctttccctggcctttctgtcttcgttgatgttcacttccaggaacggtctcgtgggctgctaagggcagttcctctgatatcctcacagcaagcacagctctctttcaggctttccatggagtacaatatatgaactcacactttgtctcctctgttgcttctgtttctgacgcagtctgtgctctcacatggtagtgtggtgacagtccccgagggctgacgtccttacggtggcgtgaccagatctacaggagagagactgagaggaagaaggcagtgctggaggtgcaggtggcatgtagaggggccaggccgagcatcccaggcaagcatccttctgcccgggtattaataggaagccccatgccgggcggctcagccgatgaagcagcagccgactgagctgagcccagcaggtcatctgctccagcctgtcctctcgtcagccttcctcttccagaagctgttggagagacattcaggagagagcaagccccttgtcatgtttctgtctctgttcatatcctaaagatagacttctcctgcaccgccagggaagggtagcacgtgcagctctcaccgcaggatggggcctagaatcaggcttgccttggaggcctgacagtgatctgacatccactaagcaaatttatttaaattcatgggaaatcacttcctgccccaaactgagacattgcattttgtgagctcttggtctgatttggagaaaggactgttacccatttttttggtgtgtttatggaagtgcatgtagagcgtcctgccctttgaaatcagactgggtgtgtgtcttccctggacatcactgcctctccagggcattctcaggcccgggggtctccttccctcaggcagctccagtggtgggttctgaagggtgctttcaaaacggggcacatctggctgggaagtcacatggactcttccagggagagagaccagctgaggcgtctctctctgaggttgtgttgggtctaagcgggtgtgtgctgggctccaaggaggaggagcttgctgggaaaagacaggagaagtactgactcaactgcactgaccatgttgtcataattagaataaagaagaagtggtcggaaatgcacattcctggataggaatcacagctcaccccaggatctcacaggtagtctcctgagtagttgacggctagcggggagctagttccgccgcatagttatagtgttgatgtgtgaacgctgacctgtcctgtgtgctaagagctatgcagcttagctgaggcgcctagattactagatgtgctgtatcacggggaatgaggtgggggtgcttattttttaatgaactaatcagagcctcttgagaaattgttactcattgaactggagcatcaagacatctcatggaagtggatacggagtgatttggtgtccatgcttttcactctgaggacatttaatcggagaacctcctggggaattttgtgggagacacttgggaacaaaacagacaccctgggaatgcagttgcaagcacagatgctgccaccagtgtctctgaccaccctggtgtgactgctgactgccagcgtggtacctcccatgctgcaggcctccatctaaatgagacaacaaagcacaatgttcactgtttacaaccaagacaactgcgtgggtccaaacactcctcttcctccaggtcatttgttttgcatttttaatgtctttattttttgtaatgaaaaagcacactaagctgcccctggaatcgggtgcagctgaataggcacccaaaagtccgtgactaaatttcgtttgtctttttgatagcaaattatgttaagagacagtgatggctagggctcaacaattttgtattcccatgtttgtgtgagacagagtttgttttcccttgaacttggttagaattgtgctactgtgaacgctgatcctgcatatggaagtcccacttcggtgacatttcctggccattcttgtttccattgtgtggatggtgggttgtgcccacttcctggagtgagacagctcctggtgtgtagaattcccggagcgtccgtggttcagagtaaacttgaagcagatctgtgcatgcttttcctctgcaacaattggctcgtttctcttttttgttctcttttgataggatcctgtttcctatgtgtgcaaaataaaaataaatttgggca

SEQ ID NO: 2270 - protein, 172 aa, Homo sapiens
MRRQPAKVAALLLGLLLECTEAKKHCWYFEGLYPTYYICRSYEDCCGSRCCVRALSIQRLWYFWFLLMMGVLFCCGAGFFIRRRMYPPPLIEEPAFNVSYTRQPPNPGPGAQQPGPPYYTDPGGPGMNPVGNSMAMAFQVPPNSPQGSVACPPPPAYCNTPPPPYEQVVKAK

SEQ ID NO: 2271 - DNA, 516 bp, Homo sapiens
gccgctcctggtgctgcttgtgtgctcgtttggtgcggacctggtacctcttttgtgaagtggcagctgaggagaccggcgctcgccatggccgacgaaaagcccaaccaaggagtcaagtcggagaacaacgatcatactaatttgaaggtggcggggcaggatggttctgtggtgcagtttaagattaagaggcatacaccacttagtaaactaatgaaagcctattgtaagcaacagggattgtcaatgaggcagatcagattccgattcgacgggcaaccaatcaaggaaacagacacacctgcacagttggaaatggagaatgaagatacaattgatgtgttccaacagcagacgggaggtgtctactgaaaagggaacctgcttctttactccagaactctgttccttaaagaccaagattacattctcaattagtctttcatttcccccttccccattcctttattgtacataactggtatatgtgcacaagcatattgcatttttttt

SEQ ID NO: 2272 - protein, 95 aa, Homo sapiens [sequence omitted]

SEQ ID NO: 2273 - DNA, 1407 bp, Homo sapiens
ggaggaaaattcttccagcgatggtctcccactcagagctgaggaagcttttctactcagcagatgctgtgtgttttgatgttgacagcacggtcatcagagaagaaggaatcgatgagctagccaaaatctgtggcgttgaggacgcggtgtcagaaatgacacggcgagccatgggcggggcagtgcctttcaaagctgctctcacagagcgcttagccctcatccagccctccagggagcaggtgcagagactcatagcagagcaacccccacacctgacccccggcataagggagctggtaagtcgcctacaggagcgaaatgttcaggttttcctaatatctggtggctttaggagtattgtagagcatgttgcttcaaagctcaatatcccagcaaccaatgtatttgccaataggctgaaattctactttaacggtgaatatgcaggttttgatgagacgcagccaacagctgaatctggtggaaaaggaaaagtgattaaacttttaaaggaaaaatttcattttaagaaaataatcatgattggagatggtgccacagatatggaagcctgtcctcctgctgatgctttcattggatttggaggaaatgtgatcaggcaacaagtcaaggataacgccaaatggtatatcactgattttgtagagctgctgggagaactggaagaataacatccattgtcgtacagctccaaacaacttcagatgaatttttacaagttatacagattgatactgtttgcttacagttgcctattacaacttgctatagaaagttggtacaaatgatctgtactttaaactacagttaggaatcctagaagattgctttttttttttttttaactgtagttccagtattatatgatgactattgatttcctggagaggttttttttttttttgagacagaatcttgctctgttgcccaggctggagtgcagtggcgcggtctcggctcactgcaagctctgcctcccaggttcacgccattctcctgcctcagcctcccgagtagctgggactacaggcacccgccaccacatccggctaattttttgtatttttagtagagacggggtttgaccgtgttagccaggatggtcttgatctcctgaccttgtgatccgcctgcctcagcctcccaaagtgctgggattacaggcttgggccaccgcgcccagccaatgtcctagagagttttgtgatctgaattctttatgtatatttgtagctatatttcatacaaagtgctttaagtgtggagagtcaattaaacacctttactcttagaaatacggattcggcagccttcagtgaatattggtttctctttggtatgtcaataaaagtttatccgtatgtcagaacggatttgtgg

SEQ ID NO: 2274 - DNA, 2010 bp, Homo sapiens
cgagaagacccggatagttcctcccggccacgccgcgccggctctgggcactcagcatcgtttccttttcctccgctggagcagctatggcggcggtgaagaccctgaaccccaaggccgaggtggcccgagcgcaggcggcgctggcggtcaacatcagcgcagcgcggggtctgcaggacgtgctaaggaccaacctggggcccaagggcaccatgaagatgctcgtttctggcgctggagacatcaaacttactaaagacggcaatgtgctgcttcacgaaatgcaaattcaacacccaacagcttccttaatagcaaaggtagcaacagcccaggatgatataactggtgatggtacgacttctaatgtcctaatcattggagagctgctgaaacaggcggatctctacatttctgaaggccttcatcctagaataatcactgaaggatttgaagctgcaaaggaaaaggcccttcagtttttggaagaagtcaaagtaagcagagagatggacagggaaacacttatagatgtggccagaacatctcttcgtactaaagttcatgctgaacttgcagatgtcttaacagaggctgtagtggactccattttggccattaaaaagcaagatgaacctattgatctcttcatgattgagatcatggagatgaaacataaatctgaaactgatacaagcttaatcagagggcttgttttggaccacggagcacggcatcctgatatgaagaaaagggtggaggatgcatacatcctcacttgtaacgtgtcattagagtatgagaaaacagaagtgaattctggctttttttacaagagtgcagaagagagagaaaaactcgtgaaagctgaaagaaaattcattgaagatagggttaaaaaaataatagaactgaaaaggaaagtctgtggcgattcagataaaggatttgttgttattaatcaaaagggaattgaccccttttccttagatgctctttcaaaagaaggcatagtcgctctgcgcagagctaaaaggagaaatatggagaggctgactcttgcttgtggtggggtagccctgaattcttttgacgacctaagtcctgactgcttgggacatgcaggacttgtatatgagtatacattgggagaagagaagtttacctttattgagaaatgtaacaaccctcgttctgtcacattattgatcaaaggaccaaataagcacacactcactcagatcaaagatgcagtgagggacggcttgagggctgtcaaaaatgctattgatgatggctgtgtggttccaggtgctggtgccgtggaagtggcaatggcagaagccctgattaaacataagcccagtgtaaagggcagggcacagcttggagtccaagcatttgctgatgcattgctcattattcccaaggttcttgctcagaactctggttttgaccttcaggaaacattagttaaaattcaagcagaacattcagaatcaggtcagcttgtgggtgtggacctgaacacaggtgagccaatggtggcagcagaagtaggcgtatgggataactattgtgtaaagaaacagcttcttcactcctgcactgtgattgccaccaacattctcttggttgatgagatcatgcgagctggaatgtcttctctgaaaggttgaattgaagcttcctctgtatctgaatcttgaagactgcaaagtgatcctgaggattacagctgtggaatttttgtccaagcttcaaataattttgaaagaaattttcccatatgaaaaaaggagagaacactggcatctgttgaaatttggaagttctgaaattatagtatttttaaaaattgcactgaagtgtatacacataaagcaggtcttttatccagtgaacaggatgttttgctttagcagcagtgacataaaattccatgttagataagcatatgttacttaccttgttattaaatatttcttgaaaagcaggccacgaagg

SEQ ID NO: 2275 - protein, 531 aa, Homo sapiens
MAAVKTLNPKAEVARAQAALAVNISAARGLQDVLRTNLGPKGTMKMLVSGAGDIKLTKDGNVLLHEMQIQHPTASLIAKVATAQDDITGDGTTSNVLIIGELLKQADLYISEGLHPRIITEGFEAAKEKALQFLEEVKVSREMDRETLIDVARTSLRTKVHAELADVLTEAVVDSILAIKKQDEPIDLFMIEIMEMKHKSETDTSLIRGLVLDHGARHPDMKKRVEDAYILTCNVSLEYEKTEVNSGFFYKSAEEREKLVKAERKFIEDRVKKIIELKRKVCGDSDKGFVVINQKGIDPFSLDALSKEGIVALRRAKRRNMERLTLACGGVALNSFDDLSPDCLGHAGLVYEYTLGEEKFTFIEKCNNPRSVTLLIKGPNKHTLTQIKDAVRDGLRAVKNAIDDGCVVPGAGAVEVAMAEALIKHKPSVKGRAQLGVQAFADALLIIPKVLAQNSGFDLQETLVKIQAEHSESGQLVGVDLNTGEPMVAAEVGVWDNYCVKKQLLHSCTVIATNILLVDEIMRAGMSSLKG

SEQ ID NO: 2276 - DNA, 953 bp, Homo sapiens
cagacacactgtgacggctgcctgaagctagtgagtcgcggcgccgcgcactggtggttgggtcagtgccgcgcgccgatcggtcgttaccgcgaggcgctggtggccttcaggctggacggcgcgggtcagccctggttcgccggcttctgggtctttgaacagccgcgatgtcgatcttcacccccaccaaccagatccgcctaaccaatgtggccgtggtacggatgaagcgtgccgggaagcgcttcgaaatcgcctgctacaaaaacaaggtcgtcggctggcggagcggcgtggaaaaagacctcgatgaagttctgcagacccactcagtgtttgtaaatgtttctaaaggtcaggttgccaaaaaggaagatctcatcagtgcgtttggaacagatgaccaaactgaaatctgtaagcagattttgactaaaggagaagttcaagtatcagataaagaaagacacacacaactggagcagatgtttagggacattgcaactattgtggcagacaaatgtgtgaatcctgaaacaaagagaccatacaccgtgatccttattgagagagccatgaaggacatccactattcggtgaaaaccaacaagagtacaaaacagcaggctttggaagtgataaagcagttaaaagagaaaatgaagatagaacgtgctcacatgaggcttcggttcatccttccagtcaatgaaggcaagaagctgaaagaaaagctcaagccactgatcaaggtcatagaaagtgaagattatggccaacagttagaaatcgtatgtctgattgacccgggctgcttccgagaaattgatgagctaataaaaaaggaaactaaaggcaaaggttctttggaagtactcaatctgaaagatgtagaagaaggagatgagaaatttgaatgacacccatcaatctcttcacctctaaaacac

SEQ ID NO: 2277 - protein, 250 aa, Homo sapiens
MSIFTPTNQIRLTNVAVVRMKRAGKRFEIACYKNKVVGWRSGVEKDLDEVLQTHSVFVNVSKGQVAKKEDLISAFGTDDQTEICKQILTKGEVQVSDKERHTQLEQMFRDIATIVADKCVNPETKRPYTVILIERAMKDIHYSVKTNKSTKQQALEVIKQLKEKMKIERAHMRLRFILPVNEGKKLKEKLKPLIKVIESEDYGQQLEIVCLIDPGCFREIDELIKKETKGKGSLEVLNLKDVEEGDEKFE

SEQ ID NO: 2278 - DNA, 1503 bp, Homo sapiens
gacactatccgtgcggccaggcggagacccggaggaccgaagcttccggacgacgaggaaccgcccaacatggcctcggagagtgggaagctttggggtggccggtttgtgggtgcagtggaccccatcatggagaagttcaacgcgtccattgcctacgaccggcacctttgggaggtggatgttcaaggcagcaaagcctacagcaggggcctggagaaggcagggctcctcaccaaggccgagatggaccagatactccatggcctagacaaggtggctgaggagtgggcccagggcaccttcaaactgaactccaatgatgaggacatccacacagccaatgagcgccgcctgaaggagctcattggtgcaacggcagggaagctgcacacgggacggagccggaatgaccaggtggtcacagacctcaggctgtggatgcggcagacctgctccacgctctcgggcctcctctgggagctcattaggaccatggtggatcgggcagaggcggaacgtgatgttctcttcccggggtacacccatttgcagagggcccagcccatccgctggagccactggattctgagccacgccgtggcactgacccgagactctgagcggctgctggaggtgcggaagcggatcaatgtcctgcccctggggaggtggggccattgcaggcaatcccctgggtgtggaccgagagctgctccgagcagaactcaactttggggccatcactctcaacagcatggatgccactagtgagcgggactttgtggccgagttcctgttctgggcttcgctgtgcatgacccatctcagcaggatggccgaggacctcatcctctactgcaccaaggaattcagcttcgtgcagctctcagatgcctacagcacgggaagcagcctgatgccccagaagaaaaaccccgacagtttggagctgatccggagcaaggctgggcgtgtgtttgggcggtgtgccgggctcctgatgaccctcaagggacttcccagcacctacaacaaagacttacaggaggacaaggaagctgtgtttgaagtgtcagacactatgagtgccgtgctccaggtggccactggcgtcatctctacgctgcagattcaccaagagaacatgggacaggctctcagccccgacatgctggccactgaccttgcctattacctggtccgcaaagggatgccattccgccaggcccacgaggcctccgggaaagctgtgttcatggccgagaccaagggggtcgccctcaaccagctgtcactgcaggagctgcagaccatcagccccctgttctcgggcgacgtgatctgcgtgtgggactacgggcacagtgtggagcagtatggtgccctgggcggcactgcgcgctccagcgtcgactggcagatccgccaggtgcgggcgctactgcaggcacagcaggcctaggtcctcccacacctgccccctaataaagtgggcgcgag

SEQ ID NO: 2279 - protein, 437 aa, Homo sapiens
MASESGKLWGGRFVGAVDPIMEKFNASIAYDRHLWEVDVQGSKAYSRGLEKAGLLTKAEMDQILHGLDKVAEEWAQGTFKLNSNDEDIHTANERRLKELIGATAGKLHTGRSRNDQVVTDLRLWMRQTCSTLSGLLWELIRTMVDRAEAERDVLFPGYTHLQRAQPIRWSHWILRAIAGNPLGVDRELLRAELNFGAITLNSMDATSERDFVAEFLFWASLCMTHLSRMAEDLILYCTKEFSFVQLSDAYSTGSSLMPQKKNPDSLELIRSKAGRVFGRCAGLLMTLKGLPSTYNKDLQEDKEAVFEVSDTMSAVLQVATGVISTLQIHQENMGQALSPDMLATDLAYYLVRKGMPFRQAHEASGKAVFMAETKGVALNQLSLQELQTISPLFSGDVICVWDYGHSVEQYGALGGTARSSVDWQIRQVRALLQAQQA

SEQ ID NO: 2280 - DNA, 916 bp, Homo sapiens
ctctttcccatcttgcaagatggcaggtgaaaaagttgagaagccagatactaaagagaagaaacccgaagccaagaaggctgatgctggtggcaaggtgcaagagggtaatcttaaagttaaaaagcccaagaaggggaagccctattgcagccacaaccctgtccttgtcagaggaactggcaggtattcccgatctgccatgtattctagaaaggccatgtataagaggaagtactcagccgctaaatcaaagattgaaaagaaaaaggagaaggttcttgcaactgttacaaaaccagttggtggtgacaagaatggtggtacccaggtggttaaacttcacaaaatgcctagatactatcctaccgaagatgtacctcgaaagctgttgagccacagcaaaaaacccttcagtcagcatgtgagaaaactgcaagccagcattacccctgggaccattctgatcatcctcactggatgccacaggggcaagagggtggttttcctgaagcagctggctagtggcttgttacttgtgactggacctctggtcctcaattgagttcctctacgaggaacacaccagaaatttgtcattgccacctcaaccaaaatcgatatcagcaatgtaaaaatcccaaaacatcttactgatgcttacttcaagaagcagcagctgcggaagcccagacaccaggaaggcaacatcttcgacacagaaaaagagaaatatgagattacagagcagcgcaagattgatcagaaagctgtggactcacaaattttaccaaaagtcaaagctatttctcagctccagggctacctgcgatctgtgtttgccctgacgaatggaatttatcctcacaaattggtgttctaaatgtcttaagaacctaattaaatagctaagtac

SEQ ID NO: 2281 - DNA, 7011 bp, Homo sapiens
cgcttcctgcgcctcttcaggtcaccgcttgctctagttcccaggctttggcctctagtggatgagaatcaccgagtctgcggggctggacgctgaccgcccgggccagcacctaggcgggcgggagctgtgcggcccagggttcgcgcgggccgggtagaggctcgagccgggacccccgagcgtgaaccccggagccagcggcgctggggccagaggggccaggcgggaggtggtggcggaggcgaaggggcgacgggacctgggcctggcccgtgtgtgtcctcggcggcctggcgccggccgtcgctgtacggtgagccccagggaggcggatctgggccccgagaaggacacccgcctggatttgccccgtaggcccggcccgggcccctcgggagcagaacagccttggtgaggtggacgggaggggacttcgcgagcagacgcgcgcgccagcgacagcagcccgccccggcctctcgggagccgtggggcagaggctgcagagccccaggagggggccagtgtcattcaaagatgtggctgtggatttcacccaggaggagtggtggcaactggaccctgatgagaagataacatacggggatgtgatgttggagaactacagccatctagtttccctggcttatgaggtggcaacatcttgtacttcggagatctgaagccgagcaacttgcccaagtccttcttcttttcccattaacaagatatgatatcaccaagccaaacgtcatcattaagttggagcagggagaggagctgtggataacgggaggtgaatttccatgtcaacatagtccagcccttcacatcctcagccgaagatctcacttcctcccagaggcctttgctgactgacccctcagggattgtgggactttaccaaatcggtttgtaataacacctagaagacgctatccgatccatcaggcccagtattcctgtctgggggtacttcccaccgtgtgctggaatggttatcacaagaaggctgtgctgtcccctcgcaactccaggatggtgtgtagcccagtgactgtgaggatcgcccctcctgacagaagattttcgcgttctgcgataccagagcagataatcagctcaacactgtcctcaccatcaagtaacgccccagacccatgtgcaaaggagacagtactgagtgccctcaaagagaaggagaagaaaaggacagtggaggaagaagaccaaatattccttgatggccaggaaaataaaagaaggcgccatgatagcagtggcagtggacattcagcatttgagcccctggtggccaatggagtccccgcttcttttgtgcctaagcctgggtctctgaagagaggcctcaattctcagagctcagatgaccacttgaataagagatcccgaagctcttccatgagctccttgacaggcgcttacgcaagtggcatccctagctccagccgcaatgccattaccagttcctacagctccactcgaggcatctcacagctctggaagagaaatggccccagttcatcacccttctctagcccagcctcctcccgctcccagacaccggagaggccagcaaagaaaataagagaagaggagctgtgtcatcattccagttcttcaactccattggcagcagacagggagtcccagggagaaaaggctgcagatacaaccccaaggaagaaacaaaactcgaattctcagtctacacctggcagctctgggcagcgtaagcggaaagttcagctgctgccttctcggcgaggggaacagctgaccttgcctccacctccccagcttggctattcgatcactgccgaggacctagacttagagaagaaggcttcattacagtggttcaaccaggccttggaggacaagagcgatgctgcctcgaactctgtcactgagaccccacctatcactcagccttcatttacctttaccctgcctgctgctgcacctgcctccccacccacctccctcctggccccaagcaccaacccactgttagagagcttgaagaagatgcagactcccccgagcctgccaccctgcccagaatctgctggagcagcaaccactgaggccctctcacctccaaagacacccagcctcctacccccgctgggtttatcacagtcagggccgccagggctgctccccagcccctcctttgactccaaacccccgaccactttgctggggctgatccctgctccatccatggtaccagccactgacaccaaggcacctccaacccttcaggcagagacggctaccaaaccccaagccacatctgccccgtcccccgcccccaagcaaagcttcctgtttggaacacagaacacctcaccttccagccctgccgcccctgctgcatcttcagcacctcccatgttcaagcccattttcacggctccacccaagagtgagaaggaaggccccacaccgcctggcccttcagtcacagccacagcgccctccagctcctccctccccacgaccaccagcaccacagccccgaccttccagcctgtctttagcagcatggggccacctgcatctgtgcccttgcctgctcccttcttcaagcagacaactactcccgccactgctcccaccacaactgccccgctcttcactggcctggccagcgccacctctgctgtggctcccatcacctctgccagtccatccacagactctgcttcgaagcctgcgtttggctttggcataaacagtgtgagcagcagcagtgtgagtaccacgaccagcaccgccactgccgcctcacagcctttcctcttcggggcgccccaggcctctgctgccagcttcaccccggccatgggctccatattccagtttggcaaacctcctgccttgcccacaaccaccacagtcaccaccttcagccagtccctgcacactgccgtgccaacggccaccagcagcagcgctgccgactttagtggttttggcagcaccctcgccacctccgccccggccaccagcagccagcccactctgacgttcagtaacacgagcacccccacgttcaacattccctttggctcaagcgccaagtccccgctcccatcatatccgggagccaacccccagcccgcatttggggccgctgaggggcagccaccgggggccgccaagccggcccttgcccccagctttggcagctctttcacttttggaaactctgcagccccggctgctgcacccacacctgcacctccgtccatgatcaaggtcgtgcctgcgtacgtgcctacgcccatccatcctatctttggcggtgccacgcactcggcgtttgggttgaaagccacggcttcggccttcggcgctcccgccagctcacagcccgcctttggcggctccactgctgtcttcttcggtgcagccaccagctccggctttggagccaccacccagaccgccagcagcgggagcagcagctcggtgtttggcagcacaacaccatcacccttcacgtttgggggttcggcagcccccgctggcagtgggagctttgggatcaatgtggccaccccaggctccagcaccaccaccggagctttcagctttggagcaggacagagtgggagcacagccacctccacccccttcgcagggggcttaggtcagaacgccctgggcaccaccggccagagcacaccgtttgccttcaacgtgagcagcacaactgagagcaaacctgtgtttggaggcaccgccacccccacctttggtctgaacacccctgcgcctggagtgggcacatcaggcagcagcctctcctttggggcatcctcagcacccgcccaaggctttgttggtgttgcacctttcggcaacacttttgctcaccagcaagaacacagcccgaggaagggacccaataacctttcaaaacgcaaactgctgcctgcggtgagggcccagggtcttccacggagaggacaggcatcttcctttcccaccaggaaggagtgagcccggagcctctgctatgtgcaaggcggtgtgcaagcaccggctgcagctttttgctctcttctttctctttggggctgggctgggtgtgcgttctggtgctgatgctttggcctgtgaggctgagctagagaaatgtagatgttagatgtgccagtaccatcctgcgcctcccaagcatgcccccactcactcacgtcggcatctcgacccgttcaattacagcaacgaagaagccaccgctaagcgtggtcttgggggaagcccggaggcagtgctcggcacccgggaacgtgctcaggcctcggtggggccgggcaggcagggcgggagctagcctgcaagagaaacagccccaatgctgggtaagagagcagttcaccccatccccccctccacgaccctggcgcacgccctgtacctgaaggcgcccgggttctgctgcagcgcatcttgtaccatgtcttcattctcctcctggcagagggagcacatggagtagacgagccgctgcagggaagggaaagtgagcgcgtggcacagggctcgctgctggaaccctgccagggcatgcagacgcaccgggctaggtgtccctgccccgggctcctccagctgtctgctcggcatacctaaggaaaagcgtgtctcggttacacagcttcacaggctgcctcagtcctgaaatcctcgctcctgaaatcctcgcttcacagaggagaacttttgctccagggtcccaagcccattaaagtgtcagaactaagaccaaaacagatgactccaggtctaagctgctgtggacctctgagtccctcagccacgccttctcaccatctcacccgagccactgcaggaaggatccagcaggacatagtggacctcacgatagcgcggatctaagggggagaccgccaggaagtcctcctcagccagctcacagcaggagacgccagcccaggccagcagcgtggccatggatgccagccgcctggcatccaggtcaaaggcaaagatcttcctagggcagagggcagagcaggggtgagctgagcatgcatggagcagctaagggcctgtcacagctgacacagacaaccagaacatgcaggttaagccaggacacacaatattgaaacagcctatatttaaagggcccagggtcagaggtaactggcctggggtctctgccccaagggctaagggatccacatctcacacctgcagtggggaaagcttagcttggggcaaataccgtgaactactttggtgcagcaggaaagagttaagcgaaagtcatcctttcagccttcattacccactgaaaggcacaaaatcaaaccccatgtcctcctcctcctcctgtggcactcacccttggttcttcagaagagcagccaagtgactggtctttattgcctggggtggcacaggcatccatgacatgggagcctggcgggggtccagcagcatggctgggagacagctggcctggcaggcagaacacaggggccgggtaaacagagaccccaggctaggcccttcccgtgcctacacattcttcccttttctattcctcttgcctaccctgtcctgcagaatgaggtgtccggcccggtacagtgggtgttcatgcagatctgtctgggcgggaaacaccagcagctccggcatcaaggggtccaggagaaaatgcttccccttgagggctcgtaagtcatcgaggctgccagggaagaaccattcattcatcatttcctgaatttctccctgccaggccctatttcaacggtccattcatgcaacaaatgttaccacagctatggagaaatcaacagggtgataagggaatccgggatccgcagttgagggaatgggttgtcaagccagacttatgggtcaggagccccctctactgtttaccagcagtgggagcctgggcaagtgattcaatctcaagccccactggcatctctgtaaaatagtaggtgtgaggattcaatgagccaatatatccaagatacttacgtgccacaatttaataaatgttagctattcctgttgaagcataaccttggagaaaggttactttacaggggggtgaggagtggggaagtgagagctgagctcattcttgatggatgaggagttagtcatgtgaggcgcttaggttaaaactacattcactataactcagtaaagcagtcccgcccactctccgacccatgcagaaataggcctagggagtcacatgtctcagttcagaaatctatcgaagtggcagagctggaattcaaacacaagcagccgttctctgctattccaccctggtgtccaagcaacatggtagggcagaaggaagaggatcttacaaagagtaagggaaagggagaggggcagaggctgcttctcagagccaccaaaggacaaaataagacaggtgtgagcccagtggaggaggcacggggcagagaccagccactgttgctggcacgctggtgcacgtagcactgtggcagatggacctggagaggaagcaggagggacagcacaatggagccaagaaaggacttagcatggccgggcgcggtggttcatgcctgtaatcccagcattttgggaggccaaggtgggcagatcacctgaggtcaggagtttgagaccagcctggccaacatggagaaatcccgtctctactaaaaatacaaaattagccaggcatggtgctgcatgcctgcaatcctgtagggaaaagaaagagagatcagactgttactgtgtctgtgtagaaagggaagacataagaaattccattttgacctgtaccttgaacaattggttggctgagatgctgttaatttgtgactttgccccaaatttgagctcacaaaaacatgtgttgtatggaatcaaggtttaaaggatctagggctgtgcaggacatgccttgttaataaaacgtttacaagc

SEQ ID NO: 2282 - DNA, 1415 bp, Homo sapiens
gccagggagcactggaggccacccagtcatgggggacaccttcatccgtcacatcgccctgctgggctttgagaagcgcttcgtacccagccagcactatgtacatgttcctggtgaaatggcaggacctgtcggagaaggtggtctaccggcgcttcaccgagatctacgagttccataaaaccttaaaagaaatgttccctattgaggcaggggcgatcaatccagagaacaggatcatcccccacctcccagctcccaagtggtttgacgggcagcgggccgccgagaaccaccagggcacacttaccgagtactgcggcacgctcatgagcctgcccaccaagatctcccgctgtccccacctccttgacttcttcaaggtgcgccctgatgacctcaagctccccacggacaaccagacaaaaaagccagagacatacttgatgcccaaagatggcaagagtaccgcgacagacatcaccggccccatcatcctgcagacgtaccgcgccattgccaactacgagaagacctcgggctccgagatggctctgtccacgggggacgtggtggaggtcgtggagaagagcgagagcggttggtggttctgtcagatgaaagcaaagcgaggctggatcccagcatccttcctcgagcccctggacagtcctgacgagacggaagaccctgagcccaactatgcaggtgagccatacgtcgccatcaaggcctacactgctgtggagggggacgaggtgtccctgctcgagggtgaagctgttgaggtaattcacaagctcctggacggctggtgggtcatcaggaaagacgacgtcacaggctacttcccgtccatgtacctgcaaaagtcagggcaagacgtgtcccaggcccaacgccagatcaagcggggggcgccgccccgcaggtcgtccatccgcaacgtgcacagcatccaccagcggtcgcggaagcgcctcagccaggacgcctatcgccgcaacagcgtccgttttctgcagcagcgacgccgccaggcgcggccgggaccgcagagccccgggagcccgctcgaggaggagcggcagacgcagcgctctaaaccgcagccggcggtgcccccgcggccgagcgccgacctcatcctgaaccgctgcagcgagagcaccaagcggaagctggcgtctgccgtctgaggctggagcgcagtccccagctagcgtctcggcccttgccgccccgtgcctgtatatacgtgttctatagagcctggcgtctggacgccgagggcagccccgacccctgtccagcgcggctcccgccaccctcaataaatgttgcttggagtggaccgaggctctgcaggaatgcagggagggccgggctccgccccagggttatttctaagttga

SEQ ID NO: 2283 - protein, 366 aa, Homo sapiens [sequence omitted]

SEQ ID NO: 2284 - DNA, 3293 bp, Homo sapiens
ccccgcgctgcgcggagcagggaccaggcggttgcggcggcgacagccatggccggcgcgctggcaggtctggccgcgggcttgcaggtcccgcgggtcgcgcccagcccagactcggactcggacacagactcggaggacccgagtctccggcgcagcgcgggcggcttgctccgctcgcaggtcatccacagcggtcacttcatggtgtcgtcgccgcacagcgactcgctgccccggcggcgcgaccaggaggggtccgtggggccctccgacttcgggccgcgcagtatcgaccccacactcacacgcctcttcgagtgcttgagcctggcctacagtggcaagctggtgtctcccaagtggaagaatttcaaaggcctcaagctgctctgcagagacaagatccgcctgaacaacgccatctggagggcctggtatatccagtatgtgaagcggaggaagagccccgtgtgtggcttcgtgacccccctgcaggggcctgaggctgatgcgcaccggaagccggaggccgtggtcctggaggggaactactggaagcggcgcatcgaggtggtgatgcgggaataccacaagtggcgcatctactacaagaagcggctccgtaagcccagcagggaagatgacctcctggcccctaagcaggcggaaggcaggtggccgccgccggagcaatggtgcaaacagctcttctccagtgtggtccccgtgctgctgggggacccagaggaggagccgggtgggcggcagctcctggacctcaattgctttttgtccgacatctcagacactctcttcaccatgactcagtccggcccttcgcccctgcagctgccgcctgaggatgcctacgtcggcaatgctgacatgatccagccggacctgacgccactgcagccaagcctggatgacttcatggacatctcagatttctttaccaactcccgcctcccacagccgcccatgccttcaaacttcccagagccccccagcttcagccccgtggttgactccctcttcagcagtgggaccctgggcccagaggtgcccccggcttcctcggccatgacccacctctctggacacagccgtctgcaggctcggaacagctgccctggccccttggactccagcgccttcctgagttctgatttcctccttcctgaagaccccaagccccggctcccaccccctcctgtacccccacctctgctgcattaccctccccctgccaaggtgccaggcctggagccctgccccccacctcccttccctcccatggcaccacccactgctttgctgcaggaagagcctctcttctctcccaggtttcccttccccaccgtccctcctgccccaggagtgtctccgctgcctgctcctgcagccttcccacccaccccacagtctgtccccagcccagcccccacccccttccccatagagcttctacccttggggtattcggagcctgcctttgggccttgcttctccatgcccagaggcaagccccccgccccatcccctaggggacagaaagccagcccccctaccttagcccctgccactgccagtccccccaccactgcggggagcaacaacccctgcctcacacagctgctcacagcagctaagccggagcaagccctggagccaccacttgtatccagcaccctcctccggtccccagggtccccgcaggagacagtccctgaattcccctgcacattccttcccccgaccccggcccctacaccgccccggccacctccaggcccggccacattggccccttccaggcccctgcttgtccccaaagcggagcggctctcacccccagcgcccagcggcagtgaacggcggctgtcaggggacctcagctccatgccaggccctgggactctgagcgtccgtgtctctcccccgcaacccatcctcagccggggccgtccagacagcaacaagaccgagaaccggcgtatcacacacatctccgcggagcagaagcggcgcttcaacatcaagctggggtttgacacccttcatgggctcgtgagcacactcagtgcccagcccagcctcaaggtgagcaaagctaccacgctgcagaagacagctgagtacatccttatgctacagcaggagcgtgcgggcttgcaggaggaggcccagcagctgcgggatgagattgaggagctcaatgccgccattaacctgtgccagcagcagctgcccgccacaggggtacccatcacacaccagcgttttgaccagatgcgagacatgtttgatgactacgtccgaacccgtacgctgcacaactggaagttctgggtgttcagcatcctcatccggcctctgtttgagtccttcaacgggatggtgtccacggcaagtgtgcacaccctccgccagacctcactggcctggctggaccagtactgctctctgcccgctctccggccaactgtcctgaactccctacgccagctgggcacatctaccagtatcctgaccgacccgggccgcatccctgagcaagccacacgggcagtcacagagggcacccttggcaaacctttatagtcctggccagaccctgctgctcactcagctgccctgggggctgctttccctgggcacgggctccagggatcatctctgggcactcccttcctgccccaggccctggctctgcccttccctggggggtggagcagggtccaggtttcacacttgccacctcctggaggtcaagaagagcagagtccccgtccctgctctgccactgtgctccagcaccgtgaccttgggtgactcgtccgctgtctttggaccgctgtgtttcaatctgcaaaatggggatggggaaggttcaatcagcagatgacccccaggccttggcagctgtgacattgggggcctaggctggcaactccgggggctcaacggtggaaagaggaggatgctgtttatctgtcacctccacttgctccccgacaggtggggcacagacctctgttcctgagcagagaagcagaaaaggaggttccctctctctgctccttcactgctgacccagaggggctgcaggatggtttcccctgggagaggccaggagggcctgatcccaggagacaccagggccagagtgaccacagcagggcaggcatcatgtgtgtgtgtgtgtgtggatgtgtgtgtgtgggttttgtaaagaattcttgaccaataaaagcaaaaactgtctgctggttaaaaaaaaaaaaaaa

SEQ ID NO: 2285 - protein, 852 aa, Homo sapiens
MAGALAGLAAGLQVPRVAPSPDSDSDTDSEDPSLRRSAGGLLRSQVIHSGHFMVSSPHSDSLPRRRDQEGSVGPSDFGPRSIDPTLTRLFECLSLAYSGKLVSPKWKNFKGLKLLCRDKIRLNNAIWRAWYIQYVKRRKSPVCGFVTPLQGPEADAHRKPEAVVLEGNYWKRRIEVVMREYHKWRIYYKKRLRKPSREDDLLAPKQAEGRWPPPEQWCKQLFSSVVPVLLGDPEEEPGGRQLLDLNCFLSDISDTLFTMTQSGPSPLQLPPEDAYVGNADMIQPDLTPLQPSLDDFMDISDFFTNSRLPQPPMPSNFPEPPSFSPVVDSLFSSGTLGPEVPPASSAMTHLSGHSRLQARNSCPGPLDSSAFLSSDFLLPEDPKPRLPPPPVPPPLLHYPPPAKVPGLEPCPPPPFPPMAPPTALLQEEPLFSPRFPFPTVPPAPGVSPLPAPAAFPPTPQSVPSPAPTPFPIELLPLGYSEPAFGPCFSMPRGKPPAPSPRGQKASPPTLAPATASPPTTAGSNNPCLTQLLTAAKPEQALEPPLVSSTLLRSPGSPQETVPEFPCTFLPPTPAPTPPRPPPGPATLAPSRPLLVPKAERLSPPAPSGSERRLSGDLSSMPGPGTLSVRVSPPQPILSRGRPDSNKTENRRITHISAEQKRRFNIKLGFDTLHGLVSTLSAQPSLKVSKATTLQKTAEYILMLQQERAGLQEEAQQLRDEIEELNAAINLCQQQLPATGVPITHQRFDQMRDMFDDYVRTRTLHNWKFWVFSILIRPLFESFNGMVSTASVHTLRQTSLAWLDQYCSLPALRPTVLNSLRQLGTSTSILTDPGRIPEQATRAVTEGTLGKPL

SEQ ID NO: 2286 - DNA, 3287 bp, Homo sapiens
ccccgcgctgcgcggagcagggaccaggcggttgcggcggcgacagccatggccggcgcgctggcaggtctggccgcgggcttgcaggtcccgcgggtcgcgcccagcccagactcggactcggacacagactcggaggacccgagtctccggcgcagcgcgggcggcttgctccgctcgcaggtcatccacagcggtcacttcatggtgtcgtcgccgcacagcgactcgctgccccggcggcgcgaccaggaggggtccgtggggccctccgacttcgggccgcgcagtatcgaccccacactcacacgcctcttcgagtgcttgagcctggcctacagtggcaagctggtgtctcccaagtggaagaatttcaaaggcctcaagctgctctgcagagacaagatccgcctgaacaacgccatctggagggcctggtatatccagtatgtgaagcggaggaagagccccgtgtgtggcttcgtgacccccctgcaggggcctgaggctgatgcgcaccggaagccggaggccgtggtcctggaggggaactactggaagcggcgcatcgaggtggtgatgcgggaataccacaagtggcgcatctactacaagaagcggctccgtaagcccagcagggaagatgacctcctggcccctaagcaggcggaaggcaggtggccgccgccggagcaatggtgcaaacagctcttctccagtgtggtccccgtgctgctgggggacccagaggaggagccgggtgggcggcagctcctggacctcaattgctttttgtccgacatctcagacactctcttcaccatgactcagtccggcccttcgcccctgcagctgccgcctgaggatgcctacgtcggcaatgctgacatgatccagccggacctgacgccactgcagccaagcctggatgacttcatggacatctcagatttctttaccaactcccgcctcccacagccgcccatgccttcaaacttcccagagccccccagcttcagccccgtggttgactccctcttcagcagtgggaccctgggcccagaggtgcccccggcttcctcggccatgacccacctctctggacacagccgtctgcaggctcggaacagctgccctggccccttggactccagcgccttcctgagttctgatttcctccttcctgaagaccccaagccccggctcccaccccctcctgtacccccacctctgctgcattaccctccccctgccaaggtgccaggcctggagccctgccccccacctcccttccctcccatggcaccacccactgctttgctgcaggaagagcctctcttctctcccaggtttcccttccccaccgtccctcctgccccaggagtgtctccgctgcctgctcctgcagccttcccacccaccccacagtctgtccccagcccagcccccacccccttccccatagagcttctacccttggggtattcggagcctgcctttgggccttgcttctccatgcccagaggcaagccccccgccccatcccctaggggacagaaagccagcccccctaccttagcccctgccactgccagtccccccaccactgcggggagcaacaacccctgcctcacacagctgctcacagcagctaagccggagcaagccctggagccaccacttgtatccagcaccctcctccggtccccagggtccccgcaggagacagtccctgaattcccctgcacattccttcccccgaccccggcccctacaccgccccggccacctccaggcccggccacattggccccttccaggcccctgcttgtccccaaagcggagcggctctcacccccagcgcccagcggcagtgaacggcggctgtcaggggacctcagctccatgccaggccctgggactctgagcgtccgtgtctctcccccgcaacccatcctcagccggggccgtccagacagcaacaagaaccggcgtatcacacacatctccgcggagcagaagcggcgcttcaacatcaagctggggtttgacacccttcatgggctcgtgagcacactcagtgcccagcccagcctcaaggtgagcaaagctaccacgctgcagaagacagctgagtacatccttatgctacagcaggagcgtgcgggcttgcaggaggaggcccagcagctgcgggatgagattgaggagctcaatgccgccattaacctgtgccagcagcagctgcccgccacaggggtacccatcacacaccagcgttttgaccagatgcgagacatgtttgatgactacgtccgaacccgtacgctgcacaactggaagttctgggtgttcagcatcctcatccggcctctgtttgagtccttcaacgggatggtgtccacggcaagtgtgcacaccctccgccagacctcactggcctggctggaccagtactgctctctgcccgctctccggccaactgtcctgaactccctacgccagctgggcacatctaccagtatcctgaccgacccgggccgcatccctgagcaagccacacgggcagtcacagagggcacccttggcaaacctttatagtcctggccagaccctgctgctcactcagctgccctgggggctgctttccctgggcacgggctccagggatcatctctgggcactcccttcctgccccaggccctggctctgcccttccctggggggtggagcagggtccaggtttcacacttgccacctcctggaggtcaagaagagcagagtccccgtccctgctctgccactgtgctccagcaccgtgaccttgggtgactcgtccgctgtctttggaccgctgtgtttcaatctgcaaaatggggatggggaaggttcaatcagcagatgacccccaggccttggcagctgtgacattgggggcctaggctggcaactccgggggctcaacggtggaaagaggaggatgctgtttatctgtcacctccacttgctccccgacaggtggggcacagacctctgttcctgagcagagaagcagaaaaggaggttccctctctctgctccttcactgctgacccagaggggctgcaggatggtttcccctgggagaggccaggagggcctgatcccaggagacaccagggccagagtgaccacagcagggcaggcatcatgtgtgtgtgtgtgtgtggatgtgtgtgtgtgggttttgtaaagaattcttgaccaataaaagcaaaaactgtctgctggttaaaaaaaaaaaaaaa

SEQ ID NO: 2287 - protein, 850 aa, Homo sapiens
MAGALAGLAAGLQVPRVAPSPDSDSDTDSEDPSLRRSAGGLLRSQVIHSGHFMVSSPHSDSLPRRRDQEGSVGPSDFGPRSIDPTLTRLFECLSLAYSGKLVSPKWKNFKGLKLLCRDKIRLNNAIWRAWYIQYVKRRKSPVCGFVTPLQGPEADAHRKPEAVVLEGNYWKRRIEVVMREYHKWRIYYKKRLRKPSREDDLLAPKQAEGRWPPPEQWCKQLFSSVVPVLLGDPEEEPGGRQLLDLNCFLSDISDTLFTMTQSGPSPLQLPPEDAYVGNADMIQPDLTPLQPSLDDFMDISDFFTNSRLPQPPMPSNFPEPPSFSPVVDSLFSSGTLGPEVPPASSAMTHLSGHSRLQARNSCPGPLDSSAFLSSDFLLPEDPKPRLPPPPVPPPLLHYPPPAKVPGLEPCPPPPFPPMAPPTALLQEEPLFSPRFPFPTVPPAPGVSPLPAPAAFPPTPQSVPSPAPTPFPIELLPLGYSEPAFGPCFSMPRGKPPAPSPRGQKASPPTLAPATASPPTTAGSNNPCLTQLLTAAKPEQALEPPLVSSTLLRSPGSPQETVPEFPCTFLPPTPAPTPPRPPPGPATLAPSRPLLVPKAERLSPPAPSGSERRLSGDLSSMPGPGTLSVRVSPPQPILSRGRPDSNKNRRITHISAEQKRRFNIKLGFDTLHGLVSTLSAQPSLKVSKATTLQKTAEYILMLQQERAGLQEEAQQLRDEIEELNAAINLCQQQLPATGVPITHQRFDQMRDMFDDYVRTRTLHNWKFWVFSILIRPLFESFNGMVSTASVHTLRQTSLAWLDQYCSLPALRPTVLNSLRQLGTSTSILTDPGRIPEQATRAVTEGTLGKPL

SEQ ID NO: 2288 - DNA, 2546 bp, Homo sapiens
gacggcaaatggcggacttcgacacctacgacgatcgggcctacagcagcttcggcggcggcagagggtcccgcggcagtgctggtggccatggttcccgtagccagaaggagttgcccacagagcccccctacacagcatacgtaggaaatctacctttcaatacggttcagggcgacatagatgctatctttaaggatctcagcataaggagtgtacggctagtcagagacaaagacacagataaatttaaaggattctgctatgtagaattcgatgaagtggattcccttaaggaagccttgacatacgatggtgcactgttgggcgatcggtcacttcgtgtggacattgcagaaggcagaaaacaagataaaggtggctttggattcagaaaaggtggaccagatgacagaggaatgggtagctctcgagaatctagaggtggatgggattcccgggatgacttcaattctggcttcagggatgacttcttagggggcaggggaggtagtcgcccaggcgaccggcgaacaggcccccccatgggcagccgcttcagagatggccctcccctccgtggatccaacatggatttcagagaacccacagaagaggaaagagcacagagaccacgactccagcttaaacctcgaacagtcgcgacgcccctcaatcaagtagccaatcccaactctgctatcttcgggggtgccaggcctagagaggaagtcgttcaaaaggagcaagaatgagcctgcggttgggagggaatggggcgtggggggttagagcaggaccacagcctggtgagtccccgggcagccgtcctgcagccgccactcctgcgcctgccattggcctcctcacagcggaaacacagcttgtgagtgcatgtcagctgttaacaagtggtttttagtacattctgggctttgctgtatctatctagtgcctgtttgtgcgtttttttctttcttccgctgcttccccattttccttctgtcctttttctcctgctccttgttttcccagcagcacatggggttcctcggaggagcagaggtggccgccgtgggggggcgtttgggctgcggtgctgcgtcatttttcctttgctttctctttactttagacactggcccaactccaggcgtttcctttcattccctcagtgcttctcttctgacctgcatgttgagttctgtattgctggggcttccaacaaaaaccagagtcactgacagagggaacagcagagaccttgttggtattcagctgtgatggatatagagaatcagaggcaccttgttttcacaactaggataaaaatatctgcagggtcctttccattcctatttagagggagtcctggctccatgaccccctcccgagtggactgtccaagcagataggctcacacgagaaacagtgaggctgaaagggggggctatggaagagcggtagggagtccacggagaagatgcagtgaatgcttgcatgcattcacacgtgtgtgtgtcccagctagttcactcctttcgccgtgcgtggtggaggctggcctctctggctgggtgcagtgaatggccagcgggtttcttttctgctgggccaaggcgctttgggggtggagggggtggtgctggtgctgcactgggctgactgcggcgctgacgcagcgtttccccccatccctgttgcctgtgtgttgtgtggatctgttcctagtataggcaacataatgagatactgtgcttcccacctccccttcagttcagagccaaaatgggtctagaatctggcactttactcatttcctttgataaattgtactatgcagagctgtcaggaaccttcagatagcagtagaggactgcagctgtctaggtctgcggccacatcttggggacacactggactgttcccatgtgcagggttcagcagttatgtgggagtgctaggggttaggcttttgagcttgaacgcctgcgtgtgaacagatgaaaaatccttcagtacccaagtcccagtctgtcctatggggagcagtttgggggcggccggcagcaggagcctgggaaagaggccctcgccaggtgatggcagggccagggtggcctggggcacccagcggaatgtgcttagtatttggtcaccagccgtcatcctgggcttttcctactgtgtcttgttacaaggcctcagcaatccacagaactctctctccttccttccacctgtcagcttctctgcttctgagataagaaccatttgtgtaacaccaacacttaacttcagaaagacatgcattatgtggtgtaatcaaacccgatgctttcagatgacctacttacatcttcaatgtggataagataaagaacaaaacacatgcatctaaactgctgggcaatccagttgacttttaaatgtaagaatggaattccaaacacttaacacattcagctatatgacagaaagtaaatctatggatatggtattttgtgaatgatcttttaaataaaagaaaaccttacgtaatattt

SEQ ID NO: 2289 - protein, 248 aa, Homo sapiens
MADFDTYDDRAYSSFGGGRGSRGSAGGHGSRSQKELPTEPPYTAYVGNLPFNTVQGDIDAIFKDLSIRSVRLVRDKDTDKFKGFCYVEFDEVDSLKEALTYDGALLGDRSLRVDIAEGRKQDKGGFGFRKGGPDDRGMGSSRESRGGWDSRDDFNSGFRDDFLGGRGGSRPGDRRTGPPMGSRFRDGPPLRGSNMDFREPTEEERAQRPRLQLKPRTVATPLNQVANPNSAIFGGARPREEVVQKEQE

SEQ ID NO: 2290 - DNA, 2486 bp, Homo sapiens
gacggcaaatggcggacttcgacacctacgacgatcgggcctacagcagcttcggcggcggcagagggtcccgcggcagtgctggtggccatggttcccgtagccagaaggagttgcccacagagcccccctacacagcatacgtaggaaatctacctttcaatacggttcagggcgacatagatgctatctttaaggatctcagcataaggagtgtacggctagtcagagacaaagacacagataaatttaaaggattctgctatgtagaattcgatgaagtggattcccttaaggaagccttgacatacgatggtgcactgttgggcgatcggtcacttcgtgtggacattgcagaaggcagaaaacaagataaaggtggctttggattcagaaaaggtggaccagatgacagaggcttcagggatgacttcttagggggcaggggaggtagtcgcccaggcgaccggcgaacaggcccccccatgggcagccgcttcagagatggccctcccctccgtggatccaacatggatttcagagaacccacagaagaggaaagagcacagagaccacgactccagcttaaacctcgaacagtcgcgacgcccctcaatcaagtagccaatcccaactctgctatcttcgggggtgccaggcctagagaggaagtcgttcaaaaggagcaagaatgagcctgcggttgggagggaatggggcgtggggggttagagcaggaccacagcctggtgagtccccgggcagccgtcctgcagccgccactcctgcgcctgccattggcctcctcacagcggaaacacagcttgtgagtgcatgtcagctgttaacaagtggtttttagtacattctgggctttgctgtatctatctagtgcctgtttgtgcgtttttttctttcttccgctgcttccccattttccttctgtcctttttctcctgctccttgttttcccagcagcacatggggttcctcggaggagcagaggtggccgccgtgggggggcgtttgggctgcggtgctgcgtcatttttcctttgctttctctttactttagacactggcccaactccaggcgtttcctttcattccctcagtgcttctcttctgacctgcatgttgagttctgtattgctggggcttccaacaaaaaccagagtcactgacagagggaacagcagagaccttgttggtattcagctgtgatggatatagagaatcagaggcaccttgttttcacaactaggataaaaatatctgcagggtcctttccattcctatttagagggagtcctggctccatgaccccctcccgagtggactgtccaagcagataggctcacacgagaaacagtgaggctgaaagggggggctatggaagagcggtagggagtccacggagaagatgcagtgaatgcttgcatgcattcacacgtgtgtgtgtcccagctagttcactcctttcgccgtgcgtggtggaggctggcctctctggctgggtgcagtgaatggccagcgggtttcttttctgctgggccaaggcgctttgggggtggagggggtggtgctggtgctgcactgggctgactgcggcgctgacgcagcgtttccccccatccctgttgcctgtgtgttgtgtggatctgttcctagtataggcaacataatgagatactgtgcttcccacctccccttcagttcagagccaaaatgggtctagaatctggcactttactcatttcctttgataaattgtactatgcagagctgtcaggaaccttcagatagcagtagaggactgcagctgtctaggtctgcggccacatcttggggacacactggactgttcccatgtgcagggttcagcagttatgtgggagtgctaggggttaggcttttgagcttgaacgcctgcgtgtgaacagatgaaaaatccttcagtacccaagtcccagtctgtcctatggggagcagtttgggggcggccggcagcaggagcctgggaaagaggccctcgccaggtgatggcagggccagggtggcctggggcacccagcggaatgtgcttagtatttggtcaccagccgtcatcctgggcttttcctactgtgtcttgttacaaggcctcagcaatccacagaactctctctccttccttccacctgtcagcttctctgcttctgagataagaaccatttgtgtaacaccaacacttaacttcagaaagacatgcattatgtggtgtaatcaaacccgatgctttcagatgacctacttacatcttcaatgtggataagataaagaacaaaacacatgcatctaaactgctgggcaatccagttgacttttaaatgtaagaatggaattccaaacacttaacacattcagctatatgacagaaagtaaatctatggatatggtattttgtgaatgatcttttaaataaaagaaaaccttacgtaatattt

SEQ ID NO: 2291 - protein, 228 aa, Homo sapiens
MADFDTYDDRAYSSFGGGRGSRGSAGGHGSRSQKELPTEPPYTAYVGNLPFNTVQGDIDAIFKDLSIRSVRLVRDKDTDKFKGFCYVEFDEVDSLKEALTYDGALLGDRSLRVDIAEGRKQDKGGFGFRKGGPDDRGFRDDFLGGRGGSRPGDRRTGPPMGSRFRDGPPLRGSNMDFREPTEEERAQRPRLQLKPRTVATPLNQVANPNSAIFGGARPREEVVQKEQE

SEQ ID NO: 2292 - DNA, 1517 bp, Homo sapiens
gggaagaggaggcgcgagaatggaggtggaggccgtctgtggtggcgcgggcgaggtggaggcccaggactctgaccctgcccctgccttcagcaaggcccccggcagcgccggccactacgaactgccgtgggttgaaaaatataggccagtaaagctgaatgaaattgtcgggaatgaagacaccgtgagcaggctagaggtctttgcaagggaaggaaatgtgcccaacatcatcattgcgggccctccaggaaccggcaagaccacaagcattctgtgcttggcccgggccctgctgggcccagcactcaaagatgccatgttggaactcaatgcttcaaatgacaggggcattgacgttgtgaggaataaaattaaaatgtttgctcaacaaaaagtcactcttcccaaaggccgacataagatcatcattctggatgaagcagacagcatgaccgacggagcccagcaagccttgaggagaaccatggaaatctactctaaaaccactcgcttcgcccttgcttgtaatgcttcggataagatcatcgagcccattcagtcccgctgtgcagtcctccggtacacaaagctgaccgacgcccagatcctcaccaggctgatgaatgttatcgagaaggagagggtaccctacactgatgacggcctagaagccatcatcttcacggcccagggagacatgaggcaggcgctgaacaacctgcagtccaccttctcaggatttggcttcattaacagtgagaacgtgttcaaggtctgtgacgagccccacccactgctggtaaaggagatgatccagcactgtgtgaatgccaacattgacgaagcctacaagattcttgctcacttgtggcatctgggctactcaccagaagatatcattggcaacatctttcgagtgtgtaaaactttccaaatggcagaatacctgaaactggagtttatcaaggaaattggatacactcacatgaaaatagcggaaggagtgaactctcttttgcagatggcaggcctcctggcaaggctgtgtcagaagacaatggccccggtggccagttagagcagagacttcactgactgacttacaggtgccctattctgaggtacaggagccgcggctttctgatgggggaaaatgccgccttaggctggagccaacatgactgtcctttaaactccagtggctggccaggcacggtagctcacgcctgtaatcccaacactttgggaggccgaggcaggtggatcacctgaggtcagaagttcaagaccagcctggccaacatggggaaaccctgtctttactaaaaatataaaaattagctgggtgtggtggcgggcacctgtaatcccagctactcgggaggctgtggcaggagaatcgcttgaacccaggaggtggaggttgcagtgagccaagatcacaccattgcactccagcctgggcgacagagtctccatctggggaaaaaaattaaataaataaactcccg

SEQ ID NO: 2293 - DNA, 3446 bp, Homo sapiens
taaatggcagccaatggagggtggtgttgcgcggggctgggattagggccggggcgaatggctggcaatcttactgggattacagaacaaagagcctccccgcgctcccgctctccgctcctctccccgcgccgccccgccctccgccgcagcccgcgccgggggtgggggccgccgagcgccagccccccggccggccgattccccccccgcgccccctccccgcgcctccctccccgccctcgccgcgccgccgtcctcgcctccctctgcctctccttcccccattctcccggattaattaaggaggcagcggcaggaggctgagtcctggccgcgggccggggccggggcgccgctggcaggagcgcttggggatcctccaaggcgaccatggccttgctgggtaagcgctgtgacgtccccaccaacggctgcggacccgaccgctggaactccgcgttcacccgcaaagacgagatcatcaccagcctcgtgtctgccttagactccatgtgctcagcgctgtccaaactgaacgccgaggtggcctgtgtcgccgtgcacgatgagagcgcctttgtggtgggcacagagaaggggagaatgttcctgaatgcccggaaggagctacagtcagacttcctcaggttctgccgagggcccccgtggaaggatccggaggcagagcaccccaagaaggtgcagcggggcgagggtggaggccgtagcctccctcggtcctccctggaacatggctcagatgtgtaccttctgcggaagatggtagaggaggtgtttgatgttctttatagcgaggccctgggaagggccagtgtggtgccactgccctatgagaggctgctcagggagccagggctgctggccgtgcaggggctgcccgaaggcctggccttccgaaggccagccgagtatgaccccaaggccctcatggccatcctggaacacagccaccgcatccgcttcaagctcaagaggccacttgaggatggcgggcgggactcgaaggccctggtggagctgaacggtgtctccctgattcccaaggggtcacgggactgtggcctgcatggccaggcccccaaggtgccaccccaggacctgcccccaaccgccacctcctcctccatggccagcttcctgtacagcacggcgctccccaaccacgccatccgagagctcaagcaggaagcaccttcctgcccccttgcccccagcgacctgggcctgagtcggcccatgccagagcccaaggccaccggtgcccaagacttctccgactgttgtggacagaagcccactgggcctggtgggcctctcatccagaacgtccatgcctccaagcgcattctcttctccatcgtccatgacaagtcagagaagtgggacgccttcataaaggaaaccgaggacatcaacacgctccgggagtgtgtgcagatcctgtttaacagcagatatgcggaagccctgggcctggaccacatggtccccgtgccctaccggaagattgcctgtgacccggaggctgtggagatcgtgggcatcccggacaagatccccttcaagcgcccctgcacttatggagtccccaagctgaagcggatcctggaggagcgccatagtatccacttcatcattaagaggatgtttgatgagcgaattttcacagggaacaagtttaccaaagacaccacgaagctggagccagccagcccgccagaggacacctctgcagaggtctctagggccaccgtccttgaccttgctgggaatgctcggtcagacaagggcagcatgtctgaagactgtgggccaggaacctccggggagctgggcgggctgaggccgatcaaaattgagccagaggatctggacatcattcaggtcaccgtcccagacccctcgccaacctctgaggaaatgacagactcgatgcctgggcacctgccatcggaggattctggttatgggatggagatgctgacagacaaaggtctgagtgaggacgcgcggccggaggagaggcccgtggaggacagccacggtgacgtgatccggcccctgcggaagcaggtggagctgctcttcaacacacgatacgccaaggccattggcatctcggagcccgtcaaggtgccgtactccaagtttctgatgcacccggaggagctgtttgtggtgggactgcctgaaggcatctccctccgcaggcccaactgcttcgggatcgccaagctccggaagattctggaggccagcaacagcatccagtttgtcatcaagaggcccgagctgctcactgagggagtcaaagagcccatcatggatagtcaaggaactgcctcctcacttggcttctctccccctgccctgcccccagagagggattccggggaccctctggtggacgagagcctgaagagacagggctttcaagaaaattatgacgcgaggctctcacggatcgacatcgccaacacactaagggagcaggtccaggaccttttcaataagaaatacggggaagccttgggcatcaagtacccggtccaggtcccctacaagcggatcaagagtaaccccggctccgtgatcatcgaggggctgcccccaggaatcccgttccgaaagccctgtaccttcggctcccagaacctggagaggattcttgctgtggctgacaagatcaagttcacagtcaccaggcctttccaaggactcatcccaaagcctgatgaagatgacgccaacagactcggggagaaggtgatcctgcgggagcaggtgaaggaactcttcaacgagaaatacggtgaggccctgggcctgaaccggccggtgctggtcccttataaactaatccgggacagcccagacgccgtggaggtcacgggtctgcctgatgacatccccttccggaaccccaacacgtacgacatccaccggctggagaagatcctgaaggcccgagagcatgtccgcatggtcatcattaaccagctccaaccctttgcagaaatctgcaatgatgccaaggtgccagccaaagacagcagcattcccaagcgcaagagaaagcgggtctcggaaggaaattccgtctcctcttcctcctcgtcttcctcttcctcgtcctctaacccggattcagtggcatcggccaaccagatctcactcgtgcaatggccaatgtacatggtggactatgccggcctgaacgtgcagctcccgggacctcttaattactagacctcagtactgaatcaggacctcactcagaaagactaaaggaaatgtaatttatgtacaaaatgtatattcggatatgtatcgatgccttttagtttttccaatgatttttacactatattcctgccaccaaggcctttttaaataagtaaaaaaaaaaaaaaaaaaaaaaa

SEQ ID NO: 2294 - protein, 959 aa, Homo sapiens
MALLGKRCDVPTNGCGPDRWNSAFTRKDEIITSLVSALDSMCSALSKLNAEVACVAVHDESAFVVGTEKGRMFLNARKELQSDFLRFCRGPPWKDPEAEHPKKVQRGEGGGRSLPRSSLEHGSDVYLLRKMVEEVFDVLYSEALGRASVVPLPYERLLREPGLLAVQGLPEGLAFRRPAEYDPKALMAILEHSHRIRFKLKRPLEDGGRDSKALVELNGVSLIPKGSRDCGLHGQAPKVPPQDLPPTATSSSMASFLYSTALPNHAIRELKQEAPSCPLAPSDLGLSRPMPEPKATGAQDFSDCCGQKPTGPGGPLIQNVHASKRILFSIVHDKSEKWDAFIKETEDINTLRECVQILFNSRYAEALGLDHMVPVPYRKIACDPEAVEIVGIPDKIPFKRPCTYGVPKLKRILEERHSIHFIIKRMFDERIFTGNKFTKDTTKLEPASPPEDTSAEVSRATVLDLAGNARSDKGSMSEDCGPGTSGELGGLRPIKIEPEDLDIIQVTVPDPSPTSEEMTDSMPGHLPSEDSGYGMEMLTDKGLSEDARPEERPVEDSHGDVIRPLRKQVELLFNTRYAKAIGISEPVKVPYSKFLMHPEELFVVGLPEGISLRRPNCFGIAKLRKILEASNSIQFVIKRPELLTEGVKEPIMDSQGTASSLGFSPPALPPERDSGDPLVDESLKRQGFQENYDARLSRIDIANTLREQVQDLFNKKYGEALGIKYPVQVPYKRIKSNPGSVIIEGLPPGIPFRKPCTFGSQNLERILAVADKIKFTVTRPFQGLIPKPDEDDANRLGEKVILREQVKELFNEKYGEALGLNRPVLVPYKLIRDSPDAVEVTGLPDDIPFRNPNTYDIHRLEKILKAREHVRMVIINQLQPFAEICNDAKVPAKDSSIPKRKRKRVSEGNSVSSSSSSSSSSSSNPDSVASANQISLVQWPMYMVDYAGLNVQLPGPLNY

SEQ ID NO: 2295 - DNA, 4537 bp, Homo sapiens
aggaggaggagggtgagagagaagctgggagagcagagaaaaggggccaccggtcgcccccccgcttccccgcacgcgctctccagccgcggccgcccgcctgccgcggtcaccccggcctctgcctctgtcccccagtgatcggatcaaggcgctgagcgaggccctgcctgcggggcggccatgcggcggtgacaggagcgcgaccgacacgcacgggcccctcgccccctctcgcctcccgtccgctcgccagctcccctcagccgaggctgctccgcggcggccgcagcccgcgcgcggcccacactcgcctcccctcggcacccccggccccggagctgcctggaggcggccgcactcggggatcatggcccaagttgcaatgtccaccctccccgttgaagatgaggagtcctcggagagcaggatggtggtgacattcctcatgtcagctctcgagtccatgtgtaaagaactggccaagtccaaagccgaagtggcctgcattgcagtgtatgaaacagacgtgtttgtcgtcggaactgaaagaggacgtgcttttgtcaataccagaaaggattttcaaaaagattttgtaaaatattgtgttgaagaagaagaaaaagctgcagagatgcataaaatgaaatctacaacccaggcaaatcggatgagtgtagatgctgtagaaattgaaacactcagaaaaacagttgaggactatttctgcttttgctatgggaaagctttaggcaaatccacagtggtacctgtaccatatgagaagatgctgcgagaccagtcggctgtggtagtgcaggggcttccggaaggtgttgcctttaaacaccccgagaactatgatcttgcaaccctgaaatggattttggagaacaaagcagggatttcattcatcattaagagaccttttttagagccaaagaagcatgtaggtggtcgtgtgatggtaacagatgctgacaggtcaatactatctccaggtggaagttgtggccccatcaaagtgaaaactgaacccacagaagattctggcatttccctggaaatggcagctgtgacagtaaaggaagaatcagaagatcctgattattatcaatataacattcaagcaggcccttctgaaactgatgatgttgatgaaaaacagcccctatcgaagcctttgcaaggaagccaccattcttcagagggcaatgaaggcacagaaatggaagtaccagcagaagattctactcaacatgtcccttcagaaacaagtgaggaccctgaagttgaggtgactattgaagatgatgattattctccaccgtctaagagaccaaaggccaatgagctaccgcagccaccagtcccggaacccgccaatgctgggaagcggaaagtgagggagttcaacttcgagaaatggaatgctcgcatcactgatctacgtaaacaagttgaagaattgtttgaaaggaaatatgctcaagccataaaagccaaaggtccggtgacgatcccgtaccctcttttccagtctcatgttgaagatctttatgtagaaggacttcctgaaggaattccttttagaaggccatctacttacggaattcctcgcctggagaggatattacttgcaaaggaaaggattcgttttgtgattaagaaacatgagcttctgaattcaacacgtgaagatttacagcttgataagccagcttcaggagtaaaggaagaatggtatgccagaatcactaaattaagaaagatggtggatcagcttttctgcaaaaaatttgcggaagccttggggagcactgaagccaaggctgtaccgtaccaaaaatttgaggcacacccgaatgatctgtacgtggaaggactgccagaaaacattcctttccgaagtccctcatggtatggaatcccaaggctggaaaaaatcattcaagtgggcaatcgaattaaatttgttattaaaagaccagaacttctgactcacagtaccactgaagttactcagccaagaacgaatacaccagtcaaggaagattggaatgtcagaattaccaagctacggaagcaagtggaagagatttttaatttgaaatttgctcaagctcttggactcaccgaggcagtaaaagtaccatatcctgtgtttgaatcaaacccggagttcttgtatgtggaaggcttgccagaggggattcccttccgaagccctacctggtttggaattccacgacttgaaaggatcgtccgcgggagtaataaaatcaagttcgttgttaaaaaacctgaactagttatttcctacttgcctcctgggatggctagtaaaataaacactaaagctttgcagtcccccaaaagaccacgaagtcctgggagtaattcaaaggttcctgaaattgaggtcaccgtggaaggccctaataacaacaatcctcaaacctcagctgttcgaaccccgacccagactaacggttctaacgttcccttcaagccacgagggagagagttttcctttgaggcctggaatgccaaaatcacggacctaaaacagaaagttgaaaatctcttcaatgagaaatgtggggaagctcttggccttaaacaagctgtgaaggtgccgttcgcgttatttgagtctttcccggaagacttttatgtggaaggcttacctgagggtgtgccattccgaagaccatcgacttttggcattccgaggctggagaagatactcagaaacaaagccaaaattaagttcatcattaaaaagcccgaaatgtttgagacggcgattaaggagagcacctcctctaagagccctcccagaaaaataaattcatcacccaatgttaatactactgcatcaggtgttgaagaccttaacatcattcaggtgacaattccagatgatgataatgaaagactctcgaaagttgaaaaagctagacagctaagagaacaagtgaatgacctctttagtcggaaatttggtgaagctattggtatgggttttcctgtgaaagttccctacaggaaaatcacaattaaccctggctgtgtggtggttgatggcatgcccccgggggtgtccttcaaagcccccagctacctggaaatcagctccatgagaaggatcttagactctgccgagtttatcaaattcacggtcattagaccatttccaggacttgtgattaataaccagctggttgatcagagtgagtcagaaggccccgtgatacaagaatcagctgaaccaagccagttggaagttccagccacagaagaaataaaagagactgatggaagctctcagatcaagcaagaaccagaccccacgtggtagacctcttccctcctaggcttaaagtatcagtggttgagaagagcttttcggacctgttactaccccaagctgtgtaatatacttgtataacagaaataccttctatacaaacctttttttctacttttagatagaaatgtctactttttcagcagttctgtgaattaaagagcagagtgactgtgggtctggaatggctggtgtacttgggaatgtactatcaggattttacagcaatgctgggaaatgacagggaaaatgacaggaatgaatctcaccagattttttatgtactcagcagagccttgagttacggtgtttattttccaatcaagtgaagatatctcctacttctcctactggaacatctcagcttctgcagtgaagaaaaattcctgtgatagttcagttctttagtttttctatttgaaaaaaaaaaatcatttaaatgatcctttgttcacggctctccttaatgactgagtgaacagttcctatctgtatatttgactaaaccttttcctaagctatctctcatggttcctatgtttttttatcataattaaaagcaaaaccatctggatcacctaacagtcagaggtcagtatctcagcgtgtgaattatagaggaaatacagagagaacctcttccacttttacttttcgtccaaataaaatgcatggtgtaccagaagttgaagatcgggttgaggattggggctagctcgatgacactaaggccccaacatcgcgggacctgctgtggcgcggattcttaggaacgctgttctagccggccccctctccaggggtcgcgtggccggcattatttcctagttcttcttgtaaccctgaggtgccagcgcggggagtgaggaggggtcagggggctaaggatgcaacctctgacgttctgcgccttcctaggagagtcttacatgtgttgagatttcacaagcaatgcgagttgtaaaataccagctctacaagaagctaggctctgtgacggcatagttttcagtagctttatcacaatattcacaatggagaattatatgacatggtagcagaaataggcccttttatgtgttgcttctattttacctcaaattgtagatatagggtaatcaataaaatccatccatgcctttcacacactaaaaagtcgga

SEQ ID NO: 2296 - protein, 998 aa, Homo sapiens
MAQVAMSTLPVEDEESSESRMVVTFLMSALESMCKELAKSKAEVACIAVYETDVFVVGTERGRAFVNTRKDFQKDFVKYCVEEEEKAAEMHKMKSTTQANRMSVDAVEIETLRKTVEDYFCFCYGKALGKSTVVPVPYEKMLRDQSAVVVQGLPEGVAFKHPENYDLATLKWILENKAGISFIIKRPFLEPKKHVGGRVMVTDADRSILSPGGSCGPIKVKTEPTEDSGISLEMAAVTVKEESEDPDYYQYNIQAGPSETDDVDEKQPLSKPLQGSHHSSEGNEGTEMEVPAEDSTQHVPSETSEDPEVEVTIEDDDYSPPSKRPKANELPQPPVPEPANAGKRKVREFNFEKWNARITDLRKQVEELFERKYAQAIKAKGPVTIPYPLFQSHVEDLYVEGLPEGIPFRRPSTYGIPRLERILLAKERIRFVIKKHELLNSTREDLQLDKPASGVKEEWYARITKLRKMVDQLFCKKFAEALGSTEAKAVPYQKFEAHPNDLYVEGLPENIPFRSPSWYGIPRLEKIIQVGNRIKFVIKRPELLTHSTTEVTQPRTNTPVKEDWNVRITKLRKQVEEIFNLKFAQALGLTEAVKVPYPVFESNPEFLYVEGLPEGIPFRSPTWFGIPRLERIVRGSNKIKFVVKKPELVISYLPPGMASKINTKALQSPKRPRSPGSNSKVPEIEVTVEGPNNNNPQTSAVRTPTQTNGSNVPFKPRGREFSFEAWNAKITDLKQKVENLFNEKCGEALGLKQAVKVPFALFESFPEDFYVEGLPEGVPFRRPSTFGIPRLEKILRNKAKIKFIIKKPEMFETAIKESTSSKSPPRKINSSPNVNTTASGVEDLNIIQVTIPDDDNERLSKVEKARQLREQVNDLFSRKFGEAIGMGFPVKVPYRKITINPGCVVVDGMPPGVSFKAPSYLEISSMRRILDSAEFIKFTVIRPFPGLVINNQLVDQSESEGPVIQESAEPSQLEVPATEEIKETDGSSQIKQEPDPTW

SEQ ID NO: 2297 - DNA, 1201 bp, Homo sapiens
gcgacttcctctttccagtgcatttaaggcgcagcctggaagtgccagggagcactggaggccacccagtcatgggggacaccttcatccgtcacatcgccctgctgggctttgagaagcgcttcgtacccagccagcactatgtgtacatgttcctggtgaaatggcaggacctgtcggagaaggtggtctaccggcgcttcaccgagatctacgagttccataaaaccttaaaagaaatgttccctattgaggcaggggcgatcaatccagagaacaggatcatcccccacctcccagctcccaagtggtttgacgggcagcgggccgccgagaaccgccagggcacacttaccgagtactgcggcacgctcatgagcctgcccaccaagatctcccgctgtccccacctcctcgacttcttcaaggtgcgccctgatgacctcaagctccccacggacaaccagacaaaaaagccagagacatacttgatgcccaaagatggcaagagtaccgcgacagacatcaccggccccatcatcctgcagacgtaccgcgccattgccaactacgagaagacctcgggctccgagatggctctgtccacgggggacgtggtggaggtcgtagagaagagcgagagcggtcagacctcccaccttacggggctccttcccctggtgctcaggaacccacagccacaagccccctgccaaggctcaggcagccttgcccctgggaggactccggctctgttaggggccctaaatgtcctccccacactgtgggtcgccttctgtcttagtgtgcaccctgtggtggctgtgggcatctgtgcttggcaggccggggcggggcatgtctgcgtgttctgtctggatgggtatgggaccgtctgttcattatgaagtgggctcagagctgtgattctgtgagcatgtgtgcatgcatgcatgtgacctcattgtccggtgtggtgaaggtgacatttccaaatctgagcattggacatcagtgtgtctgtgtccctgtgtcctcaccatccctgatggctgcagggagccgctgggccctgcccctcagtcacattcccgcacctctggcacaggttggtggttctgtcagatgaaagcaaagcgaggctggatcccagcgtccttcctcgagcccctggacagtcctgacgagacggaagaccctg

SEQ ID NO: 2298 - protein, 278 aa, Homo sapiens
MGDTFIRHIALLGFEKRFVPSQHYVYMFLVKWQDLSEKVVYRRFTEIYEFHKTLKEMFPIEAGAINPENRIIPHLPAPKWFDGQRAAENRQGTLTEYCSTLMSLPTKISRCPHLLDFFKVRPDDLKLPTDNQTKKPETYLMPKDGKSTATDITGPIILQTYRAIANYEKTSGSEMALSTGDVVEVVEKSESGQTSHLTGLLPLVLRNPQPQAPCQGSGSLAPGRTPALLGALNVLPTLWVAFCLSVHPVVAVGICAWQAGAGHVCVFCLDGYGTVCSL

SEQ ID NO: 2299 - DNA, 6705 bp, Homo sapiens
gagccccagggaggcggatctgggccccgagaaggacacccgcctggatttgccccgtaggcccggcccgggcccctcgggagcagaacagccttggtgaggtggacaggaggggacctcgcgagcagacgcgcgcgccagcgacagcagcccgccccggcctctcgggagccgtggggcagaggctgcggagccccaggagggggccagtgtcattcaaagatgtggctgtggatttcacccaggaggagtggcggcaactggaccctgatgagaagataacatacggggatgtgatgttggagaactacagccatctagtttccttggcttatgaggtggcaacatcttgtacttcggagattctgaagccgagcaacttgcccaagtccttcttcttttcccattaacaagatatgatatcaccaagccaaacgtcatcattaagttggagcagggagaggagctgtggataacgggaggtgaatttccatgtcaacatagtccagcccctcacatcctcagccgaagatctcacttcgtcccagaggcctttgctgactgacccctcagggatcgtgggactttaccagatcggtttgtaataacacctcgaagacgctatccgatccatcagacccagtattcctgtccgggggtacttcccacagtgtgctggaatggttatcacaagaaggctgtgctgtcccctcgcaactccaggatggtgtgtagcccagtgactgtgaggatcgcccctcctgacagaagattttcacgttctgcgataccagagcagataatcagctcaacactgtcgtcaccatcaagtaatgccccagacccatgtgcaaaggagactgtactgagtgccctcaaagagaagaagaagaaaaggacagtggaggaagaagaccaaatattccttgatggccaggaaaataaaagaaggcgccatgatagcagtggcagtggacattcagcatttgagcccctggtggccagtggagtccccgcttcttttgtgcctaagcctgggtctctgaagagaggcctcaattctcagagctcagatgaccacttgaataagagatcccgaagctcttccatgagctccttgacaggcgcttacacaagtggcatccctagctccagccgcaatgccattaccagttcctacagctccactcgaggcatctcacagctctggaagagaaatggccccagttcatcacccttctctagcccagcctcatcccgctcccagacaccggagaggccagcaaagaaaataagagaagaagagctgtgtcatcattccagttcttcaactccattggcagcagacaaggagtcccagggagaaaaggctgcagatacaaccccaaggaagaaacaaaactcgaattctcagtctacacctggcagctctgggcagcgtaagcggaaagttcagctgctgccttctcggcgaggggaacagctgaccttgcctccacctccccagcttggctattcgatcactgccgaggacctagacttagagaagaaggcttcattacagtggttcaaccaggccttggaggacaagagtgatgctgcctcgaactctgtcactgagaccccacctaccactcagccttcatttacctttaccctgcctgctgctgcaactgcctccccacccacctccctcctggccccaagcaccaacccactgttagagagcttgaagaagatgcagactcccccgagcctgccaccctgcccagaatctgctggagcagcaaccactgaggccctctcacctccaaagacacccagcctcctacccccgctgggtttatcacagtcagggccgccagggctgctccccagcccctcctttgactccaaacccccgaccactttgctggggctgatccctgctccatccatggtaccagccactgacaccaaggcacctccaacccttcaagcagagacggctaccaaaccccaagccacatctgccccgtcccccgcccccaagcaaagcttcctgtttggaacacagaacacctcaccttccagccctgccgcccctgctgcatcttcagcatctcccatgttcaagcccattttcacggctccacccaagagtgagaaggaaggccccacaccgcctggcccttcagtcacagccacagcgccctccagctcctccctccccacgaccaccagcaccacagccccgaccttccagcctgtctttagcagcatggggccacctgcatctgtgcccttgcctgctcccttcttcaagcagacaactactcccgccactgctcccaccacaactgccccgctcttcactggcctggccagcgccacctctgctgtggctcccatcacctctgccagtccatccacagactctgcttcgaagcctgcgtttggctttggcataaacagtgtgagcagcagcagtgtgagtaccacgaccagcaccgccactgccgcctcacagcctttcctcttcggggcgccccaggcctctgctgccagcttcaccccggccatgggctccatattccagtttggcaaacctcctgccttgcccacaaccaccacagtcaccaccttcagccagtccctgcccactgccgtgccaacggccaccagcagcagcgctgccgactttagtggttttggcagcaccctcgccacctccgccccggccaccagcagccagcccactctgacgttcagtaacacgagcacccccacgttcaacattccctttggctcaagcgccaagtccccgctcccatcatatccgggagccaacccccagcccgcatttggggccgctgaggggcagccaccgggggccgccaagccagcccttacccccagctttggcagctctttcacttttggaaactctgcagccccggccccggctactgcacccacacctgcacctgcgtccacgatcaagatcgtgcctgcgcacgtgcctacgcccatccagcctacctttggcggtgccacgcactcggcgtttggattgaaagccacggcttccgccttcggcgctcccgccagctcacagcccgcctttggcggctccactgctgtcttctccttcggtgcagccaccagctccggctttggagccaccacccagaccgccagcagcgggagcagcagctcggtgtttggcagcacaacaccatcacccttcacgtttgggggttcggcagcccccgctggcagtgggagctttgggatcaacgtggccaccccaggctccagcgccaccaccggagctttcagctttggagcaggacagagtgggagcacagccacctccacccccttcacagggggcttaggtcagaacgccctgggcaccaccggccagagcacaccgtttgccttcaacgtgggcagcacaactgagagcaaacctgtgtttggaggcaccgccacccccacctttggtcagaacacccctgcgcctggagtgggcacatcgggcagcagcctctcctttggggcatcttcagcacccgcccaaggctttgttggtgttggaccgttcggcaacacttttgctcaccagcaagaacacagcccgaggaagggacccaataacctttcaaaatgcaaactgctgcctgcggtgagggcccagggtcctccacggagaggacaggcatcttcctttcccaccaggaaggagtcagcctggagcctctgctatgtgcaaggcggtgtgcaagcaccggctgcggctctttgctgtctcttctttctctttggggctgggctgggtgtgcgttctggtgctgatgctttggcctgtgaggctgagctagagaagtgtagatgttagatgtgccagtaccatcctgcgcctcccaagcatgcccccactcactcacgtcggcatctcgacccgttcaattacagcaacgaagaagccaccgctaagcgtggtcttgggggaagcccggaggcagtgctcggcacccgggaacgtgctcaggcctcggtggggccgggcaggcagggcgggagctagcctgcaagagaaacagccccaatgctgggtaagagagcagttcaccccatcccccccctccacgaccctggcgcccgccctgtacctgaaggcgcccgggttctgctgcagcgcatctggtaccatgtcttcattctcctcctggcagagggagcacatggagtagacgagccgctgcagggaagggaaagtgagcgcgtggcacagggctcgctgctggaaccctgccagggcatgcagacgcaccgggctaggtgtccctgccccgggatcctccagctgtctgctcggcatacctaaggaaaagcgtgtctcggttacacagcttcacaggctgcctcagtcctgaaatcctcgctcctgaaatccttgcctcacagaggagaacttttgctccagggtcccaagcccattaaagtgtcagaactaagaccaaaacagatgactccaggtctaagctgctgtggacctccgagtccctcagccacgccttctcaccatctcacccgagccactgcaggaaggatccagcaggacatagtggacctcacgatagcgcggatctaagggggagaccgccaggaagtcctcctcagccagctcacagcaggagacgccaacccaggccagcagcgtggccatggatgccagccgcttggcatccaggtcaaaggcaaagatcttcctagggcagagggcagagcaggggtgagctgagcatgcacggagcagctaagggcctgtcacagctgacacagacaaccagaacatgcaggttaagccaggacacacaatattgaaacggcctatatttaaagggcccagggtcagaggtaactggcctggggtctctgccccaagggctaagggatccacatctcacacctgcagtggggaaagcttagcttggggcaaataccgtgaactactttggtacagcaggaaagagttaagcgaaagtcatcctttcagcctttattacccactgaaaggcacaaaatcaaaccccatgtcctcctcctcctcctcctgtggcactcacccttggttcttcagaagagcagccaagtgactggtcttattgcctggggcggcacaggcatcgatgacatgggagcctggcgggggtccagcagcatggctgggagacagctggcctggcaggcagagcacaggggccgggtaaacagagaccccaggctaggcccttcccgtgcctacacattcttcccttttctattcctcttgcctaccctgtcctgcagaatgaggtgtccggcccggtacagtgggtgttcatgcagatctgtctgggcgggaaacaccagcagctccggcatcaaggagtccaggagaaaatgcttccccttgagggcttgtaagtcatcaaggctgccagggaagaaccattcattcatttcctgaatttctccctgccaggccctatttcaacggtccattcatgcaacaaatgttaccacagctatggagaaatcaacagggtgataagggaatccgggatccgcagttgagggaatgggttgtcaagccagactgatgggtcaggagccccctctactgtttaccagcagtgggagcctgggcaagtgattcaatctcaagccccactggcatctctgtaaaatagtaggtgtgaggattcaatgagccaatatatccaagatacttacgtgccacaatttaataaatgttagctattcctgttgaagcataaccttggagaaaggttactttacaggggggtgaggagtggggaagtgagagctgagctcattcttgatggatgaggagttagtcatgtgaggcgcttaggttaaaactacattcactataactcagtaaagcagtcccgcccactctccgacccatgcagaaataggcctagagagtcacatgtctcagttcagaaatctatcgaagtggcagagctggaattcaaacacaagcagccgttctctgctattccaccctggtgtccaagcaacatggtagggcagaaggaagaggatcttacaaagagtaagggaaagggagaggggcagaggctgcttctcagagccaccaaaggacaaaataagacaggtgtgagcccagtggaggaggcacggggcagagaccagccactgttgctggcacgctggtgcacgtagcactgtggcagatggacctggagaggaagcaggagggacagcacaatggagccaagaaaggacttagcatggccgggcgcggtggttcatgcctgtaatcccagcattttgggaggccaaggtgggcagatcacctgaggtcaggagtttgagaccagcctggccaacatggagaaatcccgtctctactaaaaatacaaaattagccaggcatggtgctgcatgcctgcaatcctgtagggaaaagaaagagagatcagactgttactgtgtctgtgtagaaagggaagacataagaaattccattttgacctgtaccttgaacaattggttggctgagatgctgttaatttgtgactttgccccaaatttgagctcacaaaaacatgtgttgtatggaatcaaggtttaaaggatctagggctgtgcaggacatgccttgttaataaaacgtttacaagc

SEQ ID NO: 2300 - DNA, 6624 bp, Homo sapiens
cagcatcaataaggccattaatacgcaggaagtggctgtaaaggaaaaacacgccagaacgtgcatactgggcacccaccatgagaaaggggcacagaccttctggtctgttgtcaaccgcctgcctctgtctagcaacgcagtgctctgctggaagttctgccatgtgttccacaaactcctccgagatggacacccgaacgtcctgaaggactctctgagatacagaaatgaattgagtgacatgagcaggatgtggggccacctgagcgaggggtatggccagctgtgcagcatctacctgaaactgctaagaaccaagatggagtaccacaccaaaaatcccaggttcccaggcaacctgcagatgagtgaccgccagctggacgaggctggagaaagtgacgtgaacaactttttccagttaacagtggagatgtttgactacctggagtgtgaactcaacctcttccaaacagtattcaactccctggacatgtcccgctctgtgtccgtgacggcagcagggcagtgccgcctcgccccgctgatccaggtcatcttggactgcagccacctttatgactacactgtcaagcttctcttcaaactccactcctgcctcccagctgacaccctgcaaggccaccgggaccgcttcatggagcagtttacaaagttgaaagatctgttctaccgctccagcaacctgcagtacttcaagcggctcattcagatcccccagctgcctgagaacccacccaacttcctgcgagcctcagccctgtcagaacatatcagccctgtggtggtgatccctgcagaggcctcatcccccgacagcgagccagtcctagagaaggatgacctcatggacatggatgcctctcagcagaatttatttgacaacaagtttgatgacatctttggcagttcattcagcagtgatcccttcaatttcaacagtcaaaatggtgtgaacaaggatgagaaggaccacttaattgagcgactatacagagagatcagtggattgaaggcacagctagaaaacatgaagactgagagccagcgggttgtgctgcagctgaagggccacgtcagcgagctggaagcagatctggccgagcagcagcacctgcggcagcaggcggccgacgactgtgaattcctgcgggcagaactggacgagctcaggaggcagcgggaggacaccgagaaggctcagcggagcctgtctgagatagaaaggaaagctcaagccaatgaacagcgatatagcaagctaaaggagaagtacagcgagctggttcagaaccacgctgacctgctgcggaagaatgcagaggtgaccaaacaggtgtccatggccagacaagcccaggtagatttggaacgagagaaaaaagagctggaggattcgttggagcgcatcagtgaccagggccagcggaagactcaagaacagctggaagttctagagagcttgaagcaggaacttgccacaagccaacgggagcttcaggttctgcaaggcagcctggaaacttctgcccagtcagaagcaaactgggcagccgagttcgccgagctagagaaggagcgggacagcctggtgagtggcgcagctcatagggaggaggaattatctgctcttcggaaagaactgcaggacactcagctcaaactggccagcacagaggaatctatgtgccagcttgccaaagaccaacgaaaaatgcttctggtggggtccaggaaggctgcggagcaggtgatacaagacgccctgaaccagcttgaagaacctcctctcatcagctgcgctgggtctgcagatcacctcctctccacggtcacatccatttccagctgcatcgagcaactggagaaaagctggagccagtatctggcctgcccagaagacatcagtggacttctccattccataaccctgctggcccacttgaccagcgacgccattgctcatggtgccaccacctgcctcagagccccacctgagcctgccgactcactgaccgaggcctgtaagcagtatggcagggaaaccctcgcctacctggcctccctggaggaagagggaagccttgagaatgccgacagcacagccatgaggaactgcctgagcaagatcaaggccatcggcgaggagctcctgcccaggggactggacatcaagcaggaggagctgggggacctggtggacaaggagatggcggccacttcagctgctattgaaactgccacggccagaatagaggagatgctcagcaaatcccgagcaggagacacaggagtcaaattggaggtgaatgaaaggatccttggttgctgtaccagcctcatgcaagctattcaggtgctcatcgtggcctctaaggacctccagagagagattgtggagagcggcaggggtacagcatcccctaaagagttttatgccaagaactctcgatggacagaaggacttatctcagcctccaaggctgtgggctggggagccactgtcatggtggatgcagctgatctggtggtacaaggcagagggaaatttgaggagctaatggtgtgttctcatgaaattgctgctagcacagcccagcttgtggctgcatccaaggtgaaagctgataaggacagccccaacctagcccagctgcagcaggcctctcggggagtgaaccaggccactgccggcgttgtggcctcaaccatttccggcaaatcacagatcgaagagacagacaacatggacttctcaagcatgacgctgacacagatcaaacgccaagagatggattctcaggttagggtgctagagctagaaaatgaattgcagaaggagcgtcaaaaactgggagagcttcggaaaaagcactacgagcttgctggtgttgctgagggctgggaagaaggaacagaggcatctccacctacactgcaagaagtggtaaccgaaaaagaatagagccaaaccaacaccccatatgtcagtgtaaatccttgttacctatctcgtgtgtgttatttccccagccacaggccaaatccttggagtcccaggggcagccacaccactgccattacccagtgccgaggacatgcatgacacttccaaagactccctccatagcgacaccctttctgtttggacccatggtcatctctgttcttttcccgcctccctagttagcatccaggctggccagtgctgcccatgagcaagcctaggtacgaagaggggtggtggggggcagggccactcaacagagaggaccaacatccagtcctgctgactatttgacccccacaacaatgggtatccttaatagaggagctgcttgttgtttgttgacagcttggaaagggaagatcttatgccttttcttttctgttttcttctcagtcttttcagtttcatcatttgcacaaacttgtgagcatcagagggctgatggattccaaaccaggacactaccctgagatctgcacagtcagaaggacggcaggagtgtcctggctgtgaatgccaaagccattctccccctctttgggcagtgccatggatttccactgcttcttatggtggttggttgggttttttggttttgtttttttttttaagtttcactcacatagccaactctcccaaagggcacacccctggggctgagtctccagggccccccaactgtggtagctccagcgatggtgctgcccaggcctctcggtgctccatctccgcctccacactgaccaagtgctggcccacccagtccatgctccagggtcaggcggagctgctgagtgacagctttcctcaaaaagcagaaggagagtgagtgcctttccctcctaaagctgaatcccggcggaaagcctctgtccgcctttacaagggagaagacaacagaaagagggacaagagggttcacacagcccagttcccgtgacgaggctcaaaaacttgatcacatgcttgaatggagctggtgagatcaacaacactacttccctgccggaatgaactgtccgtgaatggtctctgtcaagcgggccgtctcccttggcccagagacggagtgtgggagtgattcccaactcctttctgcagacgtctgccttggcatcctcttgaataggaagatcgttccaccttctacgcaattgacaaacccggaagatcagatgcaattgctcccatcagggaagaaccctatacttggtttgctacccttagtatttattactaacctcccttaagcagcaacagcctacaaagagatgcttggagcaatcagaacttcaggtgtgactctagcaaggctcatctttctgcccggctacatcagccttcaagaatcagaagaaaggccaaggtgctggactgttactgacttggatcccaaagcaaggagatcatttggagctcttgggtcagagaaaatgagaaaggacagagccagcggctccaactcctttcagccacatgccccaggctctcgctgccctgtggacaggatgaggacagagggcacatgaacagcttgccagggatgggcagcccaacagcacttttcctcttctagatggaccccagcatttaagtgaccttctgatcttggaaaaacagcgtcttccttctttatctatagcaactcattggtggtagccatcaagcacttcccaggatctgctccaacagaatattgctaggttttgctacatgacgggttgtgagacttctgtttgatcactgtgaaccaacccccatctccctagcccacccccctccccaactccctctctgtgcattttctaagtgggacattcaaaaaactctctcccaggacctcggatgaccatactcagacgtgtgacctccatactgggctaaggaagtatcagcactagaaattgggcagtcttaatgttgaatgctgctttctgcttagtatttttttgattcaaggctcagaaggaatggtgcgtggcttccctgtcccagttgtggcaactaaaccaatcggtgtgttcttgatgcgggtcaacatttccaaaagtggctagtcctcacttctagatctcagccattctaactcatatgttcccaattaccaaggggtggccgggcacagtggctcacgcctgtaatcccagcactttgagaggctgaggtggtaggatcacctgaggtcaggagttcaagaccagcctgtccaacatggtgaaacccccatctctactaaaaataccaaaaattagccgagcgtagtgacgggtgcccgtaatcccagctactcaggaggctgagacaggagaatcacctgaaccccagaggcagaggttgcagtgagctgagatcacgccattgtactccagcctgggcaacaagagcaaaactccgtctcaaaaaaaaaaaaaaattacaaatggggcaaacagtctagtgtaatggatcaaattaagattctctgcccagccgggcacagtggcgcatgcctgtaatcccagaactttgggaggccaagacgggatgattgcttgagctcaggagtttgagaccaggctgggcatcatagcaagacctcatctctactaaaattcaaaaacaaaattagccgggcatgatggtgcatgcctgtagtctcagctagttggggagctaaggtgggagaattgcttgagcttgggaagtcgaggctgcagtcagccctgattgtgccagtgcactccggcctgggtgacagagtgagaccctgtctcaaaaaaaaaaagattctgtgtcagagcccagcccaggagtttgaggctgcaatgagccatgatttcccactgcactccagcctgagtgacagagcgagactccatctctttaaaaacaaacaaaaaattatctgaatgatcctgtctctaaaaagaagccacagaaatgtttaaaaacttcatcgacttagcctgagtcataacggttaagaaagcacttaaacagaagcagaggctaattcagtgtcacatgaggaagtagctgtcagatgtcacataattactttcgtaatagctcagattagaatggctaccccattctctagacaaaatcaaattgtcctattgtgactcttctaaaaatgaagatgaagagctatttaatgacacaccttggattaaaacgggaatcacatcttaaagctaaaaatgaacctgcaagccttctaaatgagtcactgagcatcactagtgacaagtctcgggtgagcgtaaatgggtcatgacaagatgggacagcaacaaaatcatggcttaggatcgacaagaagttaaaaaacagctgcatctgttacttaagtttgtaagacagtgccctgagacctctagagaaaagatgtttgtttacataagagaaagaggccagacatggtgtctcacacgtttaatcccagcactttgggaggcaggggcgggtggatcacctgaggtcaggagttcaagactagcctggccaacatggtgaaaccccgtctctactaaaaatacaaaaattagccgggcatggtggcaggcgcctataatcccagctactggggaggctgaggcaggagaatc

SEQ ID NO: 2301 - DNA, 1309 bp, Homo sapiens
atggggcggggcctctgggaggcgtggcctccggccggctcctctgctgttgccaagggaaactgccgcgaggaggcggaaggagcagaggaccggcagccggcgtcgaggcggggcgcgggaacgacggcggccatggcggcctcggggcccgggtgtcgcagctggtgcttgtgtcccgaggtgccatccgccaccttcttcactgcgctgctctcgctgctggtttccgggcctcgcctgttcctgctgcagcagcccctggcgccctcgggcctcacgctgaagtccgaggcccttcgcaactggcaagtttacaggctggtaacctacatctttgtctacgagaatcccatctccctgctctgcggcgctatcatcatctggcgctttgctggcaatttcgagagaaccgtgggcaccgtccgccactgcttcttcaccgtgatcttcgccatcttctccgctatcatcttcctgtcattcgaggctgtgtcatcactgtcaaagctgggggaagtggaggatgccagaggtttcaccccagtggcctttgccatgctgggagtcaccaccgtccgttctcggatgaggcgggccctggtgtttggcatggttgtgccctcagtcctggttccgtggctcctgctgggtgcctcgtggctcattccccagacctctttcctcagtaatgtctgcgggctgtccatcgggctggcctatggcctcacctactgctattccatcgacctctcagagcgagtggcactgaagctcgatcagaccttccccttcagcctgatgaggaggatatccgtgttcaagtacgtctcagggtcttcagccgagaggagggcagcccagagccggaaactgaacccggtgcctggctcctaccccacacagagctgccaccctcacctgtccccaagccaccctgtgtcccagacgcagcacgccagtggtcagaagctggcctcctggccctcctgcacccccgggcacatgcccaccttgcctccgtaccagcctgcctccggcctgtgctatgtgcagaaccactttggtccaaaccccacctcctccagtgtctacccagcttctgcgggcacctccctgggcatccagccccccacgcctgtgaacagccctggcacggtgtattctggggccttgggcacaccaggggctgcaggctccaaggagtcctccagggtccccatgccctgagagaatttctagggaagtcatctcacttggccttctgaaggtcctccctaagagtctcctgacaaaagttacttattga

SEQ ID NO: 2302 - DNA, 2421 bp, Homo sapiens
gtttcatgatcaacatgggagactcccacgtggacaccagctccaccgtgtccgaggcggtggccgaagaagtatctcttttcagcatgacggacatgattctgttttcgctcatcgtgggtctcctaacctactggttcctcttcagaaagaaaaaagaagaagtccccgagttcaccaaaattcagacattgacctcctctgtcagagagagcagctttgtggaaaagatgaagaaaacggggaggaacatcatcgtgttctacggctcccagacggggactgcagaggagtttgccaaccgcctgtccaaggacgcccaccgctacgggatgcgaggcatgtcagcggaccctgaggagtatgacctggccgacctgagcagcctgccagagatcgacaacgccctggtggttttctgcatggccacctacggtgagggagaccccaccgacaatgcccaggacttctacgactggctgcaggagacagacgtggatctctctggggtcaagttcgcggtgtttggtcttgggaacaagacctacgagcacttcaatgccatgggcaagtacgtggacaagcggctggagcagctcggcgcccagcgcatctttgagctggggttgggcgacgacgatgggaacttggaggaggacttcatcacctggcgagagcagttctggccggccgtgtgtgaacactttggggtggaagccactggcgaggagtccagcattcgccagtacgagcttgtggtccacaccgacatagatgcggccaaggtgtacatgggggagatgggccggctgaagagctacgagaaccagaagcccccctttgatgccaagaatccgttcctggctgcagtcaccaccaaccggaagctgaaccagggaaccgagcgccacctcatgcacctggaattggacatctcggactccaaaatcaggtatgaatctggggaccacgtggctgtgtacccagccaacgactctgctctcgtcaaccagctgggcaaaatcctgggtgccgacctggacgtcgtcatgtccctgaacaacctggatgaggagtccaacaagaagcacccattcccgtgccctacgtcctaccgcacggccctcacctactacctggacatcaccaacccgccgcgtaccaacgtgctgtacgagctggcgcagtacgcctcggagccctcggagcaggagctgctgcgcaagatggcctcctcctccggcgagggcaaggagctgtacctgagctgggtggtggaggcccggaggcacatcctggccatcctgcaggactgcccgtccctgcggccccccatcgaccacctgtgtgagctgctgccgcgcctgcaggcccgctactactccatcgcctcatcctccaaggtccaccccaactctgtgcacatctgtgcggtggttgtggagtacgagaccaaggctggccgcatcaacaagggcgtggccaccaactggctgcgggccaaggagcctgccggggagaacggcggccgtgcgctggtgcccatgttcgtgcgcaagtcccagttccgcctgcccttcaaggccaccacgcctgtcatcatggtgggccccggcaccggggtggcacccttcataggcttcatccaggagcgggcctggctgcgacagcagggcaaggaggtgggggagacgctgctgtactacggctgccgccgctcggatgaggactacctgtaccgggaggagctggcgcagttccacagggacggtgcgctcacccagctcaacgtggccttctcccgggagcagtcccacaaggtctacgtccagcacctgctaaagcaagaccgagagcacctgtggaagttgatcgaaggcggtgcccacatctacgtctgtggggatgcacggaacatggccagggatgtgcagaacaccttctacgacatcgtggctgagctcggggccatggagcacgcgcaggcggtggactacatcaagaaactgatgaccaagggccgctactccctggacgtgtggagctaggggcctgcctgccccacccaccccacagactccggcctgtaatcagctctcctggctccctcccgtagtctcctgggtgtgtttggcttggccttggcatgggcgcaggcccagtgacaaagactcctctgggcctggggtgcatcctcctcagcccccaggccaggtgaggtccaccggcccctggcagcacagcccagggcctgcatgggggcaccgggctccatgcctctggaggcctctggccctcggtggctgcacagaagggctctttctctctgctgagctgggcccagcccctccacgtgatttccagtgagtgtaaataattttaaataacctctggcccttggaataaagttctgttttctgt

SEQ ID NO: 2303 - protein, 653 aa, Homo sapiens [sequence omitted]

SEQ ID NO: 2304 - DNA, 1318 bp, Homo sapiens
gaggagcctcgggtgggccggggttgctgcgccgtcctccactactggctactggcgctgcagccatgcagcccccgcccccgggcccgctgggcgactgcctgcgggactgggaggatctacagcaggacttccagaacatccaggagacccatcggctctaccgcctgaagctggaggagctgaccaaacttcagaacaattgcaccagctccatcacgcggcagaagaagcggctccaggagctggccctcgccctgaagaaatgcaaaccctccctcccagcagaggccgagggggccgcacaggagctggagaaccagatgaaagagcgccaaggcctcttctttgacatggaggcctatttgcctaagaagaatggattgtacctgagcctggttctggggaacgtcaacgtcacgctcctgagcaagcaggctaagtttgcctacaaggacgagtatgagaagttcaagctctacctcaccatcatcctcatcctcatctccttcacttgccgcttcctgctcaactccagggtgacagatgctgccttcaacttcctgctggtctggtactactgcaccctgaccatccgggagagcatcctcatcaacaacggctcccggatcaaaggctggtgggtgttccatcactacgtgtccaccttcctgtcgggagtcatgctgacgtggcccgacggtctcatgtaccagaaattccggaaccaattcctctccttttccatgtaccagagcttcgtgcagtttctccagtactactaccagagcggctgcctctaccgcctgcgggcgctgggcgagcggcacaccatggacctcactgtggagggcttccagtcctggatgtggcggggcctcaccttcctgctgccttttcttttctttggacacttctggcagctttttaacgcgctgacgttgttcaacctggcccaggaccctcagtgcaaggagtggcaggtgcttatgtgcggctttcccttcctcctccttttcctcggcaatttcttcaccaccctgagggttgtgcaccacaagtttcacagtcagcggcacgggagcaagaaggattgaggctgggccttcccctgccggcccagaggggcttctgtcctgtgtgttgtgggaggggatgggaggcgcccctcgagtgtgcgtgtatcagggggtctcttctattctcccttgggttttatgggcgctgtgggccctgaaggaagacctgggcccagtgccctcaataaagagaggcccagaaaaaaaaaaaaaaaaaaaaaaaaaaaaaaaaaaaaaaa

SEQ ID NO: 2305 - protein, 343 aa, Homo sapiens
MQPPPPGPLGDCLRDWEDLQQDFQNIQETHRLYRLKLEELTKLQNNCTSSITRQKKRLQELALALKKCKPSLPAEAEGAAQELENQMKERQGLFFDMEAYLPKKNGLYLSLVLGNVNVTLLSKQAKFAYKDEYEKFKLYLTIILILISFTCRFLLNSRVTDAAFNFLLVWYYCTLTIRESILINNGSRIKGWWVFHHYVSTFLSGVMLTWPDGLMYQKFRNQFLSFSMYQSFVQFLQYYYQSGCLYRLRALGERHTMDLTVEGFQSWMWRGLTFLLPFLFFGHFWQLFNALTLFNLAQDPQCKEWQVLMCGFPFLLLFLGNFFTTLRVVHHKFHSQRHGSKKD

SEQ ID NO: 2306 - DNA, 1321 bp, Homo sapiens
ggcgctgggcagtgtggaggtcgttggagtcacttccgcgtcaccagctcctgtgcctgccagtcggtgcccctcccgctccagccatgctctccgccctcgcccggcctgccagcgctgctctccgccgcagcttcagcacctcggcccagaacaatgctaaagtagctgtgctaggggcctctggaggcatcgggcagccactttcacttctcctgaagaacagccccttggtgagccgcctgaccctctatgatatcgcgcacacacccggagtggccgcagatctgagccacatcgagaccaaagccgctgtgaaaggctacctcggacctgaacagctgcctgactgcctgaaaggttgtgatgtggtagttattccggctggagtccccagaaagccaggcatgacccgggacgacctgttcaacaccaatgccacgattgtggccaccctgaccgctgcctgtgcccagcactgcccggaagccatgatctgcgtcattgccaatccggttaattccaccatccccatcacagcagaagttttcaagaagcatggagtgtacaaccccaacaaaatcttcggcgtgacgaccctggacatcgtcagagccaacacctttgttgcagagctgaagggtttggatccagctcgagtcaacgtccctgtcattggtggccatgctgggaagaccatcatccccctgatctctcagtgcacccccaaggtggactttccccaggaccagctgacagcactcactgggcggatccaggaggccggcacggaggtggtcaaggctaaagccggagcaggctctgccaccctctccatggcgtatgccggcgcccgctttgtcttctcccttgtggatgcaatgaatggaaaggaaggtgttgtggaatgttccttcgttaagtcacaggaaacggaatgtacctacttctccacaccgctgctgcttgggaaaaagggcatcgagaagaacctgggcatcggcaaagtctcctcttttgaggagaagatgatctcggatgccatccccgagctgaaggcctccatcaagaagggggaagatttcgtgaagaccctgaagtgagccgctgtgacgggtggccagtttccttaatttatgaaggcatcatgtcactgcaaagccgttgcagataaactttgtattttaatttgctttggtgatgattactgtattgacatcatcatgccttccaaattgtgggtggctctgtgggcgcatcaataaaagccgtccttgattttatttttcaaggtcccttctgtaaaaaaaaaaaaaaaaaa

SEQ ID NO: 2307 - protein, 338 aa, Homo sapiens
MLSALARPASAALRRSFSTSAQNNAKVAVLGASGGIGQPLSLLLKNSPLVSRLTLYDIAHTPGVAADLSHIETKAAVKGYLGPEQLPDCLKGCDVVVIPAGVPRKPGMTRDDLFNTNATIVATLTAACAQHCPEAMICVIANPVNSTIPITAEVFKKHGVYNPNKIFGVTTLDIVRANTFVAELKGLDPARVNVPVIGGHAGKTIIPLISQCTPKVDFPQDQLTALTGRIQEAGTEVVKAKAGAGSATLSMAYAGARFVFSLVDAMNGKEGVVECSFVKSQETECTYFSTPLLLGKKGIEKNLGIGKVSSFEEKMISDAIPELKASIKKGEDFVKTLK

SEQ ID NO: 2308 - DNA, 865 bp, Homo sapiens
ctcaaacaccgcctgctaaaaatacccgactggaggagcataaaagcgcagccgagcccagcgccccgcacttttctgagcagacgtccagagcagagtcagccagcatgaccgagcgccgcgtccccttctcgctcctgcggggccccagctgggaccccttccgcgactggtacccgcatagccgcctcttcgaccaggccttcgggctgccccggctgccggaggagtggtcgcagtggttaggcggcagcagctggccaggctacgtgcgccccctgccccccgccgccatcgagagccccgcagtggccgcgcccgcctacagccgcgcgctcagccggcaactcagcagcggggtctcggagatccggcacactgcggaccgctggcgcgtgtccctggatgtcaaccacttcgccccggacgagctgacggtcaagaccaaggatggcgtggtggagatcaccggcaagcacgaggagcggcaggacgagcatggctacatctcccggtgcttcacgcggaaatacacgctgccccccggtgtggaccccacccaagtttcctcctccctgtcccctgagggcacactgaccgtggaggcccccatgcccaagctagccacgcagtccaacgagatcaccatcccagtcaccttcgagtcgcgggcccagcttgggggcccagaagctgcaaaatccgatgagactgccgccaagtaaagccttagcctggatgcccacccctgctgccgccactggctgtgcctcccccgccacctgtgtgttcttttgatacatttatcttctgtttttctcaaataaagttcaaagcaaccacctgtaaaaaaaaaaaaaaaaaa

SEQ ID NO: 2309 - protein, 205 aa, Homo sapiens
MTERRVPFSLLRGPSWDPFRDWYPHSRLFDQAFGLPRLPEEWSQWLGGSSWPGYVRPLPPAAIESPAVAAPAYSRALSRQLSSGVSEIRHTADRWRVSLDVNHFAPDELTVKTKDGVVEITGKHEERQDEHGYISRCFTRKYTLPPGVDPTQVSSSLSPEGTLTVEAPMPKLATQSNEITIPVTFESRAQLGGPEAAKSDETAAK

SEQ ID NO: 2310 - DNA, 740 bp, Homo sapiens
ataaaagcgcagccgagcccagcgccccgcacttttctgagcagacgtccagagcagagtcagccagcatgaccgagcgccgcgtccccttctcgctcctgcggggccccagctgggaccccttccgcgactggtacccgcatagccgcctcttcgaccaggccttcgggctgccccggctgccggaggagtggtcgcagtggttaggcggcagcagctggccaggctacgtgcgccccctgccccccgccgccatcgagagccccgcagtggccgcgcccgcctacagccgcgcgctcagccggcaactcagcagcggggtctcggagatccggcacactgcggaccgctggcgcgtgtccctggatgtcaaccacttcgccccggacgagctgacggtcaagaccaaggatggcgtggtggagatcaccggtgagcccccctgctcctgcaggggagaggaggaggctagcagggcgggcagggccgggggcgtgcggttgaaacgggggtcccgggggcctggggagttaaacgttggcccagcaccgggaaaaacaggactcctgattcccttgctcaggaattgggagtgcgggtcgcttctaagggcgctttctgctctgtaatcccagcgctttgggaggccgagacgggaggatcgcttgaggccaggagttcaagactagcctgggcaacatagcgagacgcgcccccccgccccgaccccgcgccattac

SEQ ID NO: 2311 - DNA, 577 bp, Homo sapiens
cagagtcagccagcatgaccgagcgccgcgtccccttctcgctcctgcggggccccagctgggaccccttccgcgactggtacccgcatagccgcctcttcgaccaggccttcgggctgccccggctgccggaggagtggtcgcagtggttaggcggcagcagctggccaggctacgtgcgccccctgccccccgccgccatcgagagccccgcagtggccgcgcccgcctacagccgcgcgctcagccggcaactcagcagcggggtctcggagatccggcacactgcggaccgctggcgcgtgtccctggatgtcaaccacttcgccccggacgagctgacggtcaagaccaagctagccacgcagtccaacgagatcaccatcccagtcaccttcgagtcgcgggcccagcttgggggcccagaagctgcaaaatccgatgagactgccgccaagtaaagccttagcccggatgcccacccctgctgccgccactggctgtgcctcccccgccacctgtgtgttcttttgatacatttatcttctgtttttctcaaataaagttcaaagcaacc

SEQ ID NO: 2312 - DNA, 5173 bp, Homo sapiens
ggactgcgaaaggagcagggttgcggagctagggctccagcctgcggccgcgcattcttgcgtctggccagccgcgagctctaagggtcggccccgcccggtccgcccccgcggctccctgccaggctctcgcgggcgcgctcggggtggggcctcgcggctggcggagatgcggccggggctgcgcggtggtgatgcgagcctgcagggcggcgcgccggggcagccggagccgcgcgccgcggcgctgtaatcggacaccaagagcgctcgcccccggcctccggccactttccattcactccgaggtgcttgattgagcgacgcggagaagagctccgggtgccgcggcactgcagcgctgagattcctttacaaagaaactcagaggaccgggaagaaagaatttcacctttgcgacgtgctagaaaataaggtcgtctgggaaaaggactggagacacaagcgcatccaaccccggtagcaaactgatgacttttccgtgctgatttctttcaacctcggtattttcccttggatattaacttgcatatctgaagaaatggcattccggacaatttgcgtgttggttggagtatttatttgttctatctgtgtgaaaggatcttcccagccccaagcaagagtttatttaacatttgatgaacttcgagaaaccaagacctctgaatacttcagcctttcccaccatcctttagactacaggattttattaatggatgaagatcaggaccggatatatgtgggaagcaaagatcacattctttccctgaatattaacaatataagtcaagaagctttgagtgttttctggccagcatctacaatcaaagttgaagaatgcaaaatggctggcaaagatcccacacacggctgtgggaactttgtccgtgtaattcagactttcaatcgcacacatttgtatgtctgtgggagtggcgctttcagtcctgtctgtacttacttgaacagagggaggagatcagaggaccaagttttcatgattgactccaagtgtgaatctggaaaaggacgctgctctttcaaccccaacgtgaacacggtgtctgttatgatcaatgaggagcttttctctggaatgtatatagatttcatggggacagatgctgctatttttcgaagtttaaccaagaggaatgcggtcagaactgatcaacataattccaaatggctaagtgaacctatgtttgtagatgcacatgtcatcccagatggtactgatccaaatgatgctaaggtgtacttcttcttcaaagaaaaactgactgacaataacaggagcacgaaacagattcattccatgattgctcgaatatgtcctaatgacactggtggactgcgtagccttgtcaacaagtggaccactttcttaaaggcgaggctggtgtgctcggtaacagatgaagacggcccagaaacacactttgatgaattagaggatgtgtttctgctggaaactgataacccgaggacaacactagtgtatggcatttttacaacatcaagctcagttttcaaaggatcagccgtgtgtgtgtatcatttatctgatatacagactgtgtttaatgggccttttgcccacaaagaagggcccaatcatcagctgatttcctatcagggcagaattccatatcctcgccctggaacttgtccaggaggagcatttacacccaatatgcgaaccaccaaggagttcccagatgatgttgtcacttttattcggaaccatcctctcatgtacaattccatctacccaatccacaaaaggcctttgattgttcgtattggcactgactacaagtatacaaagatagctgtggatcgagtgaacgctgctgatgggagataccatgtcctgtttctcggaacagatcggggtactgtgcaaaaagtggttgttcttcctactaacaactctgtcagtggcgagctcattctggaggagctggaagtctttaagaatcatgctcctataacaacaatgaaaatttcatctaaaaagcaacagttgtatgtgagttccaatgaaggggtttcccaggtatctctgcaccgctgccacatctatggtacagcctgtgctgactgctgcctggcgcgggacccttattgcgcctgggatggccattcctgttccagattctacccaactgggaaacggaggagccgaagacaagatgtgagacatggaaacccactgactcaatgcagaggatttaatctaaaagcatacagaaatgcagctgaaattgtccagtatggagtaaaaaataacaccacttttctggagtgtgcccccaagtctccgcaggcatctatcaagtggctgttacagaaagacaaagacaggaggaaagaggttaagctgaatgaacgaataatagccacttcacagggactcctgatccgctctgttcagggttctgaccaaggactttatcactgcattgctacagaaaatagtttcaagcagaccatagccaagatcaacttcaaagttttagattcagaaatggtggctgttgtgacggacaaatggtccccatggacctgggccagctctgtgagggctttacccttccacccgaaggacatcatgggggcattcagccactcagaaatgcagatgattaaccaatattgcaaagacactcggcagcaacatcagcagggagatgaatcacagaaaatgagaggggactatggcaagttaaaggccctcatcaatagtcggaaaagtagaaacaggaggaatcagttgccagagtcataatattttcttatgtgggtcttatgcttccattaacaaatgctctgtcttcaatgatcaaattttgagcaaagaaacttgtgctttaccaaggggaattactgaaaaaggtgattactcctgaagtgagttttacacgaactgaaatgagcatgcattttcttgtatgatagtgactagcactagacatgtcatggtcctcatggtgcatataaatatatttaacttaacccagattttatttatatctttattcaccttttcttcaaaatcgatatggtggctgcaaaactagaattgttgcatccctcaattgaatgagggccatatccctgtggtattcctttcctgctttggggctttagaattctaattgtcagtgattttgtatatgaaaacaagttccaaatccacagcttttacgtagtaaaagtcataaatgcatatgacagaatggctatcaaaagaaatagaaaaggaagacagcatttaaagttgtataaaaacatgagttattcataaagagaaaatgatgagtttttatggttccaatgaaatatgttggggtttttttaagattgtaaaaataatcagttactggtatctgtcactgacctttgtttccttattcaggaagataaaaatcagtaacctaccccatgaagatatttggtgggagttatatcagtgaagcagtttggtttatattcttatgttatcaccttccaaacaaaagcacttactttttttggaagttatttattttagactcaaagaatataatctggcactactcagttattactgtttgttctcttattccctagtctgtgtggcaaattaaacaatataagaaggaaaaatttgaagtattagacttctaaataaggtgtgaaatcatcaaaaagaaaaatcaaagtagaaactactaattttttaagaggaatttataacaaatatggctagttttcaacttcagtactcaaattcaatgattcttccttttattaaaaccagtctcagatatcatactgatttttaagtcaacactatatattttatgatcttttcagtgtgatggcaaggtgcttgttatgtctagaaagtaagaaaacaatatgaggagacattctgtctttcaaaaggtaatggtacatacgttcactggtctctaagtgtaaaagtagtaaattttgtgatgaataaaataattatctcctaattgtatgttagaataattttattagaataatttcatactgaaattattttctccaaataaaaattagatggaaaaatgtgaaaaaaattattcatgctctcatatatattttaaaaacactacttttgcttttttatttaccttttaagacattttcatgcttccaggtaaaaacagatattgtaccatgtacctaatccaaatatcatataaacattttatttatagttaataatctatgatgaaggtaattaaagtagattatggcctttttaagtattgcagtctaaaacttcaaaaactaaaatcattgtcaaaattaatatgattattaatcagaatatcagaatatgattcactatttaaactatgataaattatgataatatatgaggaggcctcgctatagcaaaaatagttaaaatgctgacataacaccaaacttcattttttaaaaaatctgttgttccaaatgtgtataattttaaagtaatttctaaagcagtttattataatggtttgcctgcttaaaaggtataattaaacttcttttctcttctacattgacacacagaaatgtgtcaatgtaaagccaaaaccatcttctgtgtttatggccaatctattctcaaagttaaaagtaaaattgtttcagagtcacagttccctttatttcacataagcccaaactgatagacagtaacggtgtttagttttatactatatttgtgctatttaattctttctattttcacaattattaaattgtgtacactttcattacttttaaaaatgtagaaattcttcatgaacataactctgctgaatgtaaaagaaaattttttttcaaaaatgctgttaatgtatactactggtggttgattggttttattttatgtagcttgacaattcagtgacttaatatctattccatttgtattgtacataaaattttctagaaatacacttttttccaaagtgtaagtttgtgaatagattttagcatgatgaaactgtcataatggtgaatgttcaatctgtgtaagaaaacaaactaaatgtagttgtcacactaaaatttaattggatattgatgaaatcattggcctggcaaaataaaacatgttgaattcccc

SEQ ID NO: 2313 - DNA, 1385 bp, Homo sapiens
ctttctgtcttgatgacctgtctagtgctataaatgaacacctttctgcccgtggacgccgccgaagaagcatcgttaaagtctctcttctccctgccgtcatgtctaagtcagagtctcctaaagagcccaaacagctgaggaagctcttcattggagggttgagctttgaaacaaccaatgagagtctgaggagccattttgagcaatggggaacgctcatggactgtgtggtaatgagagatccaaacaccaagtgctccaggggctttgggtttgtcacatatgccactgtggaggaggtggatgcagctatgaatgcaaggccacacaaggtggatggaagagttgtggaatcaaagagagctgtttcaagagaagattctcaaagaccaggtgcccacttaactgtgaaaaagatatttgttggtggcattaaagaagacaccaaagaacatcacctaagagattattttgaacagtatggaaaaattgaagtgattgaaatcatgactgaccgaggcagtggcaagaaaaggggctttgcctttgtaacctttgacgaccatgactctgtggataagattgtcattcagaaataccatactgtgaatggccacatctgtgaagttaggaaagccctgtcaaagcaagagatggcgagtacttcatccagccaaagaggtcaaagtggttctggaaactttagtggtggtcgtggaggtggtttcagtgggaatgacaactttggtcatggaggaaacttcagtggtcgtggtggctttggtggcagccgtggtgctggtggatatggtggcagtggggatggctataatggatttggtaatgatggaagcaattttggaggtggtggaagctacaatgattttggcaattacaacaatcagtcttcaaattttagacccatgaagggaggaaattttggaggcagaagctctggcccctatggcggtggaggcaatactttgcaaaaccaaggtggctatggcagttccagcagcagcagtagctatggcagtggcagaagattttaattaggaaacaaagcttagcaggagaggagagccagagaagtgacagggaagctacaggttacaagagatttgtgaactcagccaagcacagtggtggcagggcctagctgctacaaagaagacgtgttttagacacatactcatgtgtatgggcaaaaaactcgaggactgtatttgtgactagctgtataacaggttattttaatttctattctgcggaaagtgtaaagcattccaacaaagggttttaatgtagttttttttttgcacccatgctgttgattattaaatgtaatagtctgattgtgacactgaataaatgtctttttt

SEQ ID NO: 2314 - protein, 222 aa, Homo sapiens
MSKSESPKEPKQLRKLFIGGLSFETTNESLRSHFEQWGTLMDCVVMRDPNTKCSRGFGFVTYATVEEVDAAMNARPHKVDGRVVESKRAVSREDSQRPGAHLTVKKIFVGGIKEDTKEHHLRDYFEQYGKIEVIEIMTDRGSGKKRGFAFVTFDDHDSVDKIVIQKYHTVNGHICEVRKALSKQEMASTSSSQRGQSGSGNFVVEATMILAITTISLQILDP

SEQ ID NO: 2315 - DNA, 761 bp, Homo sapiens
cctttctgcccgtggacgccgccgaagaagcatcgttaaagtctctcttctccctgccgtcatgtctaagtcagagtctcctaaagagcccaaacagctgaggaagctcttcattggagggttgagctttgaaacaaccaatgagagtctgaggagccattttgagcaatggggaacgctcatggactgtgtggtaatgagagatccaaacaccaagtgctccaggggctttgggtttgtcacatatgccactgtggaggaggtggatgcagctatgaatgcaaggccacacaaggtggatggaagagttgtggaatcaaagagagctgtttcaagagaagattctcaaagaccaggtgcccacttaactgtgaaaaagatatttgttggtggcattaaagaagacaccaaagaacatcacctaagagattattttgaacagtatgtggaagcaattttggaggtggtggaagctacaatgattttggcaattacaacaatcagtcttcaaattttagacccatgaagggaggaaattttggaggcagaagctctggcccctatggcggtggaggcaatactttgcaaaaccaaggtggctatggcagttccagcagcagcagtagctatggcagtggcagaagattttaattaggaaacaaagcttagcaggagaggagagccagagaagtgacagggaagctacaggttacaagagatttgtgaactcagccaagcacagtggtggcagggcctagctg

SEQ ID NO: 2316 - DNA, 877 bp, Homo sapiens
aagtctctcttctccctgccgtcatgtctaagtcagagtctcctaaagagcccaaacagctgaggaagctcttcattggagggttgagctttgaaacaaccaatgagagtctgaggagccattttgagcaatggggaacgctcatggactgtgtggtaatgagagatccaaacaccaagtgctccaggggctttgggtttgtcacatatgccactgtggaggaggtggatgcagctatgaatgcaaggccacacaaggtggatggaagagttgtggaatcaaagagagctgtttcaagagaagattctcaaagaccaggtgcccacttaactgtgaaaaagatatttgttggtggcattaaagaagacaccaaagaacatcacctaagagattattttgaacagtatggaaaaattgaagtgattgaaatcatgactgaccgaggcagtggcaagaaaaggggctttgcctttgtaacctttgacgaccatgactctgtggataagattgtcattcagaaataccatactgtgaatggccacatctgtgaagttaggaaagccctgtcaaagcaagagatggcgagtacttcatccagccaaagaggtcaaagtggttctggaaactttagtggtggtcgtggaggtggtttcagtgggaatgacaactttggtcatggaggaaacttcagtggtcgtggtggctttggatggctataatggatttggtaatgatggaagcaattttggaggtggtggaagctacaatgattttggcaattacaacaatcagtcttcaaattttagacccatgaagggaggaaattttggaggcagaagctctggcccctatggcggtggaggcaatactttgcaaa

SEQ ID NO: 2317 - DNA, 641 bp, Homo sapiens
ccctgccgtcatgtctaagtcagagtctcctaaagagcccaaacagctgaggaagctcttcattggagggttgagctttgaaacaaccaatgagagtctgaggagccattttgagcaatggggaacgctcatggactgtgtggtaatgagagatccaaacaccaagtgctccaggggctttgggtttgtcacatatgccactgtggaggaggtggatgcagctatgaatgcaaggccacacaaggtggatggaagagttgtggaatcaaagagagctgtttcaagagaagattctcaaagaccaggtgcccacttaactgtgaaaaagatatttgttggtggcattaaagaagacaccaaagaacatcacctaagagattattttgaacagtatggaaaaattgaagtgattgaaatcatgactgaccgaggcagtggcaagaaaaggggctttgcctttgtaacctttgacgaccatgactcggtggctttggtggcagccgtggtgctggtggatatggtggcagtggggatggctataatggatttggtaatgatggaagcaattttggaggtggtggaagctacaatgattttggcaattacaacaatcagtcttcaaattttagacccatgaaggg

SEQ ID NO: 2318 - DNA, 342 bp, Homo sapiens
atgccaaactatgtcacctttacggataccaaacaattgattagtgatactccaaataatcaagttccaatgaaccgtgccagcatggcttttgatgccaaatgtctgactggatgcagatttgatgatgccattgtccagtttgatatgacatattggcctttcacggtggtaaatgatgctggcaggcccaaggtccaagtagagtatgagagagacaaaaagctgctacccataggaggtgtcttctatggttctgacaaagatgaaggaaattgcaaaagtctaccttgggaagactgttaccaatgctgtggtcacagtgccagcttacttgaatga

SEQ ID NO: 2319 - DNA, 6253 bp, Homo sapiens
gtaacaaccgtcaccctgggtcccgactgcccacctcctcctcctccccctccccccaacaacaacaacaacaacaactccaagcacaccggccataagagtgcgtgtgtccccaacatgaccgaacgaagaagggacgagctctctgaagagatcaacaacttaagagagaaggtcatgaagcagtcggaggagaacaacaacctgcagagccaggtgcagaagctcacagaggagaacaccacccttcgagagcaagtggaacccacccctgaggatgaggatgatgacatcgagctccgcggtgctgcagcagctgctgccccaccccctccaatagaggaagagtgcccagaagacctcccagagaagttcgatggcaacccagacatgctggctcctttcatggcccagtgccagatcttcatggaaaagagcaccagggatttctcagttgatcgtgtccgtgtctgcttcgtgacaagcatgatgaccggccgtgctgcccgttgggcctcagcaaagctggagcgctcccactacctgatgcacaactacccagctttcatgatggaaatgaagcatgtctttgaagaccctcagaggcgagaggttgccaaacgcaagatcagacgcctgcgccaaggcatggggtctgtcatcgactactccaatgctttccagatgattgcccaggacctggattggaacgagcctgcgctgattgaccagtaccacgagggcctcagcgaccacattcaggaggagctctcccacctcgaggtcgccaagtcgctgtctgctctgattgggcagtgcattcacattgagagaaggctggccagggctgctgcagctcgcaagccacgctcgccaccccgggcgctggtgttgcctcacattgcaagccaccaccaggtagatccaaccgagccggtgggaggtgcccgcatgcgcctgacgcaggaagaaaaagaaagacgcagaaagctgaacctgtgcctctactgtggaacaggaggtcactacgctgacaattgtcctgccaaggcctcaaagtcttcgccggcgggaaactccccggccccgctgtagagggaccttcagcgaccgggccagaaataataaggtccccacaagatgatgcctcatctccacacttgcaagtgatgctccagattcatcttccgggcagacacaccctgttcgtccgagccatgatcgattctggtgcttctggcaacttcattgatcacgaatatgttgctcaaaatggaattcctctaagaatcaaggactggccaatacttgtggaagcaattgatgggcgccccatagcatcgggcccagttgtccacgaaactcacgacctgatagttgacctgggagatcaccgagaggtgctgtcatttgatgtgactcagtctccattcttccctgtcgtcctaggggttcgctggctgagcacacatgatcccaatatcacatggagcactcgatctatcgtctttgattctgaatactgccgctaccactgccggatgtattctccaataccaccatcgctcccaccaccagcaccacaaccgccactctattatccagtagatggatacagagtttaccaaccagtgaggtattactatgtccagaatgtgtacactccagtagatgagcacgtctacccagatcaccgcctggttgaccctcacatagaaatgatacctggagcacacagtattcccagtggacatgtgtattcactgtccgaacctgaaatggcagctcttcgagattttgtggcaagaaatgtaaaagatgggctaattactccaacgattgcacctaatggagcccaagttctccaggtgaagagggggtggaaactgcaagtttcttatgattgccgagctccaaacaattttactatccagaatcagtatcctcgcctatctattccaaatttagaagaccaagcacacctggcaacgtacactgaattcgtacctcaaatacctggataccaaacataccccacatatgccgcgtacccgacctacccagtaggattcgcctggtacccagtgggacgagacggacaaggaagatcactatatgtacctgtgatgatcacttggaatccacactggtaccgccagcctccggtaccacagtacccgccgccacagccgccgcctccaccaccaccaccgccgccgcctccatcttacagtaccctgtaaatacctgtcatgtccttcaggatctctgccctcaaaatttattcctgttcagcttctcaatcagtgactgtgtgctaaattttaggctactgtatcttcaggccacctgaggcacatcctctctgaaacggctatggaaggttagggccactctggactggcacacatcctaaagcaccaaaagaccttcaacattttctgagagcaacagagtatttgccaataaatgatctctcatttttccaccttgactgccaatctaactaaaataattaataagtttactttccagccagtcctggaagtctgggttttacctgccaaaacctccatcaccatctaaattataggctgccaaatttgctgtttaacatttacagagaagctgatacaaacgcaggaaatgctgatttctttatggagggggagacgaggaggaggaggacatgacttttcttgcggtttcggtaccctctttttaaatcactggaggactgaggccttattaaggaagccaaaattatcggtgcagtgtggaaaggcttccgtgatcctctcgctgcacccttagaaacttcaccgtcttcaaactccatttccatggttctgttaattctcaaggagcagcaactcgactggttctcccaggagcaggaaaaacccttgtgacatgaaacatctcaggcctgaaaagaaagtgctctctcagatggactcttgcatgttaagactatgtcttcacatcatggtgcaaatcacatgtacccaatgactccggctttgacacaacaccttaccatcatcatgccatgatggcttccacaaagcattaaacctggtaaccagagattactggtggctccagcgttgttagatgttcatgaaatgtgaccacctctcaatcacctttgagggctaaagagtagcacatcaaaaggactccaaaatcccatacccaactcttaagagatttgtcctggtacttcagaaagaattttcatgagtgttcttaattggctggaaaagcaccagctgacgttttggaagaatctatccatgtgtctgcctccatatgcatctgggcatttcatcttcagtcccctcattagactgtagcattaggatgtgtggagagaggagaaatgatttagcacccagattcacactcctatgcctggaagggggacatctttgaagaagaggaattagggctgtggacactgtcttgaggatgtggacttccttagtgagctccacattacttgatggtaaccacttcaaaaggatcagaatccacgtaatgaaaaaggtccctctagaggatggagctgatgtgaagctgccaatggatgaaaagcctcagaaagcaactcaaaggactcaaagcaacggacaacacaagagttgtcttcagcccagtgacacctctgatgtcccctggaagctttgtgctaacctgggactgcctgacttcctttagcctggtcccttgctactaccttgaactgttttatctaacctctctttttctgtttaattctttgctactgccattgaccctgctgcaggatttgtgtcattttcctgcctggttgctgagactccattttgctgccacacacagagatgtaagaggcaggctttaattgccaaagcacagtttgagcagtagaaaacaacatggtgtatatctcaaattgcctgacatgaagaggagtctaacggtgaagtttcacttttcatcagcatcatctttcacatgttcattatcatccgctcttattcttgcatgtttaaacacttaaaatttttagtataatttttagtgtgttttgaagtggtgactaggctttcaaaaacttccattgaattacaaagcactatccagttcttattgttaaactaagtaaaaatgataagtaacatagtgtaaaatattcctttactgtgaacttcttacaatgctgtgaatgagaggctcctcagaactggagcatttgtataataattcatcctgttcatcttcaattttaacatcatatataatttcaattctatcaattgggcctttaaaaatcatataaaaggatataaaatttgaaaagagaaacctaattggctatttaatccaaaacaacttttttttttccttcaatggaatcagaaagcttgtcaatcactcatgtgttttagagtaattacttttaaaatggtgcatttgtgcttctgaactattttgaagagtcacttctgtttacctcaagtatcaattcatcctccatacatttgaattcaagttgttttttgtcaaatttacagttgtcaattgatcttcaagctgcagggtgcctagaaatgggccgttgtctgtagccctggcatgtgcacacggacatttgccaccactgcaagcaaaagtctggagaagttcaccaacgacaagaacgattagggaaaatatgctgctgtgggttaacaactcagaaagtccctgatccacatttggctgtttactaaagcttgtgattaactttttggcagtgtgtactatgctctattgctatatatgctatctataaatgtagatgttaaggataagtaattctaaatttattattctatagttttgaagtttggttaagtttcctttcactcaattgatttattttgttgttaatcaaatttatgttaattggatcctttaaattttttttggcattttccaacaaaaatggctttattcataagaaaggaaaaaaatcaatggaatttgatatctaaagaagttagaaagggagcaaaataaaaaacataaaggagatagatgaattagtaagcaaatcagtagtcgagtttttcaaactggcaaaattaattaattgacttttagcccaaatttacattgttaattaaatcaagaaggaagaagatctaagagctcccattgataggcaagcctagagagaactagctaaatttatcatgctaggatattgaaacacagaaagtttacatacatttatgaagggtcaatttagtttggacagtgaggtatttgtcttagtggaaaaaaggagaattagtctgatcaaatcgtgaagtaatacagtgaacttgcaggtgcacaaaataagagggccacatctatatggtgcagtctggaattctgtttaagtttgtaggtacctcttggacttctgaattgatccagttgtcatccaccacagacatctcacatcagatacagacagttccaagattgacaacagagaacaacctgctggaaagacctgggcagaaatggagagccctgcgggaaccatgctacattttcatctaaagagagaatgcacatctgatgagactgaaagttctttgttgttttagattgtagaatggtattgaattggtctgtggaaaattgcattgcttttatttctttgtgtaatcaagtttaagtaataggggatatataatcataagcattttagggtgggagggactattaagtaattttaagtgggtggggttatttagaatgttagaataatattatgtattagatatcgctataagtggacatgcgtacttacttgtaaccctttaccctataattgctatccttaaagatttcaaataaactcggagggaactgcagggagaccaacttatttagagcgaattggacatggataaaaaccccagtgggagaaagttcaaaggtgattagattaataatttaatagaggatgagtgacctctgataaattactgctagaatgaacttgtcaatgatggatggtaaattttcatggaagttataaaagtgataaataaaaacccttgcttttacccctgtcagtagccctcctcctaccactgaaccccattgcccctacccctccttctaactttattgctgtattctcttcactctatatttctctctatttgctaatattgcattgctgttacaataaaaattcaataaagatttagtggttaagtgc

SEQ ID NO: 2320 - protein, 325 aa, Homo sapiens
MTERRRDELSEEINNLREKVMKQSEENNNLQSQVQKLTEENTTLREQVEPTPEDEDDDIELRGAAAAAAPPPPIEEECPEDLPEKFDGNPDMLAPFMAQCQIFMEKSTRDFSVDRVRVCFVTSMMTGRAARWASAKLERSHYLMHNYPAFMMEMKHVFEDPQRREVAKRKIRRLRQGMGSVIDYSNAFQMIAQDLDWNEPALIDQYHEGLSDHIQEELSHLEVAKSLSALIGQCIHIERRLARAAAARKPRSPPRALVLPHIASHHQVDPTEPVGGARMRLTQEEKERRRKLNLCLYCGTGGHYADNCPAKASKSSPAGNSPAPL

SEQ ID NO: 2321 - DNA, 5084 bp, Homo sapiens
agcaccacggcagcaggaggtttcggctaagttggaggtactggccacgactgcatgcccgcgcccgccaggtgatacctccgccggtgacccaggggctctgcgacacaaggagtctgcatgtctaagtgctagacatgctcagctttgtggatacgcggactttgttgctgcttgcagtaaccttatgcctagcaacatgccaatctttacaagaggaaactgtaagaaagggcccagccggagatagaggaccacgtggagaaaggggtccaccaggccccccaggcagagatggtgaagatggtcccacaggccctcctggtccacctggtcctcctggcccccctggtctcggtgggaactttgctgctcagtatgatggaaaaggagttggacttggccctggaccaatgggcttaatgggacctagaggcccacctggtgcagctggagccccaggccctcaaggtttccaaggacctgctggtgagcctggtgaacctggtcaaactggtcctgcaggtgctcgtggtccagctggccctcctggcaaggctggtgaagatggtcaccctggaaaacccggacgacctggtgagagaggagttgttggaccacagggtgctcgtggtttccctggaactcctggacttcctggcttcaaaggcattaggggacacaatggtctggatggattgaagggacagcccggtgctcctggtgtgaagggtgaacctggtgcccctggtgaaaatggaactccaggtcaaacaggagcccgtgggcttcctggtgagagaggacgtgttggtgcccctggcccagctggtgcccgtggcagtgatggaagtgtgggtcccgtgggtcctgctggtcccattgggtctgctggccctccaggcttcccaggtgcccctggccccaagggtgaaattggagctattggtaacgctggtcctgctggtcccgccggtccccgtggtgaagtgggtcttccaggcctctccggccccgttggacctcctggtaatcctggagcaaacggccttactggtgccaagggtgctgctggccttcccggcgttgctggggctcccggcctccctggaccccgcggtattcctggccctgttggtgctgccggtgctactggtgccagaggacttgttggtgagcctggtccagctggctccaaaggagagagcggtaacaagggtgagcccggctctgctgggccccaaggtcctcctggtcccagtggtgaagaaggaaagagaggccctaatggggaagctggatctgccggccctccaggacctcctgggctgagaggtagtcctggttctcgtggtcttcctggagctgatggcagagctggcgtcatgggccctcctggtagtcgtggtgcaagtggccctgctggagtccgaggacctaatggagatgctggtcgccctggggagcctggtctcatgggacccagaggtcttcctggttcccctggaaatatcggccccgctggaaaagaaggtcctgtcggcctccctggcatcgacggcaggcctggcccaattggccccgttggagcaagaggagagcctggcaacattggattccctggacccaaaggccccactggtgaccctggcaaaaacggtgataaaggtcatgctggtcttgctggtgctcggggtgctccaggtcctgatggaaacaatggtgctcagggacctcctggaccacagggtgttcaaggtggaaaaggtgaacagggtcccgctggtcctccaggcttccagggtctgcctggcccctcaggtcccgctggtgaagttggcaaaccaggagaaaggggtctccatggtgagtttggtctccctggtcctgctggtccaagaggggaacgcggtcccccaggtgagagtggtgctgccggtcctactggtcctattggaagccgaggtccttctggacccccagggcctgatggaaacaagggtgaacctggtgtggttggtgctgtgggcactgctggtccatctggtcctagtggactcccaggagagaggggtgctgctggcatacctggaggcaagggagaaaagggtgaacctggtctcagaggtgaaattggtaaccctggcagagatggtgctcgtggtgctcatggtgctgtaggtgcccctggtcctgctggagccacaggtgaccggggcgaagctggggctgctggtcctgctggtcctgctggtcctcggggaagccctggtgaacgtggcgaggtcggtcctgctggccccaacggatttgctggtccggctggtgctgctggtcaaccgggtgctaaaggagaaagaggaggcaaagggcctaagggtgaaaacggtgttgttggtcccacaggccccgttggagctgctggcccagctggtccaaatggtccccccggtcctgctggaagtcgtggtgatggaggcccccctggtatgactggtttccctggtgctgctggacggactggtcccccaggaccctctggtatttctggccctcctggtccccctggtcctgctgggaaagaagggcttcgtggtcctcgtggtgaccaaggtccagttggccgaactggagaagtaggtgcagttggtccccctggcttcgctggtgagaagggtccctctggagaggctggtactgctggacctcctggcactccaggtcctcagggtcttcttggtgctcctggtattctgggtctccctggctcgagaggtgaacgtggtctacctggtgttgctggtgctgtgggtgaacctggtcctcttggcattgccggccctcctggggcccgtggtcctcctggtgctgtgggtagtcctggagtcaacggtgctcctggtgaagctggtcgtgatggcaaccctgggaacgatggtcccccaggtcgcgatggtcaacccggacacaagggagagcgcggttaccctggcaatattggtcccgttggtgctgcaggtgcacctggtcctcatggccccgtgggtcctgctggcaaacatggaaaccgtggtgaaactggtccttctggtcctgttggtcctgctggtgctgttggcccaagaggtcctagtggcccacaaggcattcgtggcgataagggagagcccggtgaaaaggggcccagaggtcttcctggcttcaagggacacaatggattgcaaggtctgcctggtatcgctggtcaccatggtgatcaaggtgctcctggctccgtgggtcctgctggtcctaggggccctgctggtccttctggccctgctggaaaagatggtcgcactggacatcctggtacggttggacctgctggcattcgaggccctcagggtcaccaaggccctgctggcccccctggtccccctggccctcctggacctccaggtgtaagcggtggtggttatgactttggttacgatggagacttctacagggctgaccagcctcgctcagcaccttctctcagacccaaggactatgaagttgatgctactctgaagtctctcaacaaccagattgagacccttcttactcctgaaggctctagaaagaacccagctcgcacatgccgtgacttgagactcagccacccagagtggagcagtggttactactggattgaccccaaccaaggatgcactatggaagccatcaaagtatactgtgatttccctaccggcgaaacctgtatccgggcccaacctgaaaacatcccagccaagaactggtataggagctccaaggacaagaaacacgtctggctaggagaaactatcaatgctggcagccagtttgaatataatgttgaaggagtgacttccaaggaaatggctacccaacttgccttcatgcgcctgctggccaactatgcctctcagaacatcacctaccactgcaagaacagcattgcatacatggatgaggagactggcaacctgaaaaaggctgtcattctacagggctctaatgatgttgaacttgttgctgagggcaacagcaggttcacttacactgttcttgtagatggctgctctaaaaagacaaatgaatggggaaagacaatcattgaatacaaaacaaataagccatcacgcctgcccttccttgatattgcacctttggacatcggtggtgctgaccatgaattctttgtggacattggcccagtctgtttcaaataaatgaactcaatctaaattaaaaaagaaagaaatttgaaaaaactttctctttgccatttcttcttcttcttttttaactgaaagctgaatccttccatttcttctgcacatctacttgcttaaattgtgggcaaaagagaaaaagaaggattgatcagagcattgtgcaatacagtttcattaactccttcccccgctcccccaaaaatttgaatttttttttcaacactcttacacctgttatggaaaatgtcaacctttgtaagaaaaccaaaataaaaattgaaaaataaaaaccataaacatttgcaccacttgtggcttttgaatatcttccacagagggaagtttaaaacccaaacttccaaaggtttaaactacctcaaaacactttcccatgagtgtgatccacattgttaggtgctgacctagacagagatgaactgaggtccttgttttgttttgttcataatacaaaggtgctaattaatagtatttcagatacttgaagaatgttgatggtgctagaagaatttgagaagaaatactcctgtattgagttgtatcgtgtggtgtattttttaaaaaatttgatttagcattcatattttccatcttattcccaattaaaagtatgcagattatttgcccaaagttgtcctcttcttcagattcagcatttgttctttgccagtctcattttcatcttcttccatggttccacagaagctttgtttcttgggcaagcagaaaaattaaattgtacctattttgtatatgtgagatgtttaaataaattgtgaaaaaaatgaaataaagcatgtttggttttccaaaagaacatat

SEQ ID NO: 2322 - DNA, 1047 bp, Homo sapiens
atttaacttttaatgctttttctacaatatgctataaatataagaaaaattaaaattcactaacagcaagactacatacccacccaggtcccgctcccaaagacacacatagagggacatacacacaacaatcctaaaaatgactttgtagagataggtcacttggaatgtgtgttgaaatgttgttggtttttttggttggtttgtttgtttgttttttgttagactgatagggagcccctcccactaaagacacccttgatactgttatttcaaggatgaacttatttatctgggacagacatcttcagaatgacacatgccaaacagtggttcttattaaatcaaaggttcagatattatcagattcagaaatagtgatgctttgtgtatctattttcttctctttaaacagaaaaagacaaatgaatggggaaagacaatcattgaatacaaaacaaataagccatcacgcctgcccttccttgatattgcacctttggacatcggtggtgctgaccatgaattctttgtggacattggcccagtctgtttcaaataaatgaactcaatctaaattaaaaaagaaagaaatttggagaaaaagaaggattgatcagagcattgtgcaatacagtttcattaactccttcccccgctcccccaaaaatttgaatttttttttcaacactcttacacctgttatggaaaatgtcaacctttgtaagaaaaccaaaataaaaattgaaaaataaaaaccataaacatttgcaccacttgtggcttttgaatatcttccacagagggaagtttaaaacccaaacttccaaaggtttaaactacctcaaaacactttcccatgagtgtgatccacattgttaggtgctgacctagacagagatgaactgaggtccttgttttgttttgttcataatacaaaggtgctaattaatagtatttcagatacttgaagaatgttgatggtgctagaagaatttgagaagaaatactcctgtattgagttgtatcgtgtggtgtattttttaa

SEQ ID NO: 2323 - DNA, 1990 bp, Homo sapiens
catccgtggacttggaggctggctcgggcccgcacctcccatccccagctgcccgcaacccccagtgactcgggatcccccggagagccctcccctctcggcaggagggggctgactcagggagaaatggcagtttagggcctagggggccacgtgaccctcccccaggaatgtggtgacgtcatcggaggcgtggtcgtccccaaaattagggaggaagaggaaaaaaaaaagccagaaaaagttttcttttctggagtcccaaacgaggtgcgggacggaagagggggtgaaggccagaggctcggggcttcaagaccgctgtctggagtccccctttccaggccatgtcggggcccacctggctgcccccgaagcagccggagcccgccagagcccctcaggggagggcgatcccccgcggcaccccggggccaccaccggcccacggagcagcactccagccccaccccagggtcaatttttgcccccttccatctgagcagtgttaccaggccccagggggaccggaggatcgggggccggcgtgggtggggtcccatggagtactccagcacacgcaggggctccctgcagacagggggggccttcgccctggaagcctggacgccgagatagacttgctgagcagcacgctggccgagctgaatgggggtcggggtcatgcgtcacggcgaccagaccgacaggcatatgagcccccgccacctcctgcctaccgcacgggctccctgaagccaaatccagcctcgccgctcccagcgtctccctatgggggccccactccagcctcttacactaccgccagcaccccggctggcccagccttccccgtgcaagtgaaggtggcacagccagtgaggggctgcggcccacccaggcggggagcctctcaggcctctgggcccctcccgggcccccactttcctctcccaggccgaggtgaagtctgggggcctggctataggagccagagagagccagggccaggggccaaagaggaagctgctggggtctctggccctgcaggaagaggaagaggaggcgagcacgggccccaggtgcccctgagccagcctccagaggatgagctggataggctgacgaagaagctggttcacgacatgaaccacccgcccagcggggagtactttggccagtgtggtggctgcggagaagatgtggttggggatggggctggggttgtggcccttgatcgcgtctttcacgtgggctgctttgtatgttctacatgccgggcccagcttcgcggccagcatttctacgccgtggagaggagggcatattgcgagggctgctacgtggccaccctggagaaatgtgccacgtgctcccagcccatcctggaccggatcctgcgggctatggggaaggcctaccaccctggctgcttcacctgcgtggtgtgtcaccgcggcctcgacggcatccccttcacagtggatgctacgagccagatccactgcattgaggactttcacaggaagtttgccccaagatgctcagtgtgcggtggggccataatgcctgagccaggtcaggaggagactgtgagaattgttgctctggatcgaagttttcacattggctgttacaagtgcgaggagtgtgggctgctgctctcctctgagggcgagtgtcagggctgctacccgctggatgggcacatcttgtgcaaggcctgcagcgcctggcgcatccaggagctctcagccaccgtcaccactgactgctgagtcttcctagaagtacctgctgggttctcagttccagttcccatcctttgattgatcactctccctgacatccacctgtatgactttgtcaccaaatgctgtcttctctttctccaatcaagaaataataatccctcgagtttacaaaacacttccaagtctgttgtctcatctgattctcccagtagcccattacaggcccagtcattgtt

SEQ ID NO: 2324 - protein, 476 aa, Homo sapiens
MSGPTWLPPKQPEPARAPQGRAIPRGTPGPPPAHGAALQPHPRVNFCPLPSEQCYQAPGGPEDRGPAWVGSHGVLQHTQGLPADRGGLRPGSLDAEIDLLSSTLAELNGGRGHASRRPDRQAYEPPPPPAYRTGSLKPNPASPLPASPYGGPTPASYTTASTPAGPAFPVQVKVAQPVRGCGPPRRGASQASGPLPGPHFPLPGRGEVWGPGYRSQREPGPGAKEEAAGVSGPAGRGRGGEHGPQVPLSQPPEDELDRLTKKLVHDMNHPPSGEYFGQCGGCGEDVVGDGAGVVALDRVFHVGCFVCSTCRAQLRGQHFYAVERRAYCEGCYVATLEKCATCSQPILDRILRAMGKAYHPGCFTCVVCHRGLDGIPFTVDATSQIHCIEDFHRKFAPRCSVCGGAIMPEPGQEETVRIVALDRSFHIGCYKCEECGLLLSSEGECQGCYPLDGHILCKACSAWRIQELSATVTTDC

SEQ ID NO: 2325 - DNA, 3273 bp, Homo sapiens
gtcttttccggcccccgtgcactctccgcccgagcggagccccccggctcgcggggatcgcccccgagcgctgcgtcctgcgggtcacctaacccatttgtggcttcctctacctgtgctcagccatggccagcgagagctcacctctgctggcctaccggctcctgggggaggagggggttgccctccctgccaatggggccgggggtcctggaggggcgtctgcccggaagctgtccaccttcctgggtgtggtggtgcccactgtcctgtccatgttcagcatagttgtttttctgaggattgggttcgtggtgggtcatgctgggctactgcaggccctggccatgctgctggttgcctacttcatcctggcactcaccgtcctctctgtctgtgccatcgccaccaatggagccgtgcaggggggcggagcctacttcatgatcagccgcacactggggcccgaggtcgggggcagcattgggctcatgttctacctggctaacgtctgtggctgtgccgtctccctcctggggctggtggagtctgtgcttgatgtcttcggggccgatgccacagggcccagtgggctccgggtcctgccccagggctacggctggaacctgctgtatggctccctgctgctgggccttgtgggtggggtctgcaccctgggagccggcctctatgcccgggcctcattcctcacattcctgctggtctctggctccctggcctctgtgctcatcagttttgtggctgtggggccgagggacatccgcttgactcctaggcctggccccaatggctcctccctgccgccccggtttggccacttcaccggcttcaacagcagtaccctgaaggacaacttgggcgctggctatgctgaggactacaccacgggagccgtgatgaattttgccagcgtctttgctgtcctctttaacggctgtacaggcatcatggctggggccaacatgtcaggggagctgaaggaccccagccgggcgatccctctgggcacgatcgtcgccgtcgcctacaccttcttcgtctatgtcctgcttttctttctctccagcttcacttgtgacaggaccctgctgcaggaagactatgggttcttccgcgccatcagcctgtggcccccactggtgttgatcggaatctatgccacagcgctctcagcgtccatgagctcgctcattggtgcctcccgcatcctccatgccctggcccgggatgacctctttggcgtgatcttggcaccggccaaggttgtgtcccgagggggaaacccctgggcagctgtactttattcttggggcctggtgcagctggtgctcctggctgggaagctgaacacactggctgctgtggtcactgtcttctacctggtggcctatgctgccgtggacctgtcctgcctgagcctggagtgggcctcggcccccaacttccgccccaccttcagcctgttctcctggcacacctgcctgctgggggtggcctcctgcctgctcatgatgttcctcatcagtcctggcgcggctggtggctccctgctcctcatgggtctgctggctgccctgctcaccgcgcgaggaggccccagtagctggggctatgtcagccaggccttgcttttccaccaggtgcgtaagtatctgcttcggctggacgtccggaaggatcacgtgaagttctggcggccccagctgctgctcctggtggggaacccccggggcgccctgcctctgctgcggttggccaaccagcttaagaagggggggctgtatgtgctgggccacgtcaccctgggagacctcgactccctgccctcggaccctgtacagccgcagtatggggcatggctcagcctggtggaccgtgcccaggtgaaggcttttgtggatctaaccctctcaccctccgtgcgccagggggctcagcatctgctgcgaatctccggcctcggtggcatgaagcccaacacgttggtcctaggtttctacgatgacgctccaccgcaggaccatttcctgacggacccggctttctctgagcctgcagacagcaccagggagggcagttccccagctctgagcaccctgttccctcctccccgggctcctgggagcccccgggccctcaatccccaggactatgtggccacggtggccgacgccctcaagatgaacaagaatgtggtgctggcccgggccagcggggccttgccccctgagcggctgagccgggggtctgggggcacctctcagctgcaccatgtggacgtgtggcccctcaacctgctgcggccccggggtgggcccggctatgtggatgtctgcggcctcttcctgctgcagatggcaaccatcttgggcatggtgcccgcttggcatagcgcccggctccggatcttcctgtgcctggggcctcgggaggcgcctggggcggccgaggggcggctgcgggcactgctgagccaactgaggatccgggctgaggtgcaggaggtggtgtggggcgagggggccggggctggggaacccgaggcggaggaggaaggggactttgtgaacagtgggcggggagacgcagaggcagaggccctggcacgcagcgccaacgccctggttcgggcccagcaggggcgcggcacaggaggagggccgggtgggccggagggtggggatgctgagggccccatcacagccctcaccttcctgtacttgcctcggccgccagccgatcccgcccgatacccccgctacctggcgctactggagactctaacccgagacctgggccccacgctgctggttcatggggtcactccagtcacctgcactgatctgtgatgcccctgcctccagggctaggtagagagggcccaggcaggcggcctatcctgatccttggaggaggaggaagaggaggccactgtggcccgtggccctgcccttgggacgtggagcccaggggaggtttgaaggggatcctgggcttgggcatcacgcccacctcctttggcagagggaccccagcacactaactctgggtggctgtccccaccgtgcaggggagggagtccgcagcctcccttcactggtgccttgatgctaggggccaggcctcctctgtgactctgggctacctcagtttccccattttggccagactcaccggcccactggggtggtgatgttttcgttctgttttatttttctaactctgctgaccatgaataaaagaccaaaacac

SEQ ID NO: 2326 - DNA, 878 bp, Homo sapiens
gcgcgggcagggccgcacgagctggctggctgcttgcacccacatccttctttctctgggacctggggtcgcggttacttgggctggccggcgaacccttgagtggcctggcggggagcgggcctcgcgcgcctggagggccctgtggaacgaagagaggcacacagcatggcagaaaaccgagagccccgcggtgctgtggaggctgaactggatccagtggaatacacccttaggaaaaggcttcccagccgcttgccccggagacccaatgacatttatgtcaacatgaagacggactttaaggcccagctggcccgctgccagaagctgctggacggaggggcccggggtcagaacgcgtgctctgagatctacattcacggcttgggcctggccatcaaccacgccatcaacatcgcgctgcagctgcaggcgggcagcttcgggtccttgcaggtggctgccaatacctccaccgtggagcttgttgatgagctggagccagagaccgacacacgggagccactgactcggatccgcaacaactcagccatccacatccgagtcttcagggtcacacccaagtaattgaaaagacactcctccacttatcccctccgtgatatggctcttcgcatgctgagtactggacctcggaccagagccatgtaagaaaaggcctgttccctggaagcccaaaggactctgcattgagggtgggggtaattgtctcttggtggcccagttagtgggccttcctgagtgtgtgtatgcggtctgtaactattgccatataaataaaaaatcctgttgcactagtgtcctgccaaaaaaaaaaaaaaaaaaaaaaaaaaaaaaaaaaaaaaaaaaaaaaa

SEQ ID NO: 2327 - protein, 140 aa, Homo sapiens
MAENREPRGAVEAELDPVEYTLRKRLPSRLPRRPNDIYVNMKTDFKAQLARCQKLLDGGARGQNACSEIYIHGLGLAINHAINIALQLQAGSFGSLQVAANTSTVELVDELEPETDTREPLTRIRNNSAIHIRVFRVTPK

SEQ ID NO: 2328 - DNA, 1542 bp, Homo sapiens
ggaggaagacagcgccgcccgcgcaccgccagcgacctccgccgcagagtcccaccgccacaggcctcgggccagcggccaggagctgcctcccccagcccccgtcccgcggcccccagccgcccccaaccctgccccacgggcccggcgccatgagtgagctggagcaactgagacaggaggccgagcagctccggaaccagatccgggatgcccgaaaagcatgtggggactcaacactgacccagatcacagctgggctggacccagtggggagaatccagatgaggacccggaggaccctccgtgggcacctggcaaagatctatgccatgcactgggggaccgactcaaggctgctggtcagcgcctcccaggatgggaagctcatcatctgggacagctacaccaccaacaaggtccacgccatcccgctgcgctcctcctgggtaatgacctgtgcctacgcgccctcagggaactttgtggcctgtggggggttggacaacatctgctccatctacagcctcaagacccgcgagggcaacgtcagggtcagccgggagctgcctggccacactgggtacctgtcgtgttgccgcttcctggatgacaaccaaatcatcaccagctctggggataccacctgtgccctgtgggacattgagacaggccagcagacagtgggttttgctggacacagtggggatgtgatgtccctgtccctggcccccgatggccgcacgtttgtgtcaggcgcctgtgatgcctctatcaagctgtgggacgtgcgggattccatgtgccgacagaccttcatcggccatgaatccgacatcaatgcagtggctttcttccccaacggctacgccttcaccaccggctctgacgacgccacgtgccgcctcttcgacctgcgggccgatcaggagctcctcatgtactcccatgacaacatcatctgtggcatcacctctgttgccttctcgcgcagcggacggctgctgctcgctggctacgacgacttcaactgcaacatctgggatgccatgaagggcgaccgtgcaggagtcctcgctggccacgacaaccgcgtgagctgcctcggggtcaccgacgatggcatggctgtggccacgggctcctgggactccttcctcaagatctggaactaatggccccacccccactgggcccaggccaggaggggccctgcccatgcccacactacaggccagggctgcggggctggcgcaatcccagcccccttccccgggccacggggccttgggtccctgccctcccacccaggtttggttcctcccggggcccccactgtggagataagaaggggatggaatgggggaagaggaggagcaggaggccctcatccttctgctgccctggggttggggcctcacccctctggagggccggaggcaggaggtggaaaccccaggggctggcttttttaaaactggttttattttaatttttattatattttcagtttttccataaaggagccaattccaactctgt

SEQ ID NO: 2329 - DNA, 1508 bp, Homo sapiens
atcctgctgctgccgccaccgctgctgctgctctgcaaaattcagctgctgcctctgtcttgaggaccccagcgcctttcccccggggccatgctgcctgcagccacagcctccctcctggggcccctcctcactgcctgcgccctgctgccttttgcccagggccagacccccaactacaccagacccgtgttcctgtgcggaggggatgtgaagggggaatcaggttacgtggcaagtgaggggttccccaacctctacccccctaataaggagtgcatctggaccataacggtccccgagggccagactgtgtccctctcattccgagtcttcgacctggagctgcaccccgcctgccgctacgatgctctggaggtcttcgctgggtctgggacttccggccagcggctcggacgcttttgtgggaccttccggcctgcgcccctagtcgcccccggcaaccaggtgaccctgaggatgacgacggatgagggcacaggaggacgaggcttcctgctctggtacagcgggcgggccacctcgggcactgagcaccaattttgcggggggcggctggagaaggcccagggaaccctgaccacgcccaactggcccgagtccgattaccccccgggcatcagctgttcctggcacatcatcgcgcccccggaccaggtcatcgcgctgaccttcgagaagtttgacctggagccggacacctactgccgctatgactcggtcagcgtgttcaacggagccgtgagcgacgactcccggaggctggggaagttctgcggcgacgcagtcccgggctccatctcctccgaagggaatgaactcctcgtccagttcgtctcagatctcagtgtcaccgctgatggcttctcagcctcctacaagaccctgccgcggggcactgccaaagaagggcaagggcccggccccaaacggggaactgagcctaaagtcaagctgccccccaagtcccaacctccggagaaaacagaggaatctccttcagcccctgatgcacccacctgcccaaagcagtgccgccggacaggcaccttgcagagcaacttctgtgccagcagccttgtggtgactgcgacagtgaagtccatggttcgggagccaggggagggccttgccgtgactgtcagtcttattggtgcttataaaactggaggactggacctgccttctccacccactggtgcctccctgaagttttacgtgccttgcaagcagtgcccccccatgaagaaaggagtcagttatctgctgatgggccaggtagaagagaacagaggccccgtccttcctccagagagctttgtggttctccaccggcccaaccaggaccagatcctcaccaacctaagcaagaggaagtgcccctctcaacctgtgcgggctgctgcgtcccaggactgagacgcaggccagccccggcccctagccctcaggccttctttcttatccaaataaatgtttcttaatga

SEQ ID NO: 2330 - protein, 449 aa, Homo sapiens
MLPAATASLLGPLLTACALLPFAQGQTPNYTRPVFLCGGDVKGESGYVASEGFPNLYPPNKECIWTITVPEGQTVSLSFRVFDLELHPACRYDALEVFAGSGTSGQRLGRFCGTFRPAPLVAPGNQVTLRMTTDEGTGGRGFLLWYSGRATSGTEHQFCGGRLEKAQGTLTTPNWPESDYPPGISCSWHIIAPPDQVIALTFEKFDLEPDTYCRYDSVSVFNGAVSDDSRRLGKFCGDAVPGSISSEGNELLVQFVSDLSVTADGFSASYKTLPRGTAKEGQGPGPKRGTEPKVKLPPKSQPPEKTEESPSAPDAPTCPKQCRRTGTLQSNFCASSLVVTATVKSMVREPGEGLAVTVSLIGAYKTGGLDLPSPPTGASLKFYVPCKQCPPMKKGVSYLLMGQVEENRGPVLPPESFVVLHRPNQDQILTNLSKRKCPSQPVRAAASQD

SEQ ID NO: 2331 - DNA, 2303 bp, Homo sapiens
ggagaggcagagacccaggggagccgaggagcggagacacggacccagcagggtcacgcgggaggagactcgggacacccactcgctggctgccaccgggagcagaggggggctcggccgccccctcccacatcagtctccagacccttggggcttcagaggccgctcctaggctcctcggaggaggcgcgggtttcttcttttccggagagcaaactttcctcggagatgcctggcaggatgagccgcggcccccggagaggacgggacagcctctgatcgccgcctgcgtgccccgccactgcccatggccaggaggccccagggaacggacagcccgacctcttaggcgccgggaccctcaggctcagatcagtggccgaggccccagagtttgcaaactcagctctggagttcagcagcaacagcagcaggaaaaacctgcccctgctcccccctcccgccacctcccctctcctcttctcccctcacccagcaggcacccccggttcccgccaggccctcctgccatgtcggacccagacgtccccaggggctcggatgtccccgccatgtggcccccttgttccaggggtgcctgagccccttcaaggagccccaacccacccccaaccttggcccagccctgagccccagggaccatgagcgggggcaagaagaagagtagtttccaaatcaccagcgtcaccacggactatgagggccctgggagcccaggggcttcggatccccctaccccacagcccccaaccgggcccccgccccgcctgcccaatggggagcccagccccgatccggggggcaagggcaccccccggaatggctccccaccacctggggccccttcctcccgtttccgggtggtgaagctgccccacggcctgggagagccttatcgccgcggtcgctggacgtgtgtggatgtttatgagcgagacctggagccccacagcttcggcggactcctggagggaattcgaggggcctcagggggcgccgggggcagatctttggattccaggttggagctggccagcctcggcctgggcgcccccaccccaccgtcaggcctgtctcagggccccacctcctggctccgtccaccccccacctctcctggacctcaggcccgctccttcactgggggactgggccagctggtggtgcccagcaaagccaaggcagagaaacccccactgtcggcctcctcaccccagcagcgccccccagagcctgagaccggtgagagtgcgggcacatcccgggctgccacgcccctgccctctctgagggtggaagcggaggctgggggctcaggggccaggacccctccactgtcccggaggaaagctgtagacatgcggctgcggatggagttgggtgctccagaagagatggggcaggtgcccccacttgactctcgccccagctccccagccctctacttcacccacgatgccagcctggttcacaaatctccagaccccttcggagcagtagcagctcagaagttcagcctggcccactccatgttggccatcagtggtcacctagacagcgacgatgatagtggctccggaagcctggttggcattgacaacaaaatcgagcaagccatggacttggtgaagtcccacctcatgtttgcggtccgggaggaggtggaggtgctgaaggagcagatccgggaactggcggagcggaacgctgcgctggagcaggagaatgggctgctgcgcgccctggccagcccggagcagctggctcagctgccctcctcgggggtcccacggcttgggccccctgcgcccaatgggccctccgtctgagcctcccttcccttacaatgtgcctttggggctgcccggccttgcgtcagccgcctgccccctcttcctatgcagctttaatgtccccgtgtccccggggtgggagttcaaggctcagtaatggcctggtcccccggcccctgccccatctcctcatcatccccagccttgatggaggagggagggcttcaggacggggcgtcagagggagccccctctgggagggaaccaacccccaccctccctcctgggaccccccagcagtagacggcttgggggagtcggaggctccccggcagacaccccacccccatcttgttcccttgaggtgcctcctctcctctgcccaggggagggagtgtggacagtatctggaagttctgggattcaggttgttattaaaataataataataattaaaaactctgaagaaaaaaaaaaaaaaaaaaaaaa

SEQ ID NO: 2332 - protein, 395 aa, Homo sapiens
MSGGKKKSSFQITSVTTDYEGPGSPGASDPPTPQPPTGPPPRLPNGEPSPDPGGKGTPRNGSPPPGAPSSRFRVVKLPHGLGEPYRRGRWTCVDVYERDLEPHSFGGLLEGIRGASGGAGGRSLDSRLELASLGLGAPTPPSGLSQGPTSWLRPPPTSPGPQARSFTGGLGQLVVPSKAKAEKPPLSASSPQQRPPEPETGESAGTSRAATPLPSLRVEAEAGGSGARTPPLSRRKAVDMRLRMELGAPEEMGQVPPLDSRPSSPALYFTHDASLVHKSPDPFGAVAAQKFSLAHSMLAISGHLDSDDDSGSGSLVGIDNKIEQAMDLVKSHLMFAVREEVEVLKEQIRELAERNAALEQENGLLRALASPEQLAQLPSSGVPRLGPPAPNGPSV

SEQ ID NO: 2333 - DNA, 3081 bp, Homo sapiens
atttaaactcccagagccgttaagttggttcgtagtctgatgcgcgcgcaaccagggtggtggcggagtgcgcatgcgtggttccggggcgaagggaacgcgcgctcaccgtgcgcgctcgcggccgggtggtagtggcggaggagaaaggggtcggcgcacgcgcggttgagtcctcgagtagttcgggtctcgcgggcctcttgttttggtctcgcgggctagtagggcgcacttggcggggaggcgcttgggcgcgagactaggcgtgaagagcagagctgcgcgcgcactcgggaaaggggggaagggagcagggtccaggcagggggggttaggccccctgatccccctcgttaccccgactggcacggaataaggggaggaaatgatcgagatggcggcggagaaggagccgtttctggtgccggccccgccgccgccgctcaaagatgagtcgggcggagggggcggccccacggtgccaccgcaccaagaggccgcctctggggagctccgcggcgggacggagcgtggtccgggtcgttgcgcgccatctgcggggtccccagccgctgcggtcggtcgggaaagccccggggccgcggccacctcctccagtggtccccaggcgcagcagcaccgagggggcggcccccaggcgcagtcgcatggggaggcccgcctgtcggatcccccggggcgagccgctcccccggacgtgggggaggagcgccggggagggggcgggacagagctgggtccccctgctcctcctcgaccccgcaatggctatcagccccaccggccacctggggggggcgggggcaagaggagaaatagctgtaatgtagggggaggcgggggaggcttcaaacatccggccttcaagaggcgcaggcgggtgaattcggactgtgactctgtgttaccttccaacttcctcctggggggcaatatctttgatcccctgaacctgaatagcctcctggatgaggaagtgagccgcactctcaacgcggagacccctaagtcatccccccttccggccaaagggcgagatccggtggagatcctcatccccaaagatattactgacccgctcagtctcaatacttgcactgatgagggccatgtagttcttgcttcgccactcaagactggtcggaagcggcatagacaccggggacagcaccaccagcagcagcaggcagccggagggagtgagagccaccccgtgccgcccacagcccctctcacccccttactccacggggagggcgcctcacagcagccgcggcacaggggccagaaccgggatgccccccaaccctatgaactcaacacagccatcaactgcagggatgaagtggtgtctccccttccatctgctctgcagggtccctcaggctccctatcagcccctccagctgcctcagttatctctgcacccccatcttcctcctcccgacatcgcaaacgtcgcaggacttccagcaagtcggaggcaggggctaggggtggaggccagggttccaaggaaaagggccgagggagttggggaggccgccaccaccaccaccacccactgcctgcagcaggcttcaaaaagcaacagcgcaagttccagtatgggaattattgcaaatactatgggtaccgcaatccttcctgtgaggatgggcgccttcgggtgttgaagcctgagtggtttcggggccgggacgtcctagatctgggctgcaatgtgggccatctgaccctgagcattgcctgcaagtggggcccgtcccgcatggtgggcctggatatcgattcccggctcatccattctgcccgccaaaacatccgacactacctttccgaggagctgcgtctcccaccccagactttggaaggggacccgggggcagagggtgaggaagggaccaccaccgttcgaaagaggagctgcttcccagcctcgctgactgccagccggggtcccatcgctgccccccaagtgcccttggatggagcggacacatcagtcttccccaacaatgttgtcttcgtcacgggtaattatgtgctggatcgagatgacctggtggaggcccaaacacctgagtatgatgtggtgctctgcctcagcctcaccaagtgggtgcatctgaactggggagacgagggcctgaagcgcatgtttcgccggatctaccggcacctacgccctgggggcatcctggtcctagagccccaaccctggtcgtcgtatggcaagagaaagactcttacagaaacgatctacaagaactactaccgaatccaattgaagccagagcagttcagttcctacctgacatccccagacgtgggcttctccagctatgagcttgtggccacaccccacaacacctctaaaggcttccagcgtcctgtgtacctgttccacaaggcccgatcccccagccactaagtggccccctaaacagaaagtgtgaagaggctgccctcgctgctcataaggacctgggggaagaggaaagtgtcccaaggtctttcctttctgactccaaaaatagtttcctttcttggatctgcaaagaaagcttttcttccgtcgctgcctcagcctcctccctatgcctctggcacctgcgcagcaaggctggctgtgctggagtcaccatcatcttcctctcccccagcctcccaggctggatggcatggactgtttgctgacctctgttctcttagggcatgggaggtgggaggatatcaaattctctagccctttcctcctattctctagcccttctattctcccaaggagagagattcccatttctcctcggccattgtacctagctcttgtccctagctgcatttcagtggaccatggatagagggactgagggttagacggagaagactggcagggaggcacgcaggtactgtgaaaatccttccctttgccctcccccagtgggagagggggttgggttttcaatgtgagaacagcacaataaacttgatgtctagggcagtggcccccaaaaaaaaaaaaaaaaaaaaaaaaaaaaaaaaaaaaaaaaaaaa

SEQ ID NO: 2334 - protein, 220 aa, Homo sapiens
MVGLDIDSRLIHSARQNIRHYLSEELRLPPQTLEGDPGAEGEEGTTTVRKRSCFPASLTASRGPIAAPQVPLDGADTSVFPNNVVFVTGNYVLDRDDLVEAQTPEYDVVLCLSLTKWVHLNWGDEGLKRMFRRIYRHLRPGGILVLEPQPWSSYGKRKTLTETIYKNYYRIQLKPEQFSSYLTSPDVGFSSYELVATPHNTSKGFQRPVYLFHKARSPSH

SEQ ID NO: 2335 - DNA, 1279 bp, Homo sapiens
ggcacgaggggaagtggctgtttggctgctgacaacatgaagacttcctgcgatgagaacagaggcacaggtgccggccctgcagcccccagaacctggactggagggggccatggggcaccggaccctggtcctgccctgggtgctgctgaccttgtgtgtcactgcggggaccccggaggtgtgggttcaagttcggatggaggccaccgagctctcgtccttcaccatccgttgtgggttcctggggtctggctccatctccctggtgactgtgagctgggggggccccgacggtgctggggggaccacgctggctgtgttgcacccagaacgtggcatccggcaatgggcccctgctcgccaggcccgctgggaaacccagagcagcatctctctcatcctggaaggctctggggccagcagcccctgcgccaacaccaccttctgctgcaagtttgcgtccttccctgagggctcctgggaggcctgtgggagcctcccgcccagctcagacccagggctctctgccccgccgactcctgcccccattctgcgggcagacctggccgggatcttgggggtctcaggagtcctcctctttggctgtgtctacctccttcatctgctgcgccgacataagcaccgccctgcccctaggctccagccgtcccgcaccagcccccaggcaccgagagcacgagcatgggcaccaagccaggcctcccaggctgctcttcacgtcccttatgccactatcaacaccagctgccgcccagctactttggacacagctcacccccatggggggccgtcctggtgggcgtcactccccacccacgctgcacaccggccccagggccctgccgcctgggcctccacacccatccctgcacgtggcagctttgtctctgttgagaatggactctacgctcaggcaggggagaggcctcctcacactggtcccggcctcactcttttccctgaccctcgggggcccagggccatggaaggacccttaggagttcgatgagagagaccatgaggccactgggctttccccctcccaggcctcctgggtgtcatccccttactttaattcttgggcctccaataagtgtcccataggtgtctggccaggcccacctgctgcggatgtggtctgtgtgcgtgtgtgggcacaggtgtgagtgtgtgagtgacagttaccccatttcagtcatttcctgctgcaactaagtcagcaacacagtttctctgaaaaaaaaaaaaaaaaaaa

SEQ ID NO: 2336 - protein, 326 aa, Homo sapiens
MRTEAQVPALQPPEPGLEGAMGHRTLVLPWVLLTLCVTAGTPEVWVQVRMEATELSSFTIRCGFLGSGSISLVTVSWGGPDGAGGTTLAVLHPERGIRQWAPARQARWETQSSISLILEGSGASSPCANTTFCCKFASFPEGSWEACGSLPPSSDPGLSAPPTPAPILRADLAGILGVSGVLLFGCVYLLHLLRRHKHRPAPRLQPSRTSPQAPRARAWAPSQASQAALHVPYATINTSCRPATLDTAHPHGGPSWWASLPTHAAHRPQGPAAWASTPIPARGSFVSVENGLYAQAGERPPHTGPGLTLFPDPRGPRAMEGPLGVR

SEQ ID NO: 2337 - DNA, 3104 bp, Homo sapiens
aagggtctaggatacagtctttgtagatgagcgggtcccccttggaggacagaatgaagaattgggaaatcatggccgttctggagagtagacaagaagacggcgaaagtcgggcctgccccgccctgcggccccggaacaaaagaacgcgtgtgcgctggccctttaagagcgattctcctccgcccgcgccagctcggaccgcgggaaacccggcgcctgcactaccccgcccggagattcccttccgacgcccgcaccgcctccccgtcactcattctaggcccgcacggtgattggcttgcggctagcgggaggtgaagaaggccgccttgtccgattggcccgcacgcagtggcgccggtcacgtggggggcgacgtttcgcgccaatttcggttggccggccacagtccaccgcgcggagattctcagcttccccaggagcaagacctctgagcccgccaagcgcggccgcacggccctcggcagcgatggcactgaaggactacgcgctagagaaggaaaaggttaagaagttcttacaagagttctaccaggatgatgaactcgggaagaagcagttcaagtatgggaaccagttggttcggctggctcatcgggaacaggtggctctgtatgtggacctggacgacgtagccgaggatgaccccgagttggtggactcaatttgtgagaatgccaggcgctacgcgaagctctttgctgatgccgtacaagagctgctgcctcagtacaaggagagggaagtggtaaataaagatgtcctggacgtttacattgagcatcggctaatgatggagcagcggagtcgggaccctgggatggtccgaagcccccagaaccagtaccctgctgaactcatgcgcagattgtgagtggtctctgtcgggaaagatgtagggattggttctccaggatcttgtttgtgactgttttctccccttagtgagctgtattttcaaggccctagcagcaacaagcctcgtgtgatccgggaagtgcgggctgactctgtggggaagttggtaactgtgcgtggaatcgtcactcgtgtctctgaagtcaaacccaagatggtggtggccacttacacttgtgaccagtgtggggcagagacctaccagccgatccagtctcccactttcatgcctctgatcatgtgcccaagccaggagtgccaaaccaaccgctcaggagggcggctgtatctgcagacacggggctccagattcatcaaattccaggagatgaagatgcaagaacatagtgatcaggtgcctgtgggaaatatccctcgtagtatcacggtgctggtagaaggagagaacacaaggattgcccagcctggagaccacgtcagcgtcactggtattttcttgccaatcctgcgcactgggttccgacaggtggtacagggtttactctcagaaacctacctggaagcccatcggattgtgaagatgaacaagagtgaggatgatgagtctggggctggagagctcaccagggaggagctgaggcaaattgcagaggaggatttctacgaaaagctggcagcttcaatcgccccagaaatatacgggcatgaagatgtgaagaaggcactgctgctcctgctagtcgggggtgtggaccagtctcctcgaggcatgaaaatccggggcaacatcaacatctgtctgatgggggatcctggtgtggccaagtctcagctcctgtcatacattgatcgactggcgcctcgcagccagtacacaacaggccggggctcctcaggagtggggcttacggcagctgtgctgagagactccgtgagtggagaactgaccttagagggtggggccctggtgctggctgaccagggtgtgtgctgcattgatgagttcgacaagatggctgaggccgaccgcacagccatccacgaggtcatggagcagcagaccatctccattgccaaggccggcattctcaccacactcaatgcccgctgctccatcctggctgccgccaaccctgcctacgggcgctacaaccctcgccgcagcctggagcagaacatacagctacctgctgcactgctctcccggtttgacctcctctggctgattcaggaccggcccgaccgagacaatgacctacggttggcccagcacatcacctatgtgcaccagcacagccggcagcccccctcccagtttgaacctctggacatgaagctcatgaggcgttacatagccatgtgccgcgagaagcagcccatggtgccagagtctctggctgactacatcacagcagcatacgtggagatgaggcgagaggcttgggctagtaaggatgccacctatacttctgcccggaccctgctggctatcctgcgcctttccactgctctggcacgtctgagaatggtggatgtggtggagaaagaagatgtgaatgaagccatcaggctaatggagatgtcaaaggactctcttctaggagacaaggggcagacagctaggactcagagaccagcagatgtgatatttgccaccgtccgtgaactggtctcagggggccgaagtgtccggttctctgaggcagagcagcgctgtgtatctcgtggcttcacacccgcccagttccaggcggctctggatgaatatgaggagctcaatgtctggcaggtcaatgcttcccggacacggatcacttttgtctgattccagcctgcttgcaaccctggggtcctcttgttccctgctggcctgccccttgggaaggggcagtgatgcctttgaggggaaggaggagcccctctttctcccatgctgcacttactccttttgctaataaaagtgtttgtagattgtcatcttctagcctgggcctgacttccattaaaacagggttttgtgcgttttttagattcctgttcgtttttatgctatttcatccactcagtaaattacctgagtaaagtgcatctccctgccaggcccccagtatagacactggggatgcggcaaggactaagcggtccctgctgtttggagatacttaagatggggctccactttttgagccccccgactccct

SEQ ID NO: 2338 - DNA, 1148 bp, Homo sapiens
ggcacgaggggaaaatggcggcggcggcggcggcggctgcagctacgaacgggaccggaggaagcagcgggatggaggtggatgcagcagtagtccccagcgtgatggcctgcggagtgactgggagtgtttccgtcgctctccatccccttgtcattctcaacatctcagaccactggatccgcatgcgctcccaggaggggcggcctgtgcaggtgattggggctctgattggcaagcaggagggccgaaatatcgaggtgatgaactcctttgagctgctgtcccacaccgtggaagagaagattatcattgacaaggaatattattacaccaaggaggagcagtttaaacaggtgttcaaggagctggagtttctgggttggtataccacaggggggccacctgacccctcggacatccacgtccataagcaggtgtgtgagatcatcgagagccccctctttctgaagttgaaccctatgaccaagcacacagatcttcctgtcagcgtttttgagtctgtcattgatataatcaatggagaggccacaatgctgtttgctgagctgacctacactctggccacagaggaagcggaacgcattggtgtagaccacgtagcccgaatgacagcaacaggcagtggagagaactccactgtggctgaacacctgatagcacagcacagcgccatcaagatgctgcacagccgcgtcaagctcatcttggagtacgtcaaggcctctgaagcgggagaggtcccctttaatcatgagatcctgcgggaggcctatgctctgtgtcactgtctcccggtgctcagcacagacaagttcaagacagatttttatgatcaatgcaacgacgtggggctcatggcctacctcggcaccatcaccaaaacgtgcaacaccatgaaccagtttgtgaacaagttcaatgtcctctacgaccgacaaggcatcggcaggagaatgcgcgggctctttttctgatgagggtacttgaagggctgatggacaggggtcaggcaactatcccaaaggggagggcactacacttccttgagagaaaccgctgtcattaataaaaggggagcagcccctgagcaccaaaaaaaaaaaaaaaaaaaaaaaaaaaaaaaa

SEQ ID NO: 2339 - protein, 297 aa, Homo sapiens
MACGVTGSVSVALHPLVILNISDHWIRMRSQEGRPVQVIGALIGKQEGRNIEVMNSFELLSHTVEEKIIIDKEYYYTKEEQFKQVFKELEFLGWYTTGGPPDPSDIHVHKQVCEIIESPLFLKLNPMTKHTDLPVSVFESVIDIINGEATMLFAELTYTLATEEAERIGVDHVARMTATGSGENSTVAEHLIAQHSAIKMLHSRVKLILEYVKASEAGEVPFNHEILREAYALCHCLPVLSTDKFKTDFYDQCNDVGLMAYLGTITKTCNTMNQFVNKFNVLYDRQGIGRRMRGLFF

SEQ ID NO: 2340 - DNA, 2180 bp, Homo sapiens
gcttccggcacgggatgttttcggttgtttgaccgagagagttgtaggcgcaaagctgaggaaaggagagtgtggagaggggcctggtgtggtggggcccggtgtttgggaccggagggtgttgacggctgatgagttccttgggtttgctctttcttcacctgaaaagaagactccaggaagggcagcacatgccggagaaagatgaattgcagcttgaccgcccagaggcgcggcagtgacgccgagttgggaccctgggtgatggctgcgaggtccaaggacgcggcgccgtcccaacgcgacggacttttgcccgtgaaagtggaggaagactcacccggaagttgggagcccaactatcccgcggcttcgccggaccccgaaacttctcgactgcactttaggcagctgcgttaccaggaggtggctggaccggaagaggcgctgagccggctccgagaactctgtcgtcggtggctgagacccgagctgctctccaaggagcagatcctggagctgctggtgctggagcagttcctcaccatcctgcccgaggagcttcaagcctgggtgcgagagcactgcccagagagcggggaggaggcggtggccgtggtgcgggctctgcagcgagcgctcgatggaacctcatcccaggggatggtgactttcgaggacacggctgtgtctctaacctgggaggagtgggagcgcctggacccagcacggagggacttctgcagagagagtgcgcagaaggattccgggagcacagttccgccgagtttggaaagcagagtggagaacaaagagttgattccaatgcaacaaattttagaagaagcggagccacaggggcaactacaagaagcgttccaggggaagcgccccctgttttctaagtgtggcagtacccatgaggacagggtggaaaagcagtccggagaccccttgcccctgaaacttgaaaattctcctgaagcagaaggactcaacagcatctcagatgtcaataagaatggttccatagaaggggaagactctaaaaataatgaattgcagaacagtgccaggtgttccaaccttgttctatgtcagcacatcccgaaagcagagaggcccactgacagtgaggaacacgggaacaagtgcaagcaaagtttccacatggtgacgtggcacgtgctgaaacctcacaagtctgacagtggagacagtttccatcattccagcctttttgagacccagaggcagctccatgaagaaagaccttataaatgtggtaactgtgggaagagtttcaaacaacgctctgacctctttagacaccagagaatccacacaggtgagaaaccctatggctgccaagaatgtgggaaaagcttcagccagagtgctgccctgaccaagcaccagaggacacacacaggcgagaagccgtacacctgtctgaaatgtggggagcgcttcaggcagaattcacacctaaatcgtcatcaaagtacccacagtagagacaaacattttaaatgtgaggaatgcggggaaacctgtcatatttccaacctttttagacatcagagactacataaaggggaaagaccctataagtgtgaagaatgcgagaagagcttcaaacagcgctctgacctctttaaacaccacagaatccacactggggagaagccctatggatgttccgtctgtgggaaacgcttcaatcagagtgcaaccctcattaaacaccagagaattcacactggggaaaagccttacaaatgtcttgaatgtggggaaagatttagacaaagtacacaccttatccgacaccaaagaattcatcaaaataaagtgctgtcggctgggcgtggtggctcacgcctataatcccagcactttgggaggccaaggcaggcagatcatttgagatcaggagtttgaaaccagcctggccaacatggtgaaattctgtctctactaaaaatacaaaaatgagccgggcatggtggtgcatgcctgtaagcccagctattcgggaggctgaggtaggagaatcacttgaacccaggaggcggaagttgcagtgagctgagatcatgccactgcactccagcctgggcaacagagcgagactccatctcaaaaaaagaaataaagtgctgtcattttgatatgtt

SEQ ID NO: 2341 - protein, 561 aa, Homo sapiens
MNCSLTAQRRGSDAELGPWVMAARSKDAAPSQRDGLLPVKVEEDSPGSWEPNYPAASPDPETSRLHFRQLRYQEVAGPEEALSRLRELCRRWLRPELLSKEQILELLVLEQFLTILPEELQAWVREHCPESGEEAVAVVRALQRALDGTSSQGMVTFEDTAVSLTWEEWERLDPARRDFCRESAQKDSGSTVPPSLESRVENKELIPMQQILEEAEPQGQLQEAFQGKRPLFSKCGSTHEDRVEKQSGDPLPLKLENSPEAEGLNSISDVNKNGSIEGEDSKNNELQNSARCSNLVLCQHIPKAERPTDSEEHGNKCKQSFHMVTWHVLKPHKSDSGDSFHHSSLFETQRQLHEERPYKCGNCGKSFKQRSDLFRHQRIHTGEKPYGCQECGKSFSQSAALTKHQRTHTGEKPYTCLKCGERFRQNSHLNRHQSTHSRDKHFKCEECGETCHISNLFRHQRLHKGERPYKCEECEKSFKQRSDLFKHHRIHTGEKPYGCSVCGKRFNQSATLIKHQRIHTGEKPYKCLECGERFRQSTHLIRHQRIHQNKVLSAGRGGSRL

SEQ ID NO: 2342 - DNA, 452 bp, Homo sapiens
gggcacagcggacaccaggactccaaaatggcgtcagttggtgagtgtccggccccagtaccagtgaaggacaagaaacttctggaggtcaaactgggggagctgccaagctggatcttgatgcgggacttcagtcctagtggcattttcggagcgtttcaaagaggttactaccggtactacaacaagtacatcaatgtgaagaaggggagcatctcggggattaccatggtgctggcatgctacgtgctctttagctactccttttcctacaagcatctcaagcacgagcggctccgcaaataccactgaagaggacacactctgcacccccccaccccacgaccttggcccgagcccctccgtgaggaacacaatctcaatcgttgctgaatcctttcatatcctaataggaattaacctccaaataaaacatgactggtaaaaaaaaa

SEQ ID NO: 2343 - protein, 94 aa, Homo sapiens
MASVGECPAPVPVKDKKLLEVKLGELPSWILMRDFSPSGIFGAFQRGYYRYYNKYINVKKGSISGITMVLACYVLFSYSFSYKHLKHERLRKYH

SEQ ID NO: 2344 - DNA, 1717 bp, Homo sapiens
tcgctcgctcctccttcgcttcgcctcgccgccgccatgcaggaaatcatcgccagcgtggaccacatcaagtttgacttggagatcgcggtggagcagcagctgggggcgcagccgctgcccttccccggcatggacaagtcgggcgctgctgtctgtgaattctttttgaaagctgcctgcggcaaagggggcatgtgtccgtttcgccacatcagtggtgagaagacagttgtgtgcaaacactggctgcgtggcctatgcaagaaaggggaccagtgtgagttcctgcatgagtatgacatgaccaagatgcccgagtgctacttctactccaagttcggggagtgcagcaacaaggaatgtcccttcctgcacatcgaccccgagtccaagatcaaggactgtccttggtatgaccgcggcttctgcaagcacggtcccctctgcaggcaccggcacacacggagagtcatctgtgtgaattacctcgtgggattctgcccggaggggccctcgtgtaaattcatgcaccctcgatttgaactgcccatgggaaccaccgagcagcccccactgccacagcagacacagcctccagcaaagcaaagtaacaatccgccattacaaaggtcgtcctccttgatccagttaacgagtcagaactcttctcccaatcagcagagaaccccgcaggtcatcggggtcatgcagagtcaaaacagcagcgcgggcaaccggggaccccggccactggagcaggtcacctgttacaagtgtggcgagaaaggacactacgccaacagatgcaccaaagggcacttggcctttctcagtggacagtgacagcagctggagccagctccgagcagcccgggggccccgctgttgggagtgtgcatttaactgtttcatgcgcttgttggcgcgactgtggctcgagctggcccgcagacacgtgggtttcatcactctgaggggccacgtctgttagtttcctatcattttgccgtagtattttttgaaaaagggacatgtgtcctgtgggtccctgcagtcgacatcatgtttggctgggcatcgatgcctcctttctgggactcccggcacaactcccctcatccagggagggaggcagctgctggggaggggcttggctaggtagttctgtgtggcggtggtcattcccctcattaaacaccagttcttggtgacgccaggggctggtaggtcattcaaagctgtggccagctcacgcctgcttcctccctccctgccctgctgaatcctaaagctgtgcctatatctgtgatttgaatgagggagccctttggggcaaattcaggtgcccccattgcctcaggctggccctggtcccaggtggcagcggttgaggaggggtacagggctctcaagcctgaggttttcttctctgggcttaattttctcttggggtacgtgcctgacagtgtttaaggtgtccgttgaactggagttgcagacttttaaatagatgaccccttcagatcatctgtgcctacctcctgcccatcaggcgtctacactgtcactcagacacctgtggcatgtggaggagactgccctgtcctgagcctggaaaatgtgaaactgtctcctgcaacctgctgggcatgtgggcctggctgtgttcaattgcaagaacaatttttatgaaatggattaaagcttgtttttt

SEQ ID NO: 2345 - protein, 269 aa, Homo sapiens
MQEIIASVDHIKFDLEIAVEQQLGAQPLPFPGMDKSGAAVCEFFLKAACGKGGMCPFRHISGEKTVVCKHWLRGLCKKGDQCEFLHEYDMTKMPECYFYSKFGECSNKECPFLHIDPESKIKDCPWYDRGFCKHGPLCRHRHTRRVICVNYLVGFCPEGPSCKFMHPRFELPMGTTEQPPLPQQTQPPAKQSNNPPLQRSSSLIQLTSQNSSPNQQRTPQVIGVMQSQNSSAGNRGPRPLEQVTCYKCGEKGHYANRCTKGHLAFLSGQ

SEQ ID NO: 2346 - DNA, 939 bp, Homo sapiens
ctgaggcgggagaccggtggtctgcaccgtcctggagggagatatgagtggctggactctcagccagccactgggatgtgttcgggctttggaccttgaggccggagagagctcccgagaggaggcggcgccacgttcgttcttctgaggggacggtagatttgggggttttcctctaggattctcgcgccgtttcctctgaagaaacaggaccagagagggaaggtgacctgaaagtcacagaataattttttagagctgaacaagaatccaagcctgcaactgcagagacgagagatctttctgctgtctatactcttggaaagcacatcctaagatctttgcagattatcctgtggaaggaaaatgcctaaagtcaaaagaagccggaaagcacccccagatggctgggagttgattgagccaacactggatgaattagatcaaaagatgagagaagctgaaacagaaccgcatgagggaaagaggaaagtggaatctctgtggcccatcttcaggatccaccaccagaaaacccgctacatcttcgacctcttttacaagcggaaagccatcagcagagacaaaaacctgattgcaaaatggaaaaagcaaggatatgagaacttgtgctgcctgcggtgcattcagacacgggacaccaacttcgggacgaactgcatctgccgcgtgcccaaaagcaagctggaagtgggccgcatcatcgagtgcacacactgtggctgtcgtggctgctctggctgaggctggcgcgctccaccctggactctggacttcgcaggttcctgcctgtcacgccacccccttcctgggagcagcgagcagtgccccaggcccgagttggagcacggtctctatggggaaggcttcgctgtctatcagctgtgatttgtaaaaataaaatctttaaatctctcg

SEQ ID NO: 2347 - protein, 144 aa, Homo sapiens
  unsure 73: unknown amino acid
  unsure 74: unknown amino acid
  unsure 75: unknown amino acid
  unsure 76: unknown amino acid
  unsure 77: unknown amino acid
  unsure 78: unknown amino acid
  unsure 79: unknown amino acid
  unsure 80: unknown amino acid
  unsure 81: unknown amino acid
  unsure 82: unknown amino acid
  unsure 83: unknown amino acid
  unsure 84: unknown amino acid
  unsure 85: unknown amino acid
MPKVKRSRKAPPDGWELIEPTLDELDQKMREAETEPHEGKRKVESLWPIFRIHHQKTRYIFDLFYKRKAISRXXXXXXXXXXXXXKNLIAKWKKQGYENLCCLRCIQTRDTNFGTNCICRVPKSKLEVGRIIECTHCGCRGCSG

SEQ ID NO: 2348 - DNA, 1428 bp, Homo sapiens
ggcacgagggagcccagagccggttcggcgcgtcgactgcccagagtccgcggccggggcgcgggaggagccaagccgccatggcctaccacagcttcctggtggagcccatcagctgccacgcctggaacaaggaccgcacccagattgccatctgccccaacaaccatgaggtgcatatctatgaaaagagcggtgccaaatggaccaaggtgcacgagctcaaggagcacaacgggcaggtgacaggcatcgactgggcccccgagagtaaccgtattgtgacctgcggcacagaccgcaacgcctacgtgtggacgctgaagggccgcacatggaagcccacgctggtcatcctgcggatcaaccgggctgcccgctgcgtgcgctgggcccccaacgagaacaagtttgctgtgggcagcggctctcgtgtgatctccatctgttatttcgagcaggagaatgactggtgggtttgcaagcacatcaagaagcccatccgctccaccgtcctcagcctggactggcaccccaacaatgtgctgctggctgccggctcctgtgacttcaagtgtcggatcttttcagcctacatcaaggaggtggaggaacggccggcacccaccccgtggggctccaagatgccctttggggaactgatgttcgaatccagcagtagctgcggctgggtacatggcgtctgtttctcagccagcgggagccgcgtggcctgggtaagccacgacagcaccgtctgcctggctgatgccgacaagaagatggccgtcgcgactctggcctctgaaacactaccactgctggcgctgaccttcatcacagacaacagcctggtggcagcgggccacgactgcttcccggtgctgttcacctatgacgccgccgcggggatgctgagcttcggcgggcggctggacgttcctaagcagagctcgcagcgtggcttgacggcccgcgagcgcttccagaacctggacaagaaggcgagctccgagggtggcacggctgcgggcgcgggcctagactcgctgcacaagaacagcgtcagccagatctcggtgctcagcggcggcaaggccaagtgctcgcagttctgcaccactggcatggatggcggcatgagtatctgggatgtgaagagcttggagtcagccttgaaggacctcaagatcaaatgacctgtgaggaatatgttgccttcatcctaactgctggggaagcggggagaggggtcagggaggctaatggttgctttgctgaatgtttctggggtaccaatacgagttcccataggggctgctccctcaaaaagggaggggacagatggggagcttttcttacctattcaaggaatacgtgcctttttcttaaatgctttcatttattgaaaaaaaaaaaaaaaaaaaa

SEQ ID NO: 2349 - protein, 372 aa, Homo sapiens
MAYHSFLVEPISCHAWNKDRTQIAICPNNHEVHIYEKSGAKWTKVHELKEHNGQVTGIDWAPESNRIVTCGTDRNAYVWTLKGRTWKPTLVILRINRAARCVRWAPNENKFAVGSGSRVISICYFEQENDWWVCKHIKKPIRSTVLSLDWHPNNVLLAAGSCDFKCRIFSAYIKEVEERPAPTPWGSKMPFGELMFESSSSCGWVHGVCFSASGSRVAWVSHDSTVCLADADKKMAVATLASETLPLLALTFITDNSLVAAGHDCFPVLFTYDAAAGMLSFGGRLDVPKQSSQRGLTARERFQNLDKKASSEGGTAAGAGLDSLHKNSVSQISVLSGGKAKCSQFCTTGMDGGMSIWDVKSLESALKDLKIK

SEQ ID NO: 2350 - DNA, 1154 bp, Homo sapiens
cagctttctctcctttgaaaacactaagaataatgtcactgcatcagtttttactagagccaatcacctgtcatgcctggaacagggatcgtactcagattgccctcagtcccaataatcacgaagtgcacatctataagaagaacgggagccagtgggtgaaagctcatgaactcaaggagcacaacggacacatcacaggtattgactgggctcccaagagcgaccgcattgtcacttgtggggcagaccgcaatgcctatgtctggagtcagaaagatggtgtttggaagccaaccctggtgatcctgagaattaatcgcgcagctacttttgtgaagtggtcccccctagagaacaaatttgctgtgggaagtggagcacgactcatttctgtttgttactttgagtctgaaaatgactggtgggtgagcaagcacattaaaaagccgattcgctccacagtcctcagcttggattggcatcccaacaacgttttgctggcagcaggatcatgtgacttcaaatgcagagtgttttctgcctacattaaagaagtggatgaaaagccagccagcacgccctggggcagcaagatgccttttgggcagctgatgtcagagtttggtggcagtggcactggtggctgggtccacggggtaagcttctctgccagtgggagccgcctggcctgggtcagccacgacagcaccgtgtctgttgctgatgcctcaaaaagtgtgcaggtctcgactctgaagacagagttcctgccgctcctaagtgtgtcatttgtctcagagaacagcgtcgtggctgctggccatgactgctgcccaatgctctttaactacgatgaccgcggctgcctgaccttcgtctccaagttagatattccaaaacagagcatccaacgcaacatgtctgccatggaacgcttccgcaacatggacaagagagccacaactgaggaccgcaacacggccttggagacgctgcaccagaatagcatcactcaagtctctatttatgaggtggacaagcaagattgtcgcaaattttgcactactggcatcgatggagccatgacaatttgggatttcaagaccctcgagtcttccatccagggcctccggataatgtgaagctgagtg

SEQ ID NO: 2351 - DNA, 3617 bp, Homo sapiens
ctcctctgctcctcgaagaaggccagggcggcgctgccgcaagttttgacattttcgcagcggagacgcgcgcgggcactctcgggccgacggctgcggcggcggccgaccctccagagccccttagtcgcgccccggccctcccgctgcccggagtccggcggccacgaggcccagccgcgtcctcccgcgcttgctcgcccggcggccgcagccatgtcccgggggcccgaggaggtgaaccggctcacggagagcacctaccggaatgttatggaacagttcaatcctgggctgcgaaatttaataaacctggggaaaaattatgagaaagctgtaaacgctatgatcctggcaggaaaagcctactacgatggagtggccaagatcggtgagattgccactgggtcccccgtgtcaactgaactgggacatgtcctcatagagatttcaagtacccacaagaaactcaacgagagtcttgatgaaaattttaaaaaattccacaaagagattatccatgagctggagaagaagatagaacttgacgtgaaatatatgaacgcaactctaaaaagataccaaacagaacacaagaataaattagagtctttggagaaatcccaagctgagttgaagaagatcagaaggaaaagccaaggaagccgaaacgcactcaaatatgaacacaaagaaattgagtatgtggagaccgttacttctcgtcagagtgaaatccagaaattcattgcagatggttgcaaagaggctctgcttgaagagaagaggcgcttctgctttctggttgataagcactgtggctttgcaaaccacatacattattatcacttacagtctgcagaactactgaattccaagctgcctcggtggcaggagacctgtgttgatgccatcaaagtgccagagaaaatcatgaatatgatcgaagaaataaagaccccagcctctacccccgtgtctggaactcctcaggcttcacccatgatcgagagaagcaatgtggttaggaaagattacgacaccctttctaaatgctcaccaaagatgccccccgctccttcaggcagagcatataccagtcccttgatcgatatgtttaataacccagccacggctgccccgaattcacaaagggtaaataattcaacaggtacttccgaagatcccagtttacagcgatcagtttcggttgcaacgggactgaacatgatgaagaagcagaaagtgaagaccatcttcccgcacactgcgggctccaacaagaccttactcagctttgcacagggagatgtcatcacgctgctcatccccgaggagaaggatggctggctctatggagaacacgacgtgtccaaggcgaggggttggttcccgtcgtcgtacacgaagttgctggaagaaaatgagacagaagcagtgaccgtgcccacgccaagccccacaccagtgagaagcatcagcaccgtgaacttgtctgagaatagcagtgttgtcatccccccacccgactacttggaatgcttgtccatgggggcagctgccgacaggagagcagattcggccaggacgacatccacctttaaggccccagcgtccaagcccgagaccgcggctcctaacgatgccaacgggactgcaaagccgccttttctcagcggagaaaacccctttgccactgtgaaactccgcccgactgtgacgaatgatcgctcggcacccatcattcgatgagaggacagccaaggactctcccgggcctctccggttctcccttgcggaatgatgggcgcatcctgtctgccacgtgctgacggtcgggaagcttcagtggagaggcctaactctaatgtcgcctgcttaagcaaatcatgcttctctgtttcacgtagttgggttgacaagtttctgcctttaagataaatgagtaatagtctaatgaccagctcagccatttaaaatattttcttcctattctgttcaagaaacagtaaacttggtttcaatctttactgtattttttaaatgaattttttccttaataacagccagaataagggatagtctatgctttcaggactggctttctgcacctgatatgaatgagaccagttttattttataaagcatgtgctcttaatagcattatgtctaaagaagatatcacgtaagtttgcatcttagcatgcaaatcataattttaagcaatataaattatgaaaatactatataaatgtaatttaacttaaaatgtttaagtgtagagcttccagagatggagaaacccccaccctccctccaaccacgccagagctgtagagtgctaagacgctttgcctgcccttatcacagccacacgtagcactcgacgaaatctcctccgagagctccttttcttggtagttaggagtcgccaacggattcgctgcacacggcccatccaggacacaggcctgggcgtcggagtcacggctccttgtgttctcactcagctagttggccaaagctgcatccattaccagtacactcaaactgctcggggtcctggtttctccgtgtttgaatcaggtacagactctcaaaggatacgtgtaaagccaggatgacctctggtgcctggagaagggcgggtttttcagcctagcagccatgatgccctcggaacctggccctatggtatggatgtgaggactacgcactggctgccctgagcccggggctggaaatcatctttggctgccaaggatctggacctattttggagtggagagtcatggttaaaattcccagcccggcccaggtacgggaatcccagcattttgtgaggccgaggcagggggatcacctgaggtcaggagtctctactaaaaatacaaaaattagacaggtgtggtggtgggcgccactcaggaggctgaggcaggagaatcacttgaacccgggaggcagaggttgcagtgagccagatcatgctgctgcactccagcccggccgctcaccgtgtgtgttgctgggtgctggggctgtgacttatcccctctcctttagccttgccataagtgtagtatcctatgaggctgagattgggaaaggttacatgcaggtaagccagtggacgtggccgatgcttcaggctccttccagccaggtccagcagtgttaccatctgcttctcctgggaggacaaaccaggcacccccaccatgaaggggctgcaggcaccatgaactatgttaacaaccccagtctgtactacagaaagggctgcagccacatgagaattcagtccacacaagccccatggccgtgttccccacttcagccacagggctcagggagccccatctggcgctaaggggaactgctggggtgtgggtgacacctggcctttggcgttctgccttggggaggtttctggttttgttacggggtggaagaataggacctgggggtctcggatgcaacctgcagaccccgtggctcacccaaccccaggttctgcctcccagaccagaacgggcatggcctggtccttggcaccgaggtgcctgctctgtaaatatcaagggattacaactttaataataaagcagaacttg

SEQ ID NO: 2352 - DNA, 720 bp, Homo sapiens
ggcggttggcaagaacaagcgccttacgaaaggcggcaaaaagggagccaagaagaaagtggttgatccattttctaagaaagattggtatgatgtgaaagcacctgctatgttcagtataagaaatattggaaagacgctcgtcaccaggacccaaggaaccaaaattgcatctgatggtctcaagggtcgtgtgtttgaagtgagtcttgctgatttgcagaatgatgaagttgcatttagaaaattcaggctgattactcttcgtctgttctgtgttggttttactaaaaaacgcaacaatcagatacggaagacctcttatgctcagcaccaacaggtccgccaaatccggaagaagatgatcgaaatcatgacccgagaggtgcagacaaatgacttgaaagaagtggtcaataaattgattccagacagcattggaaaagacatagaaaaggcttgccagtctatttatcctctccatgatgtcttcgttagaaaagtaaaaatgctgaagaagcccaagtttgaattgggaaagctcatggagcttcatggtgaaggcagtagttctggaaaagccactggggacgagacaggtgctaaagttgaacgagctgatggatatgaaccaccagtccaagaatctgtttaaagttcagacttcaaatagtggcaaataaagagtgctatttgtgaaaaaaaaaacaaaaaaaaaaa

SEQ ID NO: 2353 - DNA, 4185 bp, Homo sapiens
cgcagtgctgctggggcattgcctgtgacaaccaggtctacgtgtatgtgtgtgccagcgatgtccccatccgccgccgagaggaggcctatgagaatcagcgctggaatcccatgggcggcttctgtgagaagctcctgctgagtgaccgctgggggtggagtgacgtgagtgggctccagcaccggccgctggacagggtggcactgccctcgccgcactgggagtgggagtctgactggtacgtggatgagaattttggaggtgaacccactgagaaaggggggtggacgtacgccatcgactttcccgccacctacacgaaagacaagaagtggaattcttgtgtgcggcgccggaagtggatccggtacaggagatacaagtcccgggacatctgggccaagatcccctcgaaggatgaccccaaggagctgcccgaccccttcaacgacctctctgtagggggctgggagatcacggaggagcctgtgggccgcctgtcagtgtgggctgtgtctctgcagggcaaggtgtggtacagagaggacgtcagccactccaaccccgaagggtcctcctggtccctgctggacacccccggggaggtggttcagatcagctgtgggccccacgacctcctgtgggccacactctgggagggacaggccctggtccgggaaggaatcaacaggagcaatcccaaaggaagttcctggtccatcgtggagcctcctggatctgaaaacggggtcatgcacatctcggtgggagtcagcgtggtctgggctgtcaccaaggactggaaggtgtggttccgaagaggcgtcaactctcacaatccctgcggcaccagttggattgagatggttggtgagatgacgatggtgaacgtgggaatgaacgaccaggtgtggggcattggctgtgaggaccgagccgtgtacttccggcagggtgtcacccccagcgagctcagtgggaagacctggaaagccatcatcgcggcccgagagtgtgaccggtcacactctggcagctcgtctagtctcctcagtgccggctgcttcttcggtgatgaggtgaggggtagtggcgagtctgcccccagcgacaccgatgcctcctcggaagtcgagagaccagggcctggccagattctccctgcagaacctctagacgattccaagaatgccacagggaactcagcctcaggcctgggggctggcaggaccgcagaagataccgtggaagatgcctgcccagccgagggcagcagggaggccagacccaacacgcaccccggcccggcccccaccccggccgagctgccctggaccaatattgacctcaaggaggccaagaaagtgcccagccactcggccgctggcttccccgagaccaccagcctctcctctctggggctcctcccactgggcttggaggagccgtatggggtggatgaccacccgctgtgggcctgggtgtcgggaggcggctgcgtggtggaggcatgtgccatgcccagatggttcactgtccaggcgggcctgtcctcctcggtacacatgctgtccctgtccatcacgccggcccagaccgctgcctggaggaagcagatcttccagcagctcacggaaaggaccaagcgggagctggagaacttcagacactacgagcaggccgtggagcagtcggtgtgggtgaagaccggggcgctgcagtggtggtgcgactggaagccccacaagtgggtggacgtgcgcttggccctggagcagttcacggggcacgacggcgtccgggacagcatcctcttcatctactatgtggtccacgaggagaagaagtacatccacatattcctgaatgaggtggtggcgctggtcccagtgctgaacgagaccaagcactcctttgccctgtacacccctgagcggacacggcagaggtggccggtgcgtctggctgctgccaccgagcaggacatgaatgactggctcgccctgctcagcctgtcttgctgcgagagccggaaggtgcagggccgcccgtccccgcaggccatctggtccatcacctgcaagggggacatcttcgtgagcgagcccagcccagacctggaggcccacgagcaccccctgccctgcgaccagatgttttggcggcagatgggaggccacctgcggatggtggaggccaacagccggggcgtggtgtggggcatcggctatgaccacacggcctgggtatacacaggcggctatggaggcggctgcttccaaggcctggccagcagcaccagtaacatctacacgcagtcagacgtgaagtgtgttcacatctatgagaaccagcgctggaaccccgtcacaggctacaccagcaggggtctgcccacggaccggtacatgtggagcgatgcctcggggctgcaggagtgcacgaaggctggcacgaagcccccgtccctgcagtgggcctgggtttccgactggttcgtggatttcagcgttccggggggcacggaccaggaggggtggcagtatgccagcgacttccctgcctcataccatgggtccaaaacgatgaaggattttgtgaggaggaggtgctgggccagaaaatgcaagctggtgaccagtgggccctggctggaggtgccccccatcgccctcagggacgtgtccatcatcccggagagcccgggtgccgaggggagtgggcacagcatcgccctctgggccgtcagcgacaagggggatgtgctgtgccgcctgggcgtgtcggagctcaaccctgcgggctcctcctggctgcacgttggcaccgaccagcccttcgcctccatctccatcggggcctgctaccaggtgtgggccgtggcaagggacggctccgccttctaccggggatccgtgtacccctcgcagccagccggtgactgctggtaccacatcccgtccccaccgagacagaggctgaagcaggtgtccgcggggcagacgtcggtgtatgccctggatgagaatggaaacctgtggtatcgccaagggatcacgcccagctacccgcagggctccagctgggagcacgtgtccaacaacgtgtgccgagtgtccgtggggcccctggaccaggtctgggtgatcgccaacaaagtgcagggcagccacagcctgagccgggggacagtgtgtcatcgcaccggcgtgcagcctcacgagcccaagggccacggctgggactacggcatcgggggaggctgggaccatatctctgtccgggccaatgccaccagggccccccggagctcgtcccaggagcaggagccgagtgccccaccagaggcccatggccccgtctgctgctgaggcccccccacacacctacatgcagggacggtgcccagtttgggggatcaaggctgagccattcttgtgctggagtgtgcaccgtgggagcaatgtggcccaggtggactcaggagggaacctggccccaaggctgcggccacttcagaggcactggctgagacggccctgaaatgtgaagctccgcggacactcccacacgtgtccccgtctgcgaggagtcccggggtgtggggcatggggtggggctgcacctcccagaggcccctcccacccttcccttcccctctcccttctgcctttccaggactagaaccgggaacctggagccctccgggaacgccggccctggggcagcagagccaggatggagccctcctgagctggcatctcagacagcacccgggcccgccacccctcaccaagagagatggccatggggctcagggcctctttaccatgtgcagtgaccatttctcagagcaggacttgcaaagaggctttaatttcaaaagtgaaggaaggaggccaggcgccgtggctcacgcctgtaatcccagcactttgggaggctgaggtgggcagatcacctaggtcaagagtttcaaaccagacgggccaacatggtgaaaccccatctctgctaaaaatacaaaaaaaaaaaaattagctgggcatggtggtgggtgcctgtaatcccagctactcgggaggctgaggcaggagaatcgtttgaacccgggaggcggaggctgcagtgagccgagatcatgccactgcactccagcctgggcgacagagactccatctc

SEQ ID NO: 2354 - protein, 112 aa, Homo sapiens
MGWGCTSQRPLPPFPSPLPSAFPGLEPGTWSPPGTPALGQQSQDGALLSWHLRQHPGPPPLTKRDGHGAQGLFTMCSDHFSEQDLQRGFNFKSEGRRPGAVAHACNPSTLGG

SEQ ID NO: 2355 - DNA, 1994 bp, Homo sapiens
aaacttcccgcacgcgttacaggagccaggtcggtataagcgccagcggcctcgccgcccgtcaagctgtccacatccctggcctcagcccgccacatcaccctgacctgcttacgcccagattttcttcaatcacatctgaataaatcacttgaagaaagcttatagcttcattgcaccatgtgtggcatttgggcgctgtttggcagtgatgattgcctttctgttcagtgtctgagtgctatgaagattgcacacagaggtccagatgcattccgttttgagaatgtcaatggatacaccaactgctgctttggatttcaccggttggcggtagttgacccgctgtttggaatgcagccaattcgagtgaagaaatatccgtatttgtggctctgttacaatggtgaaatctacaaccataagaagatgcaacagcattttgaatttgaataccagaccaaagtggatggtgagataatccttcatctttatgacaaaggaggaattgagcaaacaatttgtatgttggatggtgtgtttgcatttgttttactggatactgccaataagaaagtgttcctgggtagagatacatatggagtcagacctttgtttaaagcaatgacagaagatggatttttggctgtatgttcagaagctaaaggtcttgttacattgaagcactccgcgactccctttttaaaagtggagccttttcttcctggacactatgaagttttggatttaaagccaaatggcaaagttgcatccgtggaaatggttaaatatcatcactgtcgggatgaacccctgcacgccctctatgacaatgtggagaaactctttccaggttttgagatagaaactgtgaagaacaacctcaggatcctttttaataatgctgtaaagaaacgtttgatgacagacagaaggattggctgccttttatcagggggcttggactccagcttggttgctgccactctgttgaagcagctgaaagaagcccaagtacagtatcctctccagacatttgcaattggcatggaagacagccccgatttactggctgctagaaaggtggcagatcatattggaagtgaacattatgaagtcctttttaactctgaggaaggcattcaggctctggatgaagtcatattttccttggaaacttatgacattacaacagttcgtgcttcagtaggtatgtatttaatttccaagtatattcggaagaacacagatagcgtggtgatcttctctggagaaggatcagatgaacttacgcagggttacatatattttcacaaggctccttctcctgaaaaagccgaggaggagagtgagaggcttctgagggaactctatttgtttgatgttctccgcgcagatcgaactactgctgcccatggtcttgaactgagagtcccatttctagatcatcgattttcttcctattacttgtctctgccaccagaaatgagaattccaaagaatgggatagaaaaacatctcctgagagagacgtttgaggattccaatctgatacccaaagagattctctggcgaccaaaagaagccttcagtgatggaataacttcagttaagaattcctggtttaagattttacaggaatacgttgaacatcaggttgatgatgcaatgatggcaaatgcagcccagaaatttcccttcaatactcctaaaaccaaagaaggatattactaccgtcaagtctttgaacgccattacccaggccgggctgactggctgagccattactggatgcccaagtggatcaatgccactgacccttctgcccgcacgctgacccactacaagtcagctgtcaaagcttaggtggtctttatgctgtaatgtgaaagcaaatatttcttcgtgttggatggggactgtgggtagataggggaacaatgagagtcaactcaggctaacttgggtgtgaaaaaaataaaagtcctaaatct

SEQ ID NO: 2356 - protein, 561 aa, Homo sapiens
MCGIWALFGSDDCLSVQCLSAMKIAHRGPDAFRFENVNGYTNCCFGFHRLAVVDPLFGMQPIRVKKYPYLWLCYNGEIYNHKKMQQHFEFEYQTKVDGEIILHLYDKGGIEQTICMLDGVFAFVLLDTANKKVFLGRDTYGVRPLFKAMTEDGFLAVCSEAKGLVTLKHSATPFLKVEPFLPGHYEVLDLKPNGKVASVEMVKYHHCRDEPLHALYDNVEKLFPGFEIETVKNNLRILFNNAVKKRLMTDRRIGCLLSGGLDSSLVAATLLKQLKEAQVQYPLQTFAIGMEDSPDLLAARKVADHIGSEHYEVLFNSEEGIQALDEVIFSLETYDITTVRASVGMYLISKYIRKNTDSVVIFSGEGSDELTQGYIYFHKAPSPEKAEEESERLLRELYLFDVLRADRTTAAHGLELRVPFLDHRFSSYYLSLPPEMRIPKNGIEKHLLRETFEDSNLIPKEILWRPKEAFSDGITSVKNSWFKILQEYVEHQVDDAMMANAAQKFPFNTPKTKEGYYYRQVFERHYPGRADWLSHYWMPKWINATDPSARTLTHYKSAVKA

SEQ ID NO: 2357 - DNA, 2348 bp, Homo sapiens
cctttctgtcctggttccctgaagcatcgagagggaaccgcggccggcaggccggaccgctccggagaggaggcagcggcagtttgagcccctgtaaatgttatatgtgtacttttttttactatgtggcgtcgaagcctgtggacattttcgcggtccgggtccctgcggcggacgggtcggatcgtgctcgtggccagggcgcagtcaggtgtcgcgtggtcctgatctaggaagagactgcggccttatcaccgtctcggtgtctgctttcaccttcaactgcccccctcctcacctggaccgctcaccctcctcctcccctctcaccccgccatccccaccagtccccacctgtctctgtagactgcaagactcatcaagtgacttgctgagcaaaccctgccgagaagagattttcttcaatcacatctgaataaatcacttgaagaaagcttatagcttcattgcaccatgtgtggcatttgggcgctgtttggcagtgatgattgcctttctgttcagtgtctgagtgctatgaagattgcacacagaggtccagatgcattccgttttgagaatgtcaatggatacaccaactgctgctttggatttcaccggttggcggtagttgacccgctgtttggaatgcagccaattcgagtgaagaaatatccgtatttgtggctctgttacaatggtgaaatctacaaccataagaagatgcaacagcattttgaatttgaataccagaccaaagtggatggtgagataatccttcatctttatgacaaaggaggaattgagcaaacaatttgtatgttggatggtgtgtttgcatttgttttactggatactgccaataagaaagtgttcctgggtagagatacatatggagtcagacctttgtttaaagcaatgacagaagatggatttttggctgtatgttcagaagctaaaggtcttgttacattgaagcactccgcgactccctttttaaaagtggagccttttcttcctggacactatgaagttttggatttaaagccaaatggcaaagttgcatccgtggaaatggttaaatatcatcactgtcgggatgaacccctgcacgccctctatgacaatgtggagaaactctttccaggttttgagatagaaactgtgaagaacaacctcaggatcctttttaataatgctgtaaagaaacgtttgatgacagacagaaggattggctgccttttatcagggggcttggactccagcttggttgctgccactctgttgaagcagctgaaagaagcccaagtacagtatcctctccagacatttgcaattggcatggaagacagccccgatttactggctgctagaaaggtggcagatcatattggaagtgaacattatgaagtcctttttaactctgaggaaggcattcaggctctggatgaagtcatattttccttggaaacttatgacattacaacagttcgtgcttcagtaggtatgtatttaatttccaagtatattcggaagaacacagatagcgtggtgatcttctctggagaaggatcagatgaacttacgcagggttacatatattttcacaaggctccttctcctgaaaaagccgaggaggagagtgagaggcttctgagggaactctatttgtttgatgttctccgcgcagatcgaactactgctgcccatggtcttgaactgagagtcccatttctagatcatcgattttcttcctattacttgtctctgccaccagaaatgagaattccaaagaatgggatagaaaaacatctcctgagagagacgtttgaggattccaatctgatacccaaagagattctctggcgaccaaaagaagccttcagtgatggaataacttcagttaagaattcctggtttaagattttacaggaatacgttgaacatcaggttgatgatgcaatgatggcaaatgcagcccagaaatttcccttcaatactcctaaaaccaaagaaggatattactaccgtcaagtctttgaacgccattacccaggccgggctgactggctgagccattactggatgcccaagtggatcaatgccactgacccttctgcccgcacgctgacccactacaagtcagctgtcaaagcttaggtggtctttatgctgtaatgtgaaagcaaatatttcttcgtgttggatggggactgtgggtagataggggaacaatgagagtcaactcaggctaacttgggtgtgaaaaaaataaaagtcctaaatctaaaaaaaaaaaaaaaaaaaaaaaaaaaaaaaaaaaaaaaaaaaaaaaaaaaaaaaaaaaa

SEQ ID NO: 2358 - protein, 561 aa, Homo sapiens; identical to SEQ ID NO: 2356

SEQ ID NO: 2359 - DNA, 3591 bp, Homo sapiens
cctggctgggacggaagttgcaccacaagtacaattagtttcagttttgtttcttttccaggcacccagcaacggcggcctccaggcctcaggccccctcaccatcctagaggtcaagatcagctctggctagttctcacaggtctgacccaacaagtagcactgacatttttacgtttgctggatgtacacacggaagtggaggaggaggaggagaaggaggagggcagctccttagctcaagagcaagtggcccaaggcctcagaagactagaaggaagttcctggccattcagcatggtttcccacgggtcctcgccctccctcctggaggccctgagcagcgacttcctggcctgtaaaatctgcctggagcagctgcgggcacccaagacactgccctgcctgcatacctactgccaagactgcctggcacagctggcggatggcggccgcgtccgctgccccgagtgccgcgagacagtgcctgtgccgcccgagggtgtggcctccttcaagaccaacttcttcgtcaatgggctgctggacctggtgaaggcccgggcctgtggagacctgcgtgccgggaagccagcctgtgccctgtgtcccctggtgggtggcaccagcaccggggggccggccacggcccggtgcctggactgtgccgatgacttgtgccaggcctgtgccgacgggcaccgctgcacccgccagacccacacccaccgcgtggtggacctggtgggctacagggccgggtggtatgatgaggaggcccgggagcgccaagcggcccagtgtccccagcaccccggggaggcactgcgcttcctgtgccagccctgctcacagttgctgtgcagagagtgccgcctagacccccacctggaccacccctgcctgcctctggctgaagctgtgcgtgcccggaggccgggcctggagggactgctggccggtgtggacaataacctggtggagctggaggcagcgcggagggtggagaaggaggcgctagcccggctgcgggagcaggcggcccgggtggggactcaggtggaggaggcggctgagggcgtcctccgggccctgctggcccagaagcaggaggtgctggggcagctacgagcccacgtggaggctgccgaagaagctgctcgggagaggctggcggagcttgagggccgggagcaggtggccagggccgcagccgccttcgcccgccgggtactcagcctggggcgagaggccgagatcctctccctggaaggggcgatcgcacagcggctcaggcagctgcagggctgcccctgggcaccaggcccggccccctgcctgctcccacagctggagctccatcctgggctcctggacaagaactgccaccttcttcggctgtcctttgaggagcagcagccccagaaggatggtgggaaagacggagctggtacccagggaggtgaggagagccagagccggagggaggatgagccgaagactgagagacagggtggagtccagccccaggctggagatggagcccagaccccaaaagaggaaaaagcccagacaacccgagaagagggagcccagaccttggaggaggacagggcccagacaccccacgaggatggaggaccccagccccacaggggtggcagacccaacaagaagaaaaagttcaaaggcaggctcaagtcaatttcccgggagcccagcccagccctggggccgaatctggacggctctggcctcctccccagacccatcttttactgcagtttccccacgcggatgcctggagacaagcggtccccccggatcaccgggctctgtcccttcggtccccgggagatcctggtggcggatgagcagaaccgggcactgaaacgcttctccctcaacggcgactacaagggcaccgtgccggtccctgagggctgctccccttgcagcgtggccgccctgcagagcgcggtggccttctccgctagcgcacggctctatctcatcaaccccaacggcgaagtgcagtggcgcagggccctgagcctctcccaggccagccacgcggtggcggcactgcctagcggggaccgcgtggctgtcagcgtggcgggccacgtggaggtgtacaatatggaaggcagcctggccacccggttcattcctggaggcaaggccagccggggcctgcgggcgctggtgtttctgaccaccagcccccaggggcatttcgtggggtcggactggcagcagaatagtgtggtaatctgtgatgggctgggccaggtggttggggagtacaaggggccaggcctgcatggctgccagccgggctccgtgtctgtggataagaagggctacatctttctgacccttcgagaagtcaacaaggtggtgatcctggacccgaaggggtccctccttggagacttcctgacagcctaccacggcctggaaaagccccgggttaccaccatggtggatggcaggtacctggtcgtgtccctcagtaacgggaccatccacatctttcgggtccgttctccggacagttaaaggggctaggactagggtgagagggagtggggagggagagggcaggaaggaggcagagctgtccgtgggaggtggaggccgaggacattttcctgaagggcaggggttggcaacttttcaacatggagtgccaaactgctaacccgtcttctagtgtgtgagaatagggaccaaggtggtggcgtgaccttaactctcagaagcagaggaggcaggtgggtggagggggatgctgggagttcacctgcctcttgctttttgtgggtggctgctgccaccaccgccgctgctatatagtttaggtttctgaggtttgtgagcctgtcctgctttgcattcttcaaaaccattcctgatagagtagccgagggagagtcttggggccaagaagggcccagggtgggtcaggcgtgtgcactgtggaacagagctgagaccccggccccccttggactggcacagggtcctacagagtcagaggaggcctgagatttcgaatgggcagtgaatggcctcttctgccagccacaggcaggatgctccttgatcacggcatcccccggcggtagtacagggtgagcttgcaggagggtctgcaagtgcagacagcagctggggccaaagaggtgttaggttcaaaggctgcgaagagaataggctactggaaaaccaaacccaacagaattcacgtccaaaaatccacattctccatcgcttctcagccttttggctaagattaagtattaaaaaaaaaccaggctctgccaggcgcagtggctcatgcctataatcccggcactttgggagtctgtggcaggaggattgcttgaggccaggagtttgagaccagcctgggcaacatagcgagaccccatctctacaaaagattaaaaattagctgcgtgtagtagcatatgcctttcaacgtagctactcaggaggctgaggtgggaggatcccttgagccgaggagtttgagtctgcagtgagctatgatcgcaccactgcattccagaccccatctcg

SEQ ID NO: 2360 - protein, 755 aa, Homo sapiens
MVSHGSSPSLLEALSSDFLACKICLEQLRAPKTLPCLHTYCQDCLAQLADGGRVRCPECRETVPVPPEGVASFKTNFFVNGLLDLVKARACGDLRAGKPACALCPLVGGTSTGGPATARCLDCADDLCQACADGHRCTRQTHTHRVVDLVGYRAGWYDEEARERQAAQCPQHPGEALRFLCQPCSQLLCRECRLDPHLDHPCLPLAEAVRARRPGLEGLLAGVDNNLVELEAARRVEKEALARLREQAARVGTQVEEAAEGVLRALLAQKQEVLGQLRAHVEAAEEAARERLAELEGREQVARAAAAFARRVLSLGREAEILSLEGAIAQRLRQLQGCPWAPGPAPCLLPQLELHPGLLDKNCHLLRLSFEEQQPQKDGGKDGAGTQGGEESQSRREDEPKTERQGGVQPQAGDGAQTPKEEKAQTTREEGAQTLEEDRAQTPHEDGGPQPHRGGRPNKKKKFKGRLKSISREPSPALGPNLDGSGLLPRPIFYCSFPTRMPGDKRSPRITGLCPFGPREILVADEQNRALKRFSLNGDYKGTVPVPEGCSPCSVAALQSAVAFSASARLYLINPNGEVQWRRALSLSQASHAVAALPSGDRVAVSVAGHVEVYNMEGSLATRFIPGGKASRGLRALVFLTTSPQGHFVGSDWQQNSVVICDGLGQVVGEYKGPGLHGCQPGSVSVDKKGYIFLTLREVNKVVILDPKGSLLGDFLTAYHGLEKPRVTTMVDGRYLVVSLSNGTIHIFRVRSPDS

SEQ ID NO: 2361 - DNA, 2876 bp, Homo sapiens
gaattcctgcagctcagcagccgccgccagagcaggacgaaccgccaatcgcaaggcacctctgagaacttcaggatgcagatgtctccagccctcacctgcctagtcctgggcctggcccttgtctttggtgaagggtctgctgtgcaccatcccccatcctacgtggcccacctggcctcagacttcggggtgagggtgtttcagcaggtggcgcaggcctccaaggaccgcaacgtggttttctcaccctatggggtggcctcggtgttggccatgctccagctgacaacaggaggagaaacccagcagcagattcaagcagctatgggattcaagattgatgacaagggcatggcccccgccctccggcatctgtacaaggagctcatggggccatggaacaaggatgagatcagcaccacagacgcgatcttcgtccagcgggatctgaagctggtccagggcttcatgccccacttcttcaggctgttccggagcacggtcaagcaagtggacttttcagaggtggagagagccagattcatcatcaatgactgggtgaagacacacacaaaaggtatgatcagcaacttgcttgggaaaggagccgtggaccagctgacacggctggtgctggtgaatgccctctacttcaacggccagtggaagactcccttccccgactccagcacccaccgccgcctcttccacaaatcagacggcagcactgtctctgtgcccatgatggctcagaccaacaagttcaactatactgagttcaccacgcccgatggccattactacgacatcctggaactgccctaccacggggacaccctcagcatgttcattgctgccccttatgaaaaagaggtgcctctctctgccctcaccaacattctgagtgcccagctcatcagccactggaaaggcaacatgaccaggctgccccgcctcctggttctgcccaagttctccctggagactgaagtcgacctcaggaagcccctagagaacctgggaatgaccgacatgttcagacagtttcaggctgacttcacgagtctttcagaccaagagcctctccacgtcgcgcaggcgctgcagaaagtgaagatcgaggtgaacgagagtggcacggtggcctcctcatccacagctgtcatagtctcagcccgcatggcccccgaggagatcatcatggacagacccttcctctttgtggtccggcacaaccccacaggaacagtccttttcatgggccaagtgatggaaccctgaccctggggaaagacgccttcatctgggacaaaactggagatgcatcgggaaagaagaaactccgaagaaaagaattttagtgttaatgactctttctgaaggaagagaagacatttgccttttgttaaaagatggtaaaccagatctgtctccaagaccttggcctctccttggaggacctttaggtcaaactccctagtctccacctgagaccctgggagagaagtttgaagcacaactcccttaaggtctccaaaccagacggtgacgcctgcgggaccatctggggcacctgcttccacccgtctctctgcccactcgggtctgcagacctggttcccactgaggccctttgcaggatggaactacggggcttacaggagcttttgtgtgcctggtagaaactatttctgttccagtcacattgccatcactcttgtactgcctgccaccgcggaggaggctggtgacaggccaaaggccagtggaagaaacaccctttcatctcagagtccactgtggcactggccacccctccccagtacaggggtgctgcaggtggcagagtgaatgtcccccatcatgtggcccaactctcctggcctggccatctccctccccagaaacagtgtgcatgggttattttggagtgtaggtgacttgtttactcattgaagcagatttctgcttccttttatttttataggaatagaggaagaaatgtcagatgcgtgcccagctcttcaccccccaatctcttggtggggaggggtgtacctaaatatttatcatatccttgcccttgagtgcttgttagagagaaagagaactactaaggaaaataatattatttaaactcgctcctagtgtttctttgtggtctgtgtcaccgtatctcaggaagtccagccacttgactggcacacacccctccggacatccagcgtgacggagcccacactgccaccttgtggccgcctgagaccctcgcgccccccgcgccccccgcgcccctctttttccccttgatggaaattgaccatacaatttcatcctccttcaggggatcaaaaggacggagtggggggacagagactcagatgaggacagagtggtttccaatgtgttcaatagatttaggagcagaaatgcaaggggctgcatgacctaccaggacagaactttccccaattacagggtgactcacagccgcattggtgactcacttcaatgtgtcatttccggctgctgtgtgtgagcagtggacacgtgaggggggggtgggtgagagagacaggcagctcggattcaactaccttagataatatttctgaaaacctaccagccagagggtagggcacaaagatggatgtaatgcactttgggaggccaaggcgggaggattgcttgagcccaggagttcaagaccagcctgggcaacataccaagacccccgtctctttaaaaatatatatattttaaatatacttaaatatatatttctaatatctttaaatatatatatatattttaaagaccaatttatgggagaattgcacacagatgtgaaatgaatgtaatctaatagaagc

SEQ ID NO: 2362 - protein, 402 aa, Homo sapiens [sequence omitted]

SEQ ID NO: 2363 - DNA, 958 bp, Homo sapiens
gtgggacgcgccgagccggaggctgcaggatgatgcggttcatgctattattcagccggcagggaaaactgcggctgcaaaaatggtacctggccacttcggacaaggaacggaagaagatggtgcgcgagctcatgcaggttgtcctggctcgaaagcccaagatgtgcagcttcctggagtggagggacctcaaagttgtctataagagatatgccagcctctacttctgctgcgccatcgagggccaagacaatgagctcatcacactggagctgatccaccgatacgtggagctcttagacaaatactttggcagtgtgtgcgagctggacatcatcttcaactttgagaaggcctacttcatcctggatgagtttttgatggggggggatgtccaggacacctccactttccccttttcccactgaaggttttagaagctaggaggcaggaaaatgtgacccagatgggggtgctatttggcttttattccctgcctttgcagaactgatgtcaccccagatgtccttccctccctaataactgtaaatatataaatatgtcaggttaaagggaaaaggtgttcagggcacttcttgtcctctctgtcccataacctacctccaccctccccctagccagccaggcagcttctctgcctgggaggggagcctggacccccctctttctccttggctgcagtggggcctttatccagtgccagggaggaacaacatagttaatttttttctaaccttgccactttgagggaaggaagggttgggggaagggcaagctttatgggaccctggtcctggccctggcctttcactccagttctgggtgaggcaggagctgggaggggtggggagggggagggggaagtgtctgcctttatgtcctttcttctgaaataaaaggaaaagcatttctggaaaaaaaaaaaaaaaaaaaa

SEQ ID NO: 2364 - protein, 133 aa, Homo sapiens
MMRFMLLFSRQGKLRLQKWYLATSDKERKKMVRELMQVVLARKPKMCSFLEWRDLKVVYKRYASLYFCCAIEGQDNELITLELIHRYVELLDKYFGSVCELDIIFNFEKAYFILDEFLMGGDVQDTSTFPFSH

SEQ ID NO: 2365 - DNA, 614 bp, Mus musculus
gtgggacgcgccgagccggaggctgcaggatgatgcggttcatgctattattcagccggcagggaaaactgcggctgcaaaaatggtacctggccacttcggacaaggaacggaagaagatggtgcgcgagctcatgcaggttgtcctggctcgaaagcccaagatgtgcagcttcctggagtggagggacctcaaagttgtctataagagatatgccagcctctacttctgctgcgccatcgagggccaagacaatgagctcatcacactggagctgatccaccgatacgtggagctcttagacaaatactttggcagtgtgtgcgagctggacatcatcttcaactttgagaaggcctacttcatcctggatgagtttttgatggggggggatgtccaggacacctccaagaagagtgtgctgaaagccatcgagcaggctgacctactgcaagaggaggatgagtcgccacggagtgtgctggaggagatgggtttggcatagcccctgctgggccggggtgtggcgatggggtcctggcagcgtggcgggaacggctgcttctcctctgcccagggccctgttcttggtgggactcggctgcccctcctc

SEQ ID NO: 2366 - protein, 158 aa, Mus musculus
MMRFMLLFSRQGKLRLQKWYLATSDKERKKMVRELMQVVLARKPKMCSFLEWRDLKVVYKRYASLYFCCAIEGQDNELITLELIHRYVELLDKYFGSVCELDIIFNFEKAYFILDEFLMGGDVQDTSKKSVLKAIEQADLLQEEDESPRSVLEEMGLA

SEQ ID NO: 2367 - DNA, 2545 bp, Homo sapiens
ccagcgtgctgaagccggagcgagctagccgcccggagccgcgccgacccagctgagcccagcccacgggacgccagacctcgaccgtcgctcctaccccggccaccgctcggagccgaggcggacgcgtcccgatcttcccctgtccccaccctgccccgaccctcctctccacctctcgcgtcgtgacaccagcgtctccggcagcctcttggtcatgaaagccctcagattgtcggcttccgccctcttctgccttctgctgatcaacgggttaggggcagcaccccctggtcgccctgaggcgcagcctcctcctctcagctctgagcataaagagccggtagccggggacgcagtgcccgggccaaaggatggcagcgccccagaggtccgaggcgctcggaattccgagccgcaggacgagggagagcttttccagggcgtggatccccgggcgctggccgcggtgctgctgcaggcactcgaccgtcccgcctcacccccggcaccaagcggctcccagcaggggccggaggaagaagcagctgaagctctgctgaccgagaccgtgcgcagccagacccacagcctcccggcgccggagagcccggagcccgcggctccgcctcgccctcagactccggagaatgggcccgaggcgagcgatccctccgaggagctcgaggcgctagcgtccctgctccaggaactgcgagatttcagtccaagtagcgccaagcgccagcaggagacggcggcagcagagacggaaacccgcacgcacacgctgacccgagtgaatctggagagcccggggccagagcgcgtatggcgcgcttcctggggagagttccaggcgcgtgtcccggagcgcgcgcccctgccgcccccggccccctctcaattccaggcgcgtatgcccgacagcgggccccttcccgaaacccacaagttcggggaaggagtgtcctcccccaaaacacacctaggcgaggcattggcacccctgtccaaggcgtaccaaggcgtggccgccccgttccccaaggcgcgccggccggagagcgcactcctgggcggctccgaggcgggcgagcgccttctccagcaagggctggcgcaggtggaggccgggcggcggcaggcggaggccacgcggcaggccgcggcgcaggaagagcggctggccgacctcgcctcggacctgctgctccagtatttgctgcagggcggggcccggcagcgcggcctcgggggtcgggggctgcaggaggcggcggaggagcgagagagtgcaagggaggaggaggaggcggagcaggagagacgcggcggggaggagagggtgggggaagaggatgaggaggcggccgaggcggaggcagaggcggaggaggcggagagggcgcggcagaacgcgctcctgttcgcggaggaggaggacggggaagccggcgccgaggacaagcgctcccaggaggagacgccgggccaccggcggaaggaggccgaggggacagaggagggcggggaggaggaggacgacgaggagatggatccgcagacgatcgacagcctcattgagctgtccaccaaactccacctgccagcggacgacgtggtcagcatcatcgaggaggtggaggagaagcggaagcggaagaagaacgcccctcccgagcccgtgccgcccccccgtgccgcccccgcccccacccacgtccgctccccgcagcccccgccccccgcccccgctcccgcacgagacgagctgccggactggaacgaggtgctcccgccctgggatcgggaggaggacgaggtgtacccgccagggccgtaccaccctttccccaactacatccggccgcggacactgcagccgccctcggccttgcgccgccgccactaccaccacgccttgccgccttcgcgccactatcccggccgggaggcccaggcgcggcgcgcgcaggaggaggcggaggcggaggagcgccggctgcaggagcaggaggagctggagaattacatcgagcacgtgctgctccggcgcccgtgactgcccttcccggtcccgcccccgcgcgcccccgccgcgcgcgcgcgccggcgcccccctccgtgttgcccgctccccctcggtgtttgcatgcgccccggccctgccccttggccctgcccctgtccccgggctgcgtcgggacctgccagacccccctcccgggtcctgagcccgaactcccagagctcacccgcgggtgaccgggggccagcccaggagggcgggtggtttgtgcgagttcccttgccacgcggggccccggccccatcaagtccctctggggacgtccccgtcggaaaccggaaaaagcagttccagttaattgtgtgaagtgtgtctgtctccagcccttcgggcctcccacgagcccctccagcctctccaagtcgctgtgaattgaccccttctttcctttctctgttgtaaatacccctcacggaggaaatagttttgctaagaaataaaagtgactatttt

SEQ ID NO: 2368 - protein, 615 aa, Homo sapiens
MKALRLSASALFCLLLINGLGAAPPGRPEAQPPPLSSEHKEPVAGDAVPGPKDGSAPEVRGARNSEPQDEGELFQGVDPRALAAVLLQALDRPASPPAPSGSQQGPEEEAAEALLTETVRSQTHSLPAPESPEPAAPPRPQTPENGPEASDPSEELEALASLLQELRDFSPSSAKRQQETAAAETETRTHTLTRVNLESPGPERVWRASWGEFQARVPERAPLPPPAPSQFQARMPDSGPLPETHKFGEGVSSPKTHLGEALAPLSKAYQGVAAPFPKARRPESALLGGSEAGERLLQQGLAQVEAGRRQAEATRQAAAQEERLADLASDLLLQYLLQGGARQRGLGGRGLQEAAEERESAREEEEAEQERRGGEERVGEEDEEAAEAEAEAEEAERARQNALLFAEEEDGEAGAEDKRSQEETPGHRRKEAEGTEEGGEEEDDEEMDPQTIDSLIELSTKLHLPADDVVSIIEEVEEKRKRKKNAPPEPVPPPRAAPAPTHVRSPQPPPPAPAPARDELPDWNEVLPPWDREEDEVYPPGPYHPFPNYIRPRTLQPPSALRRRHYHHALPPSRHYPGREAQARRAQEEAEAEERRLQEQEELENYIEHVLLRRP

SEQ ID NO: 2369 - DNA, 2852 bp, Homo sapiens
ggcacgagggcttccacatgtgtcaagcggctggctcagcccagagtccctgtctcccgcccgccggcccgagccgccgcccctcccccgcctcccgtgcgcccgggacaatcctcgccttgtctgtggcgccggcatctggagctttctgtagcctccggatacgcctttttttcagggcgtagccccagccaagctgctccccgcggcggccgcacagcagcccgagcgccccctttccggagctcccctccggagctgggatccaggcgcgtagcggagatcccaggatcctgggtgctgtctgggcccgctccccaccatgacctcctcggggcctggaccccggttcctgctgctgctgccgctgctgctgccccctgcggcctcagcctccgaccggccccggggccgagacccggtcaacccagagaagctgctggtgatcactgtggccacagctgaaaccgaggggtacctgcgtttcctgcgctctgcggagttcttcaactacactgtgcggaccctgggcctgggagaggagtggcgagggggtgatgtggctcgaacagttggtggaggacagaaggtccggtggttaaagaaggaaatggagaaatacgctgaccgggaggatatgatcatcatgtttgtggatagctacgacgtgattctggccggcagccccacagagctgctgaagaagttcgtccagagtggcagccgcctgctcttctctgcagagagcttctgctggcccgagtgggggctggcggagcagtaccctgaggtgggcacggggaagcgcttcctcaattctggtggattcatcggttttgccaccaccatccaccaaatcgtgcgccagtggaagtacaaggatgatgacgacgaccagctgttctacacacggctctacctggacccaggactgagggagaaactcagccttaatctggatcataagtctcggatctttcagaacctcaacggggctttagatgaagtggttttaaagtttgatcggaaccgtgtgcgtatccggaacgtggcctacgacacgctccccattgtggtccatggaaacggtcccactaagctgcagctcaactacctgggaaactacgtccccaatggctggactcctgagggaggctgtggcttctgcaaccaggaccggaggacactcccgggggggcagcctcccccccgggtgtttctggccgtgtttgtggaacagcctactccgtttctgccccgcttcctgcagcggctgctactcctggactatccccccgacagggtcacccttttcctgcacaacaacgaggtcttccatgaaccccacatcgctgactcctggccgcagctccaggaccacttctcagctgtgaagctcgtggggccggaggaggctctgagcccaggcgaggccagggacatggccatggacctgtgtcggcaggaccccgagtgtgagttctacttcagcctggacgccgacgctgtcctcaccaacctgcagaccctgcgtatcctcattgaggagaacaggaaggtgatcgcccccatgctgtcccgccacggcaagctgtggtccaacttctggggcgccctgagccccgatgagtactacgcccgctccgaggactacgtggagctggtgcagcggaagcgagtgggtgtgtggaatgtaccatacatctcccaggcctatgtgatccggggtgataccctgcggatggagctgccccagagggatgtgttctcgggcagtgacacagacccggacatggccttctgtaagagctttcgagacaagggcatcttcctccatctgagcaatcagcatgaatttggccggctcctggccacttccagatacgacacggagcacctgcaccccgacctctggcagatcttcgacaaccccgtcgactggaaggagcagtacatccacgagaactacagccgggccctggaaggggaaggaatcgtggagcagccatgcccggacgtgtactggttcccactgctgtcagaacaaatgtgtgatgagctggtggcagagatggagcactacggccagtggtcaggcggccggcatgaggattcaaggctggctggaggctacgagaatgtgcccaccgtggacatccacatgaagcaggtggggtacgaggaccagtggctgcagctgctgcggacgtatgtgggccccatgaccgagagcctgtttcccggttaccacaccaaggcgcgggcggtgatgaactttgtggttcgctaccggccagacgagcagccgtctctgcggccacaccacgactcatccaccttcaccctcaacgttgccctcaaccacaagggcctggactatgagggaggtggctgccgcttcctgcgctacgactgtgtgatctcctccccgaggaagggctgggcactcctgcaccccggccgcctcacccactaccacgaggggctgccaacgacctggggcacacgctacatcatggtgtcctttgtcgacccctgacactcaaccactctgccaaacctgccctgccattgtgcctttttagggggcctggcccccgtcctgggagttgggggatgggtctctctgtctccccacttcctgagttcatgttccgcgtgcctgaactgaatatgtcaccttgctcccaagacacggccctctcaggaagctcccggagtccccgcctctctcctccgcccacaggggttcgtgggcacagggcttctggggactccccgcgtgataaattattaatgttccgcagtctcactctgaataaaggacagtttgtaaaaaaaaaaaaaaaaaa

SEQ ID NO: 2370 - protein, 738 aa, Homo sapiens
MTSSGPGPRFLLLLPLLLPPAASASDRPRGRDPVNPEKLLVITVATAETEGYLRFLRSAEFFNYTVRTLGLGEEWRGGDVARTVGGGQKVRWLKKEMEKYADREDMIIMFVDSYDVILAGSPTELLKKFVQSGSRLLFSAESFCWPEWGLAEQYPEVGTGKRFLNSGGFIGFATTIHQIVRQWKYKDDDDDQLFYTRLYLDPGLREKLSLNLDHKSRIFQNLNGALDEVVLKFDRNRVRIRNVAYDTLPIVVHGNGPTKLQLNYLGNYVPNGWTPEGGCGFCNQDRRTLPGGQPPPRVFLAVFVEQPTPFLPRFLQRLLLLDYPPDRVTLFLHNNEVFHEPHIADSWPQLQDHFSAVKLVGPEEALSPGEARDMAMDLCRQDPECEFYFSLDADAVLTNLQTLRILIEENRKVIAPMLSRHGKLWSNFWGALSPDEYYARSEDYVELVQRKRVGVWNVPYISQAYVIRGDTLRMELPQRDVFSGSDTDPDMAFCKSFRDKGIFLHLSNQHEFGRLLATSRYDTEHLHPDLWQIFDNPVDWKEQYIHENYSRALEGEGIVEQPCPDVYWFPLLSEQMCDELVAEMEHYGQWSGGRHEDSRLAGGYENVPTVDIHMKQVGYEDQWLQLLRTYVGPMTESLFPGYHTKARAVMNFVVRYRPDEQPSLRPHHDSSTFTLNVALNHKGLDYEGGGCRFLRYDCVISSPRKGWALLHPGRLTHYHEGLPTTWGTRYIMVSFVDP

SEQ ID NO: 2371 - DNA, 725 bp, Homo sapiens
gcagtttattccgacagttgtgttgtgccaatggtggagaagaaaacttcggttcgctcccaggaccccgggcagcggcgggtgctggaccgggctgcccggcagcgtcgcatcaaccggcagctggaggccctggagaatgacaacttccaggatgacccccacgcgggactccctcagctcggcaagagactgcctcagtttgatgacgatgcggacactggaaagaaaaagaagaaaacccgaggtgatcattttaaacttcgcttccgaaaaaactttcaggccctgttggaggagcagaacttgagtgtggccgagggccctaactacctgacggcctgtgcgggacccccatcgcggccccagcgccccttctgtgctgtctgtggcttcccatccccctacacctgtgtcagctgcggtgcccggtactgcactgtgcgctgtctggggacccaccaggagaccaggtgtctgaagtggactgtgtgagcctgggcattcccagagaggaagggccgctgtgcactgcccggccttcagaaagacagaatttcatcacccaatgcagggggagctcttcctggaccaagggaggagccgctcattcacccaacaaaactgtgtcttatctgccaggaaagaccagcctcactcctgggaactgtctggcaggtaggctgggccccccagtgctgttagaataaaaagcctcgtgccgg

SEQ ID NO: 2372 - protein, 154 aa, Homo sapiens
MVEKKTSVRSQDPGQRRVLDRAARQRRINRQLEALENDNFQDDPHAGLPQLGKRLPQFDDDADTGKKKKKTRGDHFKLRFRKNFQALLEEQNLSVAEGPNYLTACAGPPSRPQRPFCAVCGFPSPYTCVSCGARYCTVRCLGTHQETRCLKWTV

SEQ ID NO: 2373 - DNA, 2175 bp, Homo sapiens
atatacttgcgcgccgacgccgccgctcgcttgtgaaactggaaggctgccatggctagcccagccgcctcctcggtgcgaccaccgaggcccaagaaagagccgcagacgctcgtcatccccaagaatgcggcggaggagcagaagctcaagctggagcggctcatgaagaacccggacaaagcagttccaattccagagaaaatgagtgaatgggcacctcgacctcccccagaatttgtccgagatgtcatgggttcaagtgctggggccggcagtggagagttccacgtgtacagacatctgcgccggagagaatatcagcgacaggactacatggatgccatggctgagaagcaaaaattggatgcagagtttcagaaaagactggaaaagaataaaattgctgcagaggagcagaccgcaaagcgccggaagaagcgccagaagttaaaagagaagaaattactggcaaagaagatgaaacttgaacagaagaaacaagaaggacccggtcagcccaaggagcaggggtccagcagctctgcggaggcatctggaacagaggaggaggaggaagtgcccagtttcaccatggggcgatgacaatgtttgccacagcctctgcctggaacctggctcgtgctgtgaccagaagggaaaggcggctgtttggctctttctcccccgcaaggacccgctgacccgctggatggagagcaaaggagacccctcccgagccgctcacagtcctgtatttggcaggtttgggagcctgaggggccatctccctgacactcagaggcactgccttgcagacaccatccgtgctcctggtaaagggggacagagagcctcaccttgccacatatttgaacagtgatgagtttggggctggtttctgggaagggaacgtttatttagtaaagagcagaacacccttgcgttttgttgggacatgtggaccgtgagtcgcaaacactctggagaaggctgagatgccaccattcccacggggactgaagacacattacgtggacctggtcccaggctcagtgaggagatggcctcagctgtggggctggtccatgttgcccactcactccagtgggaagtggggaccacgccatagagggtctgctcccactgcagctcccggtgctctcgtgttctgggaaggcctgggtgtgtgcacaaggaggcccgggccagggacttcaccaggggctgggtcacaagggcacagggtgtgtggaaagcgctgtgggggaagagccggtcaccggagagtgagcaggcggagactccaagctgggctgagccagagcagaaggcgagggattcccagccggacgggggttctctcaccaacagctgtgatttcatcccgaagtggaagggggtctaaacagaacaggctgagagaggcgggactgggtcaagtgggtggagctcctccttgcatgactgcaactgtcggggctttccgccggctcacagcagttggggccagcggggagaagagaggcggaactgctgtgtcctcacgtggcgcagcctcaaactggcatccaggcactgggcccgtgcagagaaggcacctgcagagagcagggcagcccggcgcaggggcatgcgcctagaatcccagctactcggaaggccaaggcaggaggaccgcttgagtccagggattcaaggccaacctgggcaatagagcgagaccctgtctcttaaaaaacgatgatgatgaacacagaggacggggcactgtgctgggagccagggggcctgggaggagccgagaccagccttttacctcggggttttgaggccaacagggacgacagagacagtttctagttagagccttggctccatttttggatgatttagccccgagttcctgagtctattttatgccccttacgtactttgatagaactaaggaaatagtggttttgagtgaagggaaaggaaacccagaaacattttacgttgcttttacttctgtagtgtagattgccccggcccctctctgagccctgtagcatctgtgatagcttctgtcccttcatcggttcatgtcacagggattttctttcccaggaagcggacacggagagtcagccctaataaatgagcacatgccctggctgtacattttgaaacctg

SEQ ID NO: 2374 - protein, 184 aa, Homo sapiens
MASPAASSVRPPRPKKEPQTLVIPKNAAEEQKLKLERLMKNPDKAVPIPEKMSEWAPRPPPEFVRDVMGSSAGAGSGEFHVYRHLRRREYQRQDYMDAMAEKQKLDAEFQKRLEKNKIAAEEQTAKRRKKRQKLKEKKLLAKKMKLEQKKQEGPGQPKEQGSSSSAEASGTEEEEEVPSFTMGR

SEQ ID NO: 2375 - DNA, 2638 bp, Homo sapiens
cgctcggcgccccggccgggccactgggccacaggccacgcggccacgcagtccgagcgggagccgagccgggcggggcgagggcagctccggaacgtcccagggatggaagtgcttggatgcggtgctgctggctgcggatgtgcgcaaggagatgggatggagagcctgagttggcattcgtataaatgacctgcctggctcccaccatgagtgctgagcttaacgtgcctatcgacccctctgctcctgcctgccctgagcccggccataagggcatggattaccgggactgggtccgccgcagctacctggaactggtcacctctaaccaccactcggtacaggccctgtcgtggcggaagctctacctgagcagggccaagctgaaggcctccagcaggacctccgccctcctctccggctttgccatggtggccatggtggaggtgcagctggagacgcagtaccagtacccgcggccgctgctgattgccttcagcgcctgcaccacggtgctggtggccgtgcacctgttcgccctcctcatcagcacctgcatcctgcccaatgtggaggccgtgagcaacatccacaacctgaactccatcagcgagtccccgcatgagcgcatgcacccctacatcgagctggcctggggcttctccaccgtgcttggcatcctactcttcctggccgaggtggtgctgctctgctggatcaagttcctccccgtggatgcccggcgccagcctggccccccacctggccctgggagtcacacgggctggcaggccgccctggtgtccaccatcatcatggtgcccgtgggcctcatcttcgtggtcttcaccatccacttctaccgctccctggtgcgccacaaaacggagcgccacaaccgcgagatcgaggagctccacaagctcaaggtccagctggacgggcatgagcgcagcctgcaggtcttgtgaggggccgagggccggggctgggagcggccctgtgcccgggagtccgcagaggcggggatttgtcagatgcagacattttgcaaggctgccgggtagttcaagaccaaagttttcctcttgtcttaataccataaggactggatgacttctcctgagatagaaccgtttggttcaatgagggactgtgttgctaagagcgttgggggcaaagccaggctggttccttggcctcggggtttcctgggtcggggacacggtgaagaggctccagcgggacctgcccatcagtcctgggccaggaggggctccaagcagcacccagcggtccgggggagtctcagacccggcatgcgtggctggcagacctgggagagccagggcagggttttgcgttcagagaaggattgccccagagacccgtggtggacttcatgggtgctgagtggcccgtgtgacagtgatgacacgaaggcttcggcgtttgagtgggtgcaggtgcacgccagggcttggtgcttccctgcctggccctggagggagctgggtggcctggcttcaggggaagacaggagccaggacacacgtcagcccagcaggtgtggggggtgctgcagccctcggcagtggggtcaggccctgggggatgtttccaatggtgggcagcctggccaggccggagaagacatgttcacgggcatctatcagatgcccccttgaggaggctgagttatttgagggctgctgcaaagtacgctaggctcaaattctcttttcccagccagagccctggccacacggactcagaggggccaccggggtggggaaaggacccctcccccaccccccgcagccactggcctccagctctcggccacagaatggcctctaaggctgactcagccactcccttgggctgtggcagcaggaggcgggggctctggctcaggccccggagcctgtgcagcttgcccatggccctaggcagcgaggggacagcctgggggacttcctgcctaggcaaggtcattggccgggcctggcctgtggatagtggggccaggggccggcccaggccaaatgagtgccctccttgttatgacaccaagtgactacaagggaggcaagacccctccaggcctctcagccgacactgggtcccaccacacacagtgactgtgccgtgcagtgcaggttctggccttttccttgaaggcatctggtagacccgaagccacgctctcgggccgcacatgcacgccgcagcaccagctgccctgagctgcttgtacaaccaaacacctttcccctcttctccagctgtaacctggagagtcagccatgccttgtcttttgttctcataaatagtcactggggccgggcgcagtgactcacgcctgtaatcccagcactttgggaggcctaggtgggcggatcacttgaggtcaggagttcgagaccagcctggccaacatggtgaaaccctgtctctactaaaaaaatacagaaaattagctgggcgtggtggcgggcgcctgtagccccagctacttgggaggctgaggcgggagaatggcaatggcgtgaacccgggaggcagagcttgcagtgagctgagatggcgccactgcactccagcctgggcgacagagccagactccatctc

SEQ ID NO: 2376 - DNA, 397 bp, Homo sapiens
cggcggtggcggacacttggggtctggacgcaacggcggcgggagcatgaacgcccctccagccttcgagtcgttcttgctcttcgagggcgagaagatcaccattaacaaggacaccaaggtacccaatgcctgtttattcaccatcaacaaagaagaccacacactgggaaacatcattaaatcacgtgcctgcttccccttcgccttctgccgtgattgtcagtttcctgaggcctccccagccacgcttcctgtacagcctgcagaactctgccccagagcacatcagctatgtgccccagctctcaaacgacaccttggcggggaggctcaccctgtccaccttcacgctggagcagcctctaggccagttcagcagccacaacatctctga

SEQ ID NO: 2377 - protein, 116 aa, Homo sapiens
MNAPPAFESFLLFEGEKITINKDTKVPNACLFTINKEDHTLGNIIKSRACFPFAFCRDCQFPEASPATLPVQPAELCPRAHQLCAPALKRHLGGEAHPVHLHAGAASRPVQQPQHL

SEQ ID NO: 2378 - DNA, 1478 bp, Homo sapiens
ccattgtgctctaaagggaaggtgctgtgtaatcattaaggagcggaggcttttggagctgctaaaatgccggattacctcggtgccgatcagcggaagaccaaagaggatgagaaggacgacaagcccatccgagctctggatgagggggatattgccttgttgaaaacttatggtcagagcacttactctaggcagatcaagcaagttgaagatgacattcagcaacttctcaagaaaattaatgagctcactggtattaaagaatctgacactggcctggccccaccagcactctgggatttggctgcagataagcagacactccagagtgaacagcctttacaggttgccaggtgtacaaagataatcaatgctgattcggaggacccaaaatacattatcaacgtaaagcagtttgccaagtttgtggtggaccttagtgatcaggtggcacctactgacattgaagaagggatgagagtgggcgtggatagaaataaatatcaaattcacattccattgcctcctaagattgacccaacagttaccatgatgcaggtggaagagaaacctgatgtcacatacagtgatgttggtggctgtaaggaacagattgagaaactgcgagaagtagttgaaaccccattacttcatccagagaggtttgtgaaccttggcattgagcctcccaagggcgtgctgctctttggtccacccggtacaggcaagacactctgtgcgcgggcagttgctaatcggactgatgcgtgcttcattcgagttattggatctgagcttgtacagaaatacgtcggtgagggggctcgaatggttcgtgaactctttgaaatggccagaacaaaaaaagcctgccttatcttctttgatgaaattgatgctattggaggggctcgttttgatgatggtgctggaggtgacaatgaagtgcagagaacaatgttggaactgatcaatcagcttgatggttttgatcctcgaggcaatattaaagtgctgatggccactaacagacctgatactttggatccagcactgatgaggccagggagattggatagaaaaattgaatttagcttgcccgatctagagggtcggacccacatatttaagattcacgctcgttcaatgagtgttgaaagagatatcagatttgaactgttagcacgactgtgtccaaatagcactggtgctgagattagaagcgtctgcacagaggctggtatgtttgccatcagagcacggcgaaaaattgctaccgagaaggatttcttggaagctgtaaataaggtcattaagtcttatgccaaattcagtgctactcctcgttacatgacatacaactgaaccctgaaggctttcaagtgaaaactttaaattggaatcctaaccttatatagacttgttaataaccaattcataaacaaataaatggcttcaactttagagcacaatgg

SEQ ID NO: 2379 - protein, 433 aa, Homo sapiens
MPDYLGADQRKTKEDEKDDKPIRALDEGDIALLKTYGQSTYSRQIKQVEDDIQQLLKKINELTGIKESDTGLAPPALWDLAADKQTLQSEQPLQVARCTKIINADSEDPKYIINVKQFAKFVVDLSDQVAPTDIEEGMRVGVDRNKYQIHIPLPPKIDPTVTMMQVEEKPDVTYSDVGGCKEQIEKLREVVETPLLHPERFVNLGIEPPKGVLLFGPPGTGKTLCARAVANRTDACFIRVIGSELVQKYVGEGARMVRELFEMARTKKACLIFFDEIDAIGGARFDDGAGGDNEVQRTMLELINQLDGFDPRGNIKVLMATNRPDTLDPALMRPGRLDRKIEFSLPDLEGRTHIFKIHARSMSVERDIRFELLARLCPNSTGAEIRSVCTEAGMFAIRARRKIATEKDFLEAVNKVIKSYAKFSATPRYMTYN

SEQ ID NO: 2380 - DNA, 976 bp, Homo sapiens
ctttccctctgccaacatggcggcctcagcaaaaaagaagaataagaaggggaagactatctccctaacagactttctggctgaggatgggggtactggtggaggaagcacctatgtttccaaaccagtcagctgggctgatgaaacggatgacctggaaggagatgtttctacaacttggcacagtaacgatgacgatgtgtacagggcgcctccaattgaccgttccatccttcccactgctccacgggctgctcgggaacccaatatcgaccggagccgtcttcccaaatcgccaccctacactgcttttctaggaaacctaccctatgatgttacagaagagtcaattaaggaattctttcgaggattaaatatcagtgcagtgcgtttaccacgtgaacccagcaatccagagaggctgaaaggttttggttatgctgaatttgaggacctggattccctgctcagtgccctgagtctcaatgaagagtctctaagtaacaggagaattcgagtggacgttgctgatcaagcactggataaagagtatcgagatcgttatgattcagaccggtatcgggatgggtatcgggatggcccacgccgggatatggatcgatatggtggccgggatcgctatgatgaccgaggcagcagagactatgatagaggctatgattcccggataggcagtggcagaagagcatttggcagtgggtatcgcagggatgatgactacagagaaggcagggactgctatgaagaccaatatgacagacgggatgatcggtcgtggagctccagagatgattactctcgggatgattataggcgtgatgatagaggtccccccccccccaaagacccaaactgaatctaaagcctcggagtactcctaaggaagatgattcctctgctagtaactcccagtccactcgagctgcttctatctttggaggggcaaagcctgttg

SEQ ID NO: 2381 - DNA, 2824 bp, Homo sapiens
cctaacagactttctggctgaggatgggggtactggtggaggaagcacctatgtttccaaaccagtcagctgggctgatgaaacggatgacctggaaggagatgtttctacaacttggcacagtaacgatgacgatgtgtacagggcgcctccaattgaccgttccatccttcccactgctccacgggctgctcgggagagacacccaagctggcaaagtgaagaaactcaggaacgggaacggtcgaggacaggaagtgagtcatcacagactgggacctccaccacatctggcagaaatgcatgaaggagagagagtgagaagtctctagaaaatgaaacactcaataaggaggaagattgccactctccaacttctaaacctcccaaacctgatcagcccctaaaggtaatgccagcccctccaccaaaggagaatgcttgggtgaagcgaagttctaaccctcctgctcgatctcagagctcagacacagagcagcaatcccctacaagtggtgggggaaaagtagctccagctcaaccatctgaggaaggaccaggaaggaaagatgaaaataaagtagatgggatgaatgtcccaaaaggccaaactgggaactctagccgtggtccaggagactgagggaacagagaccactggaaggagtcagataggaaagatggcaaaaaggatcaagactccagatctgcacctgagccaaagaaacctgaggaaaatccagcttccaagttcagttctgcaagcaagtatgctgctctctctgttgatggtgaagatgaaaatgagggagaagattatgccaaatagacctctacatcctgtgcttttctcctagtttctctccaccctggaacattcgagagcaaatcaaaacctctatccagacaagacaaaataaaactcaccatctcctgaagacctttcttaccttttttttaaaacaaaaaatgaaattattttgcatgctgctgcagcctttaaagtattgaagtaactggagaattgccaatacagccagagagaaagggactacagctttttagagaagttgtggtgcgttatgtcaccatgcagttgccagtgtgattagtgcctaggggtctccatttagcagaaatggtaatgacagtgatataacgcctggaacctggttgggcagtaggggagggaggtagaaggaaaagtgtgagatttctaccttttagtttttttcctattgtggcatatatgaattctcaaacattatctgaataaattttccattcttggaaaggtagatttagcctcaagttgttttagtctccaggaggctgccagcccctcctcttatttaattctgagttttgggggacagcctagagggaattcctttttttttttttttttacccccaagggggttagttgggagtgagactataggccataaagaatgggactcattggaccaaaataaatgggaaaatcgtggtttgaaaggaagcttttgggaattgatgagtcattttgcaccaggtaataggggaaaattgtgtgacctccagcaaacacatgaatggttatttcctggagccggaagcacttgggggtcgtggtaattcccaatgttttctgtgtcctagttttaccctttctaaacactgtcctttttgaaagtttgaatatatccacattctattgaaaccttgaaactaaaaatttagactcttatcgtcatcttaagttcttcatgctactcttaacctcccaaaaagcagtatctaagtcacatacatgatgtcttgggcattttctctctcagccatggagaactctgaaaggaagaatcgctgcttttctcaagcaaatcggtttcttgatatcttctggttctcactccttgcctgctcctgatgctttgaccccttttattgatcagagtgctctagaataatggatggtcttggatggtggataaatagggacagggacagttaaattgggagcctttcttacaaccttgatgggtttttttccccccaagtttccttctccactgaaatgccacactaatgtttgttggattcatgaggtggccagaccaatgtgttttgttttgtttttttttttttaagcttcccttgagagaataaacggaaatggagagaactatttaacaaggtcctggtttctcttgcaacacagtagctaaacttgcctgcctttatatgcatttttgtagggatcagcttggtagacagtattagcagagaaacaccttgatcttggtttgcaaacccttctgccatcagtcctagattaggccctgttcagccatgcaggggtgttggtttatgcgtgctgcagcagtgggcataatgaatataatttacccagtggacaaaggtgtgtaccaagtgaatttaaataattggtgtggattggccagtagctaagaagtgggcttttaaagagtattgaagattgaaaggtgttttttttcttttttaaaaaagaaaaaaaaactattgattgtagataatgaaaagctagggtttgccctcttcatgtctactctccttccaaatagttatatccaaaactgtttttccctgtcccctaccttgtcccccccattaaaatagaaacagggattgattaatgtcccgctcctgaatacatgtaaaatttgtacaaaaatatcttctatgaaaatgatttgtaatctgtagacttattacctgggagatgtcttgatgtaaaatcccatcctttgggttgtgggttttttgttttctccaaataaatctgatctttaaagttc

SEQ ID NO: 2382 - protein, 565 aa, Homo sapiens
MAASAKKKNKKGKTISLTDFLAEDGGTGGGSTYVSKPVSWADETDDLEGDVSTTWHSNDDDVYRAPPIDRSILPTAPRAAREPNIDRSRLPKSPPYTAFLGNLPYDVTEESIKEFFRGLNISAVRLPREPSNPERLKGFGYAEFEDLDSLLSALSLNEESLGNRRIRVDVADQAQDKDRDDRSFGRDRNRDSDKTDTDWRARPATDSFDDYPPRRGDDSFGDSYDSRIGSGRRAFGSGYRRDDDYRGGGDRYEDRYDRRDDRSWSSRDDYSRDDYRRDDRGPPQRPKLNLKPRSTPKEDDSSASTSQSTRAASIFGGAKPVDTAAREREVEERLQKEQEKLQRQLDEPKLERRPRERHPSWRSEETQERERSRTGSESSQTGTSTTSSRNARRRESEKSLENETLNKEEDCHSPTSKPPKPDQPLKVMPAPPPKENAWVKRSSNPPARSQSSDTEQQSPTSGGGKVAPAQPSEEGPGRKDENKVDGMNAPKGQTGNSSRGPGDGGNRDHWKESDRKDGKKDQDSRSAPEPKKPEENPASKFSSASKYAALSVDGEDENEGEDYAE

SEQ ID NO: 2383 - DNA, 1404 bp, Homo sapiens
gtagcgggagcggagagcggaccccggagagcggaccccagagaaccctgagcagccccgccgctgccggcctagttaccgtcataccacgggaggagccgcagctgccgcagccggccccagtctccatcaccgcaaccaatgagcagcaaggccgagacccagcagccacccgccgcccccgcctttccccccaccgcccccctcccgtccccccgccgcccccgccctcagcgccgccgacaccaagcccggcactacgggcagctgcgcagggagcggtggtccgggcggcctcacatcggcggcgcctgccagcgtggacaagaaggtcatcgcagtgaaggttttgggaacagtaaaatggttcaatgtaaggaacggatatggtttcatcaacaggaatgacaccaaggaagatgtatttgtacaccagactgccataaagaataaccccaggaagtaccttcgcagtgtaggagatgaagagactgtggagtttgatgttgttgaaggagaagagggtgcggaggcagcaaatgttacagatcctggtggtgttcgagttcaaggcggtaaatatgcagcagatcgtaaccattatagacgctatccacgtcataggggtcctccacgcaattaccagcaaaattaccagaacagtgagagtggggaaaagaccgagggatcggagaatgctcccgaaggccaggcccaacaatgccggccctaccgcaggcaaaggttcccaccttactacatgcggagaccctatgggtgtcgaccacagtattccagccctcctgtgcagggagaagtgatggagggtgctgacaaccagggtgcaggagaacaaggtagaccagtgaggcagaatatgtatcggggatatagaccacgattccgcaggggccctccttgccaaagacagcctagagagtacggcaatgaagaagataaaatcaaggagatgagacccagggtcagcagccacctcaacgtcggtaccgcagcaacttcaattaccaacgcagatgcccagaaaaccctaaatcacaagatggcaaagagacaaaatcagccaatccaccagctgagaattcgtctgctcccgaggctgagcagggcggggctgagtaaatgccggcttaccatctctaccatcatccggtttagtcatccaacaagaagaaatatgaaattccagcaataagaaatgaacaaaagattggagctgaagaccttaagtgcttgctttttgcccgttgaccagataaatagaactatctgcattatctatgcagcatggggtttttattatttttacctaaatatgtctctttttggtaataacaaacgtgttttttttaaaaagccttgtttttctcaatacgcctttaaagg

SEQ ID NO: 2384 - protein, 150 aa, Homo sapiens
MRRPYGCRPQYSSPPVQGEVMEGADNQGAGEQGRPVRQNMYRGYRPRFRRGPPCQRQPREYGNEEDKIKEMRPRVSSHLNVGTAATSITNADAQKTLNHKMAKRQNQPIHQLRIRLLPRLSRAGLSKCRLTISTIIRFSHPTRRNMKFQQ

SEQ ID NO: 2385 - DNA, 5831 bp, Homo sapiens
gggacctggaagcgccccagccccgcagcgatcgcagattcggctttcaaacaaaagaggcgccccggggggtgggaccgggacctcacccggtcctcgcagagttgcggccgcccgccccttcagccccggctctccgtatgcgcatgagcagaggcgcctccctctgttcctcccaaggctaaactttctaattcccttctttgggctcgggggctcccggagcagggcgagagctcgcgtcgccggaaaggaagacgggaagaaagggcaggcggctcggcgggcgtcttctccactcctctgccgcgtccccgtggctgcagggagccggcatggggcttctccagttgctagctttcagtttcttagccctgtgcagagcccgagtgcgcgctcaggaacccgagttcagctacggctgcgcagaaggcagctgctatcccgccacgggcgaccttctcatcggccgagcacagaaagctttcggtgacctcgacgtgcgggctgcacaagcccgaaccctactgtatcgtcagccacttgcaggaggacaaaaaatgcttcatatgcaattcccaagatccttatcatgagaccctgaatcctgacagccatctcattgaaaatgtggtcactacatttgctccaaaccgccttaagatttggtggcaatctgaaaatggtgtggaaaatgtaactatccaactggatttggaagcagaattccattttactcatctcataatgactttcaagacattccgtccagctgctatgctgatagaacgatcgtccgactttgggaaaacctggggtgtgtatagatacttcgcctatgactgtgaggcctcgtttccaggcatttcaactggccccatgaaaaaagtcgatgacataatttgtgattctcgatattctgacattgaaccctcaactgaaggagaggtgatatttcgtgctttagatcctgctttcaaaatagaagatccttatagcccaaggatacagaatttattaaaaattaccaacttgagaatcaagtttgtgaaactgcatactttgggagataaccttctggattccaggatggaaatcagagaaaagtattattatgcagtttatgatatggtggttcgaggaaattgcttctgctatggtcatgccagcgaatgtgcccctgtggatggattcaatgaagaagtggaaggaatggttcacggacactgcatgtgcaggcataacaccaagggcttaaactgtgaactctgcatggatttctaccatgatttaccttggagacctgctgaaggccgaaacagcaacgcctgtaaaaaatgtaactgcaatgaacattccatctcttgtcactttgacatggctgtttacctggccacggggaacgtcagcggaggcgtgtgtgatgactgtcagcacaacaccatggggcgcaactgtgagcagtgcaagccgttttactaccagcacccagagagggacatccgagatcctaatttctgtgaacgtatgtacgtgtgacccagctggctctcaaaatgagggaatttgtgacagctatactgatttttctactggtctcattgctggccagtgtcggtgtaaattaaatgtggaaggagaacattgtgatgtttgcaaagaaggcttctatgatttaagcagtgaagatccatttggttgtaaatcttgtgcttgcaatcctctgggaacaattcctggagggaatccttgtgattccgagacaggtcactgctactgcaagcgtctggtgacaggacagcattgtgaccagtgcctgccagagcactggggcttaagcaatgatttggatggatgtcgaccatgtgactgtgaccttgggggagccttaaacaacagttgctttgcggagtcaggccagtgctcatgccggcctcacatgattggacgtcagtgcaacgaagtggaacctggttactactttgccaccctggatcactacctctatgaagcggaggaagccaacttggggcctggggttagcatagtggagcggcaatatatccaggaccggattccctcctggactggagccggcttcgtccgagtgcctgaaggggcttatttggagtttttcattgacaacataccatattccatggagtacgacatcctaattcgctacgagccacagctacccgaccactgggaaaaagctgtcatcacagtgcagcgacctggaaggattccaaccagcagccgatgtggtaataccatccccgatgatgacaaccaggtggtgtcattatcaccaggctcaagatatgtcgtccttcctcggccggtgtgctttgagaagggaacaaactacacggtgaggttggagctgcctcagtacacctcctctgatagcgacgtggagagcccctacacgctgatcgattctcttgttctcatgccatactgtaaatcactggacatcttcaccgtgggaggttcaggagatggggtggtcaccaacagtgcctgggaaacctttcagagataccgatgtctagagaacagcagaagcgttgtgaaaacaccgatgacagatgtttgcagaaacatcatctttagcatttctgccctgttacaccagacaggcctggcttgtgaatgcgaccctcagggttcgttaagttccgtgtgtgatcccaacggaggccagtgccagtgccggcccaacgtggttggaagaacctgcaacagatgtgcacctggaacttttggctttggccccagtggatgcaaaccttgtgagtgccatctgcaaggatctgtcaatgccttctgcaatcccgtcactggccagtgccactgtttccagggagtgtatgctcggcagtgtgatcggtgcttacctgggcactggggctttccaagttgccagccctgccagtgcaatggccacgccgatgactgcgacccagtgactggggagtgcttgaactgccaggactacaccatgggtcataactgtgaaaggtgcttggctggttactatggcgaccccatcattgggtcaggagatcactgccgcccttgcccttgcccagatggtcccgacagtggacgccagtttgccaggagctgctaccaagatcctgttactttacagcttgcctgtgtttgtgatcctggatacattggttccagatgtgacgactgtgcctcaggatactttggcaatccatcagaagttggggggtcgtgtcagccttgccagtgtcacaacaacattgacacgacagacccagaagcctgtgacaaggagactgggaggtgtctcaagtgcctgtaccacacggaaggggaacactgtcagttctgccggtttggatactatggtgatgccctccagcaggactgtcgaaagtgtgtctgtaattacctgggcaccgtgcaagagcactgtaacggctctgactgccagtgcgacaaagccactggtcagtgcttgtgtcttcctaatgtgatcgggcagaactgtgaccgctgtgcgcccaatacctggcagctggccagtggcactggctgtgacccatgcaactgcaatgctgctcattccttcgggccatcttgcaatgagttcacggggcagtgccagtgcatgcctgggtttggaggccgcacctgcagcgagtgccaggaactcttctggggagaccccgacgtggagtgccgagcctgtgactgtgaccccaggggcattgagacgccacagtgtgaccagtccacgggccagtgtgtctgcgttgagggtgttgagggtccacgctgtgacaagtgcacgcgagggtactcgggggtcttccctgactgcacaccctgccaccagtgctttgctctctgggatgtgatcattgccgagctgaccaacaggacacacagattcctggagaaagccaaggccttgaagatcagtggtgtgatcgggccttaccgtgagactgtggactcggtggagaggaaagtcagcgagataaaagacatcctggcgcagagccccgcagcagagccactgaaaaacattgggaatctctttgaggaagcagagaaactgattaaagatgttacagaaatgatggctcaagtagaagtgaaattatctgacacaacttcccaaagcaacagcacagccaaagaactggattctctacagacagaagccgaaagcctagacaacactgtgaaagaacttgctgaacaactggaatttatcaaaaactcagatattcggggtgccttggatagcattaccaagtatttccagatgtctcttgaggcagaggagagggtgaatgcctccaccacagaacccaacagcactgtggagcagtcagccctcatgagagacagagtagaagacgtgatgatggagcgagaatcccagttcaaggaaaaacaagaggagcaggctcgcctccttgatgaactggcaggcaagctacaaagcctagacctttcagccgctgccgaaatgacctgtggaacacccccaggggcctcctgttccgagactgaatgtggcgggccaaactgcagaactgacgaaggagagaggaagtgtggggggcctggctgtggtggtctggttactgttgcacacaacgcctggcagaaagccatggacttggaccaagatgtcctgagtgccctggctgaagtggaacagctctccaagatggtctctgaagcaaaactgagggcagatgaggcaaaacaaagtgctgaagacattctgttgaagacaaatgctaccaaagaaaaaatggacaagagcaatgaggagctgagaaatctaatcaagcaaatcagaaactttttgacccaggatagtgctgatttggacagcattgaagcagttgctaatgaagtattgaaaatggagatgcctagcaccccacagcagttacagaacttgacagaagatatacgtgaacgagttgaaagcctttctcaagtagaggttattcttcagcatagtgctgctgacattgccagagctgagatgttgttagaagaagctaaaagagcaagcaaaagtgcaacagatgttaaagtcactgcagatatggtaaaggaagctctggaagaagcagaaaaggcccaggtcgcagcagagaaggcaattaaacaagcagatgaagacattcaaggaacccagaacctgttaacttcgattgagtctgaaacagcagcttctgaggaaaccttgttcaacgcgtcccagcgcatcagcgagttagagaggaatgtggaagaacttaagcggaaagctgcccaaaactccggggaggcagaatatattgaaaaagtagtatatactgtgaagcaaagtgcagaagatgttaagaagactttagatggtgaacttgatgaaaagtataaaaaagtagaaaatttaattgccaaaaaaactgaagagtcagctgatgccagaaggaaagccgaaatgctacaaaatgaagcaaaaactcttttagctcaagcaaatagcaagctgcaactgctcaaagatttagaaagaaaatatgaagacaatcaaagatacttagaagataaagctcaagaattagcaagactggaaggagaagtccgttcactcctaaaggatataagccagaaagttgctgtgtatagcacatgcttgtaacagaggagaataaaaaatggctgaggtgaacaaggtaaaacaactacattttaaaaactgacttaatgctcttcaaaataaaacatcacctatttaatgtttttaatcacattttgtatggagttaaataaag

SEQ ID NO: 2386 - DNA, 828 bp, Homo sapiens
ctctttttccggctggaaccatggtgggtgtagaagagaagaagaaggttcctgctgtgccagaaacccttaagaaaaagcgaaggaatttctcagagctgaagatgaagcgcctgagaaagaagtttgcccaaaagatgcttcgaaaggcaaggaggaagcttatctatgaaaaagcaaagcactatcacagggaatataggcagatgtacagaactgaaattcgaatggcgaggatggcaagaaaagctggcaactactttgtacctgcagaacccaaactggcatttgtcatcagaatcagaggtatcagtggcgtgagcccaaaggtccgaaaggtgttgcagcttcttcgccttcgtcaaatctacaatggaacctttgtgaagctcaacaaggcttcgactaacatgctgaggattgtagagccatatattgcatgggggtaccccaatctgaagtcagtaaatgaactaatctacaagagtggttatggcaaaatcaataagaagcgaattgctttgacagataacgctttgattgctcgatctcttggtaaatatggcatcatctgcatggaggatctgattcatgagatctatactgttggaaaacgcttcaaagaggcaaataacttcctgtggcccttcaaattgtcttctccacgaggtggaatgaagaaaaagaccacccattttgtagaaggtggagatgctggcaacagggaggaccagatcaacaggcttattagaagaatgaactaaggtgtctaccatgactatttctctaagctggttggttaataaacagtacctgctctcaaattgg

SEQ ID NO: 2387 - DNA, 1075 bp, Homo sapiens
cttcctagaaggtaatgtacgaactcgtctccaaaggatacttaggttgcaccagtgtatttgtaaaacaggagcaaatttggaccttgccgggccaaagtcgtgtcacgtggaacctcttaatctcagcatccggagctccaggaagggaaaatttcaagtcagatagaattctatatataccatttctaggaaccttcagccctcaagattccaacatcatgacctcagtttcaacacagttgtccttagtcctcatgtcactgcttttggtgctgcctgttgtggaagcagtagaagccggtgatgcaatcgcccttttgttaggtgtggttctcagcattacaggcatttgtgcctgcttgggggtatatgcacgaaaaagaaatggacagatgtgactttgaaaggcctactgagtcaaacctcaccctgaaaacctttgcgctttagaggctaaacctgagatttggtgtgtgaaaggttccaagaatcagtaaataagggagtttcacatttttcattgtttccatgaaatggcaacaaacatacatttataaattgaaaaaaaaatgttttctttacaacaaataatgcacagaaaaatgcagcctataatttgctagttaggtagtcaaagaagtaagatggctgaaatttacataagtaatatttcataatcttagaattctctcaaagcatgtgaaataggaagaaggaagttcttgcccagaatcttaggaaatcaccactgttcggttataatcactgcctcctgaatcgttgaggagtcttttaaattagatttttgttttgttgtctcccaagttaatattatatttagatatcagagagtcaggcaaaaaggaaaacttttatctctagggaaaaaacatttagaaaaatgtattcagtgtatctaatactgaaatgcggaaaaaaatttaatgttaaaaaaaaactatagacattgacatggaaaagagatttaatgttttgaaaaaaaactttatattaactgagtaacatcctcctgatgagaagtactatattaaatataaacccattatgttat

SEQ ID NO: 2388 - protein, 128 aa, Homo sapiens
MYELVSKGYLGCTSVFVKQEQIWTLPGQSRVTWNLLISASGAPGRENFKSDRILYIPFLGTFSPQDSNIMTSVSTQLSLVLMSLLLVLPVVEAVEAGDAIALLLGVVLSITGICACLGVYARKRNGQM

SEQ ID NO: 2389 - DNA, 2693 bp, Homo sapiens
gagtggctgttgagcggcgccgcgggagttccgcaggtttcccgtgttcgcagcggagccggaggccagctgaacccggccgtgggatcccggataggaggaggaggggacccataggacgcgttaacatggacctggaaaacaaagtgaagaagatgggcttaggtcacgagcaaggatttggagccccttgtttaaaatgcaaagaaaaatgtgaaggattcgaactgcacttctggagaaaaatatgtcgtaactgcaagtgtggccaagaagagcatgatgtcctcttgagcaatgaagaggatcgaaaagtgggaaaactttttgaagacaccaagtataccactctgattgcaaaactaaagtcagatggaattcccatgtataaacgcaatgttatgatattgacgaatccagttgctgccaagaagaatgtctccatcaatacagttacctatgagtgggctcctcctgtccagaatcaagcattggccaggcagtacatgcagatgctacccaaggaaaagcagccagtagcaggctcagagggggcacagtaccggaagaagcagctggcaaagcagctccctgcacatgaccaggacccttcaaagtgccatgagttgtctcccagagaggtgaaggagatggagcagtttgtgaagaaatataagagcgaagctctgggagtaggagatgtcaaacttccctgtgagatggatgcccaaggccccaaacaaatgaacattcctggaggggatagaagcaccccagcagcagtgggggccatggaggacaaatctgctgagcacaaaagaactcaatattcctgctattgctgcaaactgagtatgaaagaaggtgacccagccatctatgccgaaagggctggctatgataaactgtggcacccagcttgttttgtctgcagcacctgccatgaactcctggttgacatgatttatttttggaagaatgagaagctatactgtggcagacattactgtgacagcgagaaaccccgatgtgctggctgtgacgagctgatattcagcaatgagtatacccaggcagaaaaccagaattggcacctgaaacacttctgctgctttgactgtgatagcattctagctggggagatatacgtgatggtcaatgacaagcccgtgtgcaagccctgctatgtgaagaatcacgctgtggtgtgtcaaggatgccacaatgccatcgacccagaagtgcagcgggtgacctataacaatttcagctggcatgcatccacagagtgctttctgtgctcttgctgcagcaaatgcctcattgggcagaagttcatgccagtagaagggatggttttctgttcagtggaatgtaagaagaggatgtcttaggaggagggcacccagaagtatcgagccatagctatccaaagtggtctgcatttctactgtaaaatgcaatttgaaaaaaataaaacgcaaaaaaagaaactgtaaaggaaaccaagagattttgtttaatttttttggccattttttcttcatcaattttttttcggtctcaacttttaaacttggtttaagcatttgatttgtaaaacagtaaataattgtatctttccatagcttttcaaatgtgaaatcatttttggaagcttggatctcattaaacttcatgtctctattccatttgtgccacacacttaaaagttagtgtactgaatggaaagatgagcattcctagttctacacttcttttttccccctcatgtgtaaaatgaaaagaaaactaaatttgccctaataccaaggcgctacgtttattgcctcgtcttattcactgacctttgtaatgatacacagtgaattctttttgacaaagagaaatgcagtgtagtatgcagagctgctgttttaatgcctatgcatttactctttcctgatttaggcagaggtggcattttctttattgcatttctctatttttttaatgtaccctaccttcagtattctctttgtaagttggtgacttgcatctgtggccttgaatattttattatcacatgtggcataacagtatccacactttttagttctttatttttttttttttattttgagcaattctcctgcctcagcctcccaaatagctgggattacaggtgcatgccaccacacccagctaatttttgtatttttagtagagacaggttttcaccatgttagccaggctggtctcaaactcctgacctcagatgatccgcctgccttggcctcccaaagtgctgggattacaggtgtgggagccaccatgcctgacccacacactttttacttgtatagatgatttttggcttggacataaaagccaagccacccatttgcttttaatccaaagaacatgtatagtttttgtacccagagactatgatttatattgattgcacttgcctgccatgatttagataagattttttttgcatggtttttattctttcctaatggatcctgttttataatacttccaagcctgtccatggatatatcaaatgtcttcacttgtatattttcatggctaggtatttctaatgtttattcttccctgtgtacttctacacatagctatgcactatgaaaattaaatggaatgaatgatatgtatattactcaaaataaagtttctttcacttt

SEQ ID NO: 2390 - protein, 421 aa, Homo sapiens
MDLENKVKKMGLGHEQGFGAPCLKCKEKCEGFELHFWRKICRNCKCGQEEHDVLLSNEEDRKVGKLFEDTKYTTLIAKLKSDGIPMYKRNVMILTNPVAAKKNVSINTVTYEWAPPVQNQALARQYMQMLPKEKQPVAGSEGAQYRKKQLAKQLPAHDQDPSKCHELSPREVKEMEQFVKKYKSEALGVGDVKLPCEMDAQGPKQMNIPGGDRSTPAAVGAMEDKSAEHKRTQYSCYCCKLSMKEGDPAIYAERAGYDKLWHPACFVCSTCHELLVDMIYFWKNEKLYCGRHYCDSEKPRCAGCDELIFSNEYTQAENQNWHLKHFCCFDCDSILAGEIYVMVNDKPVCKPCYVKNHAVVCQGCHNAIDPEVQRVTYNNFSWHASTECFLCSCCSKCLIGQKFMPVEGMVFCSVECKKRMS

SEQ ID NO: 2391 - DNA, 2704 bp, Homo sapiens
gggagaaacgttctcactcgctctctgctcgctgcgggcgctccccgccctctgctgccagaaccttggggatgtgcctagacccggcgcagcacacgtccgggccaaccgcgagcagaacaaacctttggcgggcggccaggaggctccctcccagccaccgcccccctccagcgcctttttttccccccatacaatacaagatcttccttcctcagttcccttaaagcacagcccagggaaacctcctcacagttttcatccagccacgggccagcatgtctgggggcaaatacgtagactcggagggacatctctacaccgttcccatccgggaacagggcaacatctacaagcccaacaacaaggccatggcagacgagctgagcgagaagcaagtgtacgacgcgcacaccaaggagatcgacctggtcaaccgcgaccctaaacacctcaacgatgacgtggtcaagattgactttgaagatgtgattgcagaaccagaagggacacacagttttgacggcatttggaaggccagcttcaccaccttcactgtgacgaaatactggttttaccgcttgctgtctgccctctttggcatcccgatggcactcatctggggcatttacttcgccattctctctttcctgcacatctgggcagttgtaccatgcattaagagcttcctgattgagattcagtgcatcagccgtgtctattccatctacgtccacaccgtctgtgacccactctttgaagctgttgggaaaatattcagcaatgtccgcatcaacttgcagaaagaaatataaatgacatttcaaggatagaagtatacctgattttttttccttttaattttcctggtgccaatttcaagttccaagttgctaatacagcaacaatttatgaattgaattatcttggttgaaaataaaaagatcactttctcagttttcataagtattatgtctcttctgagctatttcatctatttttggcagtctgaatttttaaaacccatttaaatttttttccttacctttttatttgcatgtggatcaaccatcgctttattggctgagatatgaacatattgttgaaaggtaatttgagagaaatatgaagaactgaggaggaaaaaaaaaaaaaagaaaagaaccaacaacctcaactgcctactccaaaatgttggtcattttatgttaagggaagaattccagggtatggccatggagtgtacaagtatgtgggcagattttcagcaaactcttttcccactgtttaaggagttagtggattactgccattcacttcataatccagtaggatccagtgatccttacaagttagaaaacataatcttctgccttctcatgatccaactaatgccttactcttcttgaaattttaacctatgatattttctgtgcctgaatatttgttatgtagataacaagacctcagtgccttcctgtttttcacattttccttttcaaatagggtctaactcagcaactcgctttaggtcagcagcctccctgaagaccaaaattagaatatccatgacctagttttccatgcgtgtttctgactctgagctacagagtctggtgaagctcacttctgggcttcatctggcaacatctttatccgtagtgggtatggttgacactagcccaatgaaatgaattaaagtggaccaatagggctgagctctctgtgggctggcagtcctggaagccagctttccctgcctctcatcaactgaatgaggtcagcatgtctattcagcttcgtttattttcaagaataatcacgctttcctgaatccaaactaatccatcaccggggtggtttagtggctcaacattgtgttcccatttcagctgatcagtgggcctccaaggaggggctgtaaaatggaggccattgtgtgagcctatcagagttgctgcaaacctgacccctgctcagtaaagcacttgcaaccgtctgttatgctgtgacacatggcccctccccctgccaggagctttggacctaatccaagcatccctttgcccagaaagaagatgggggaggaggcagtaataaaaagattgaagtattttgctggaataagttcaaattcttctgaactcaaactgaggaatttcacctgtaaacctgagtcgtacagaaagctgcctggtatatccaaaagctttttattcctcctgctcatattgtgattctgcctttggggacttttcttaaaccttcagttatgatttttttttcatacacttattggaactctgcttgatttttgcctcttccagtcttcctgacactttaattaccaacctgttacctactttgactttttgcatttaaaacagacactggcatggatatagttttacttttaaactgtgtacataactgaaaatgtgctatactgcatactttttaaatgtaaagatatttttatctttatatgaagaaaatcacttaggaaatggctttgtgattcaatctgtaaactgtgtattccaagacatgtctgttctacatagatgcttagtccctcatgcaaatcaattactggtccaaaagattgctgaaattttatatgcttactgatatattttacaattttttatcatgcatgtcctgtaaaggttacaagcctgcacaataaaaatgtttaacggtt

SEQ ID NO: 2392 - protein, 178 aa, Homo sapiens
MSGGKYVDSEGHLYTVPIREQGNIYKPNNKAMADELSEKQVYDAHTKEIDLVNRDPKHLNDDVVKIDFEDVIAEPEGTHSFDGIWKASFTTFTVTKYWFYRLLSALFGIPMALIWGIYFAILSFLHIWAVVPCIKSFLIEIQCISRVYSIYVHTVCDPLFEAVGKIFSNVRINLQKEI

SEQ ID NO: 2393 - DNA, 918 bp, Homo sapiens
tttgtcgccagaaggaagatggcggatctggaggagcagttgtctgatgaagagaaggtgcgtatagcagcaaaattcatcattcatgcccctcctggagaatttaatgaggttttcaatgatgttcggttactgcttaataatgacaatcttctcagggaaggagcagcccatgcatttgcacagtataacttggaccagtttactccagtaaaaattgaaggttatgaagatcaggtattgataacagaacatggcgacttgggaaatggaaagtttttggatccaaagaacagaatctgttttaaatttgatcacttaaggaaggaggcaactgatccaagaccctgtgaagtagaaaatgcagttgaatcatggagaacttcagtagaaactgctctgagagcttacgtaaaagaacattacccgaatggagtctgcactgtgtatggcaaaaaaatagatggacagcaaaccattattgcatgcatagaaagccatcagttccaagcaaaaaatttttggaatggtcgttggaggtcagaatggaagtttacaatcactccttcaaccactcaagtggttggcatcttgaaaattcaggttcattattatgaagatggtaatgttcagctagtgagtcataaagatatacaagattccctaacagtgtctaatgaagtgcaaacagcaaaagaatttataaagattgtagaagctgcagaaaatgaataccagactgccatcagtgagaattatcagacaatgtcggacactactttcaaagccttacgtcgacagttgccagttacacgcactaagattgattggaacaagatccttagctacaagattggcaaagagatgcagaatgcataagatgaacattgcatgaccggatcattttagtgtctttgc

SEQ ID NO: 2394 - protein, 286 aa, Homo sapiens
MADLEEQLSDEEKVRIAAKFIIHAPPGEFNEVFNDVRLLLNNDNLLREGAAHAFAQYNLDQFTPVKIEGYEDQVLITEHGDLGNGKFLDPKNRICFKFDHLRKEATDPRPCEVENAVESWRTSVETALRAYVKEHYPNGVCTVYGKKIDGQQTIIACIESHQFQAKNFWNGRWRSEWKFTITPSTTQVVGILKIQVHYYEDGNVQLVSHKDIQDSLTVSNEVQTAKEFIKIVEAAENEYQTAISENYQTMSDTTFKALRRQLPVTRTKIDWNKILSYKIGKEMQNA

SEQ ID NO: 2395 - DNA, 434 bp, Homo sapiens
ctctccggtccgtgcctccaagatgacaaagaaaagaaggaacaatggtcgtgccaaaaagggccgcggccacgtgcaacctgttcgctgtactaactgtgcccgatgcgtgcccaaggacaaggccattaagaaattcgtcattcgaaacatagtggaggccgtagcagtcagggacatttctgaagcaagcgtcttcgatgcctatgtgcttcccaagctgtatgtgaagctacattactgtgtgagttgtgcaattcacagcaaagtagtcaggaatcgatctcgtgaagcccgcaaggaccgaacacccccacccagatttagacctgcgggtgctgccccacgtcccccaccaaagcccatgtaaggagctgagttcttaaagactgaagacaggttattctctggagaaaaataaaatggaaattgta

SEQ ID NO: 2396 - DNA, 1550 bp, Homo sapiens
tggagctaagctgtttccagggtgacagagtggcgacctcggtggtcgattgagcaggtctgagaattgttcccaaagggttgtgcgtcaccgagtcgttggcgctgtcatggcgggtgtgctgaagaagaccactggccttgtgggattggctgtgtgcaatactcctcacgagaggctaagaatattgtacacaaagattcttgatgttcttgaggaaatccctaaaaatgcagcatatagaaagtatacagaacagattacaaatgagaagctggctatggttaaagcggaaccagatgttaaaaaattagaagaccaacttcaaggcggtcaattagaagaggtgattcttcaggctgaacatgaactaaatctggcaagaaaaatgagggaatggaaactatgggagccattagtggaagagcctcctgccgatcagtggaaatggccaatataattattaagtgactttggtgtgttcatgggaaactgatgtaattaaatattctgttatattaagagcgtgttcttattactgacattttgtaatcaagaaaagtgatatagaaaatatgtaggagactgttaaaattggtgattatggtaatatggtcatgtgaatcaatttttgatttataaagtactcacacaagttgtttcaaagatgatatttctgtgaacagagaggccatgggaagatttgaaaattattaaagaaaaattcctacagattttcaatgcagagaccataatcaaaaagtaaactttctttagtagtatgttcaatacatcatttaattttttaagttatcctgaagaaggaaaggtccttaattattatagtctaaacaaatttatagattactgtttgaagtaaataatacgagtgaatattttcaaatgtgataaaatagcacaagtggctggtgataaaatttgaaattatggttaacctcagctgtgatcttatgtatgtaaagtgaaatttaaatagataattataggttgattacaaaatccatagtgtcattttattttagtcattattgaattataccatttactctgttttcttatagtcttaattttattatattttgttgttactgtattatatttgaaaaccttcaaattagaatacattgtacagttaaagaaattgacttggtacttaaaagaaagatttcccattgcatacaggttattggagaaattttccttttgttgcatttgtggaagttagttttctggcccgtggcctttaattttcttaatcaacctaattacatcaggatagaggtagagtttctgtaaaagaagagacattaagagttcctgaaatttatatctggcataccgataggcttatattcaaaacatcttagtcatacgaccataaattaaaagtggagtcactaaatagtttgcagtacgtttctaatataagtgtaggtgggtatcaaaacaagacaaatgctgttcagggaaagaagttggcaagcttaaggttaaacaaaaataaaattacatgtgttttcgccttccta

SEQ ID NO: 2397 - protein, 116 aa, Homo sapiens
MAGVLKKTTGLVGLAVCNTPHERLRILYTKILDVLEEIPKNAAYRKYTEQITNEKLAMVKAEPDVKKLEDQLQGGQLEEVILQAEHELNLARKMREWKLWEPLVEEPPADQWKWPI

SEQ ID NO: 2398 - DNA, 978 bp, Mus musculus
ccgcgtcggtgcccgcgcccctccccgggccccgccatgggcctcaccgtgtccgcgctcttttcgcggatcttcgggaagaagcagatgcggattctcatggttggcttggatgcggctggcaagaccacaatcctgtacaaactgaagttgggggagattgtcaccaccatcccaaccataggcttcaatgtagaaacagtggaatataagaacatctgtttcacagtctgggacgtgggaggccaggacaagattcggcctctgtggcggcactacttccagaacactcagggcctcatctttgtggtggacagtaatgaccgggagcgggtccaagaatctgctgatgaactccagaagatgctgcaggaggacgagctgcgggatgcagtgctgctggtatttgccaacaagcaggacatgcccaacgccatgcccgtgagcgagctgactgacaagctggggctacagcacttacgcagccgcacgtggtatgtccaggccacctgtgccacccaaggcacaggtctgtacgatggtctggactggctgtcccacgagctgtcaaagcgctaaccagccaggggcaggcccctgatgcccggaagctcctgcgtgcatccccgggatgaccagactcccggactcctcaggcagtgccctttcctcccacttttcctcccccatagccacaggcctctgctcctgctcctgcctgcatgttctctctgttgttggagcctggagccttgctctctgggcacagaggggtccactctcctgcctgctgggacctatggaaggggcttcctggccaaggccccctcttccagaggaggagcagggatctgggtttccttttttttttctgttttgggtgtactctaggggccaggttgggagggggaaggtgagggcttcgggtggtgctataatgtggcactggatcttgagtaataaatttgctgtggtttg

SEQ ID NO: 2399 - protein, 180 aa, Mus musculus
MGLTVSALFSRIFGKKQMRILMVGLDAAGKTTILYKLKLGEIVTTIPTIGFNVETVEYKNICFTVWDVGGQDKIRPLWRHYFQNTQGLIFVVDSNDRERVQESADELQKMLQEDELRDAVLLVFANKQDMPNAMPVSELTDKLGLQHLRSRTWYVQATCATQGTGLYDGLDWLSHELSKR

SEQ ID NO: 2400 - DNA, 3076 bp, Homo sapiens
gcgagtagaacgtgtggcggcggcggagatcgcgtctctttcgctccgtgtcccgctgctgctcctgtgagcgcccggcgagtccgtcccgtccaccgtccgcagctggtagccagcctgcccctcgcctcgactccctttcaccaacaccgacacccacattgacacctccagtccggccagccgctccactcgttgcctttgcatctccacacatggcgtcctccgcgcagagcggcggctcctccgggggacccgcggtccccaccgtgcagcggggcatcatcaagatggtcctctcagggtgcgccatcattgtccgaggtcagcctcgtggtgggcctcctcctgagcggcagatcaacctcagcaacattcgtgctggaaatcttgctcgccgggcagccgccacacaacctgatgcaaaggatacccctgatgagccctgggcatttccagctcgagagttccttcgaaagaagctgattgggaaggaagtctgtttcacgatagaaaacaagactccccaggggcgagagtatggcatgatctaccttggaaaagataccaatggggaaaacattgcagaatcactggttgcagagggcttagccacccggagagaaggcatgagagctaataatcctgagcagaaccggctttcagaatgtgaagaacaagcaaaggcagccaagaaagggatgtggagtgaggggaacggttcacatactatccgggatctcaagtataccattgaaaacccaaggcactttgtggactcacaccaccagaagcctgttaatgctatcatcgagcatgtgcgggacggcagtgtggtcagggccctgctcctcccagattactacctggttacagtcatgctgtcaggcatcaagtgcccaacttttcgacgggaagcagatggcagtgaaactccagagccttttgctgcagaagccaaatttttcactgagtcgcgactgcttcagagagatgttcagatcattctggagagctgccacaaccagaacattctgggtaccatccttcatccaaatggcaacatcacagagctcctcctgaaggaaggtttcgcacgctgtgtggactggtcgattgcagtttacacccggggcgcagaaaagctgagggcggcagagaggtttgccaaagagcgcaggctgagaatatggagagactatgtggctcccacagctaatttggaccaaaaggacaagcagtttgttgccaaggtgatgcaggttctgaatgctgatgccattgttgtgaagctgaactcaggcgattacaagacgattcacctgtccagcatccgaccaccgaggctggagggggagaacacccaggataagaacaagaaactgcgtcccctgtatgacattccttacatgtttgaggcccgggaatttcttcgaaaaaagcttattgggaagaaggtcaatgtgacggtggactacattagaccagccagcccagccacagagacagtgcctgccttttcagagcgtacctgtgccactgtcaccattggaggaataaacattgctgaggctcttgtcagcaaaggtctagccacagtgatcagataccggcaggatgatgaccagagatcatcacactacgatgaactgcttgctgcagaggccagagctattaagaatggcaaaggattgcatagcaagaaggaagtgcctatccaccgtgttgcagatatatctggggatacccaaaaagcaaagcagttcctgccttttcttcagcgggcaggtcgttctgaagctgtggtggaatacgtcttcagtggttctcgtctcaaactctatttgccaaaggaaacttgccttatcaccttcttgcttgcaggcattgaatgccccagaggagcccgaaacctcccaggcttggtgcaggaaggagagcccttcagcgaggaagctacacttttcaccaaggaactggtgctgcagcgagaggtggaggtggaggtggagagcatggacaaggccggcaactttatcggctggctgcacatcgacggtgccaacctgtccgtcctgctggtggagcacgcgctctccaaggtccacttcaccgccgaacgcagctcctactacaagtccctgctgtctgccgaggaggccgcaaagcagaagaaagagaaggtctgggcccactatgaggagcagcccgtggaggaggtgatgccagtgctggaggagaaggagcgatctgctagctacaagcccgtgtttgtgactgagatcactgatgacctgcacttctacgtgcaggatgtggagaccggcacccagttggagaagctgatggagaacatgcgcaatgacattgccagtcacccccctgtagagggctcctatgccccccgcaggggagagttctgcattgccaaatttgtagatggagaatggtaccgtgcccgagtagagaaagtcgagtctcctgccaaaatacatgtcttctacattgactacggcaacagagaggtcctgccatccacccgcctgggtaccctatcacctgccttcagcactcgggtgctgccagctcaagccacggagtatgccttcgccttcatccaggtgccccaagatgatgatgcccgcacggacgccgtggacagcgtagttcgggatatccagaacactcagtgcctgctcaacgtggaacacctgagtgccggctgcccccatgtcaccctgcagtttgcagattccaagggcgatgtggggctgggcttggtgaaggaagggctggtcatggtggaggtgcgcaaggagaaacagttccagaaagtgatcacagaatacctgaatgcccaagagtcagccaagagcgccaggctgaacctgtggcgctatggagactttcgagctgatgatgcagactgccctcgtcccagctctctgtccaactgttgattatgtgatttttctgatacgtccattctcaaatgccagtgtgttcacatcttcgctctggccagcccattctgtatttaaagcttttgaggcccaataaaatagtacgtgctgtc

SEQ ID NO: 2401 - protein, 914 aa, Homo sapiens
MASSAQSGGSSGGPAVPTVQRGIIKMVLSGCAIIVRGQPRGGPPPERQINLSNIRAGNLARRAAATQPDAKDTPDEPWAFPAREFLRKKLIGKEVCFTIENKTPQGREYGMIYLGKDTNGENIAESLVAEGLATRREGMRANNPEQNRLSECEEQAKAAKKGMWSEGNGSHTIRDLKYTIENPRHFVDSHHQKPVNAIIEHVRDGSVVRALLLPDYYLVTVMLSGIKCPTFRREADGSETPEPFAAEAKFFTESRLLQRDVQIILESCHNQNILGTILHPNGNITELLLKEGFARCVDWSIAVYTRGAEKLRAAERFAKERRLRIWRDYVAPTANLDQKDKQFVAKVMQVLNADAIVVKLNSGDYKTIHLSSIRPPRLEGENTQDKNKKLRPLYDIPYMFEAREFLRKKLIGKKVNVTVDYIRPASPATETVPAFSERTCATVTIGGINIAEALVSKGLATVIRYRQDDDQRSSHYDELLAAEARAIKNGKGLHSKKEVPIHRVADISGDTQKAKQFLPFLQRAGRSEAVVEYVFSGSRLKLYLPKETCLITFLLAGIECPRGARNLPGLVQEGEPFSEEATLFTKELVLQREVEVEVESMDKAGNFIGWLHIDGANLSVLLVEHALSKVHFTAERSSYYKSLLSAEEAAKQKKEKVWAHYEEQPVEEVMPVLEEKERSASYKPVFVTEITDDLHFYVQDVETGTQLEKLMENMRNDIASHPPVEGSYAPRRGEFCIAKFVDGEWYRARVEKVESPAKIHVFYIDYGNREVLPSTRLGTLSPAFSTRVLPAQATEYAFAFIQVPQDDDARTDAVDSVVRDIQNTQCLLNVEHLSAGCPHVTLQFADSKGDVGLGLVKEGLVMVEVRKEKQFQKVITEYLNAQESAKSARLNLWRYGDFRADDADCPRPSSLSNC

SEQ ID NO: 2402 - DNA, 2865 bp, Homo sapiens
tcggaaggggccaggagacactggaaggtccggacggcagggaaggggacggggttctttccagtcccacccgtgtagggacacctctccccctcatcccccgatgtaccctcgctgaatctgggatgggagagacgaaccgagtctaggcatctgcgtagcagcgccggggagagcggggagcccagggcggagcccagtcgactcccggattcccctgccccgcccccggcacgaggccccgccccggcggccccgcccctcctcgggactcgaccgggctgcgctcactgcccagccggggccccgggagcctccaggctcccgcccgccctgagctgcggcctccgcatggaggggccactcactccaccaccgctgcagggaggcggagccgccgctgttccggagcccggagcccggcaacacccgggacacgagacggcggcgcagcggtacagcgcccgactgctgcaggccggctacgagcccgagagccctagattggacctcgctacacacccgacgacaccccgttcagaactatcttcagtggtcttactggcaggtgttggtgtccagatggatcgccttcgcagggctagcatggcggactacctgatcagcggcggcaccggctacgtgcccgaggatgggctcaccgcgcagcagctcttcgccagcgccgacggcctcacctacaacgacttcctgattctcccaggattcatagacttcatagctgatgaggtggacctgacctcagccctgacccggaagatcacgctgaagacgccactgatctcctcccccatggacactgtgacagaggctgacatggccattgccatggctctgatgggaggtattggtttcattcaccacaactgcaccccagagttccaggccaacgaggtgcggaaggtcaagaagtttgaacagggcttcatcacggaccctgtggtgctgagcccctcgcacactgtgggcgatgtgctggaggccaagatgcggcatggcttctctggcatccccatcactgagacgggcaccatgggcagcaagctggtgggcatcgtcacctcccgagacatcgactttcttgctgagaaggaccacaccaccctcctcagtgaggtgatgacgccaaggattgaactggtggtggctccagcaggtgtgacgttgaaagaggcaaatgagatcctgcagcgtagcaagaaagggaagctgcctatcgtcaatgattgcgatgagctggtggccatcatcgcccgcaccgacctgaagaagaaccgagactaccctctggcctccaaggattcccagaagcagctgctctgtggggcagctgtgggcacccgtgaggatgacaaataccgtctggacctgctcacccaggcgggcgtcgacgtcatagtcttggactcgtcccaagggaattcggtgtatcagatcgccatggtgcattacatcaaacagaagtacccccacctccaggtgattggggggaacgtggtgacagcagcccaggccaagaacctgattgatgctggtgtggacgggctgcgcgtgggcatgggctgcggctccatctgcatcacccaggaagtgatggcctgtggtcggccccagggcactgctgtgtacaaggtggctgagtatgcccggcgctttggtgtgcccatcatagccgatggcggcatccagaccgtgggacacgtggtcaaggccctggcccttggagcctccacagtgatgatgggctccctgctggccgccactacggaggcccctggcgagtacttcttctcagacggggtgcggctcaagaagtaccggggcatgggctcactggatgccatggagaagagcagcagcagccagaaacgatacttcagcgagggggataaagtgaagatcgcgcagggtgtctcgggctccatccaggacaaaggatccattcagaagttcgtgccctacctcatagcaggcatccaacacggctgccaggatatcggggcccgcagcctgtctgtccttcggtccatgatgtactcaggagagctcaagtttgagaagcggaccatgtcggcccagattgagggtggtgtccatggcctgcactcttacgaaaagcggctgtactgaggacagcggtggaggccgaggtggtggaggggatgcaccccagtgtccacttttgggcacagcctccctccataactgagtggtccacagatttgcactacgggttctccagctcctttccaggcagagaggaggggaggtcctgaggggactgctgcccctcactcggcatcccctgcagagtcaggactgctcccggggccaggctgccctgggagcccccctccgagcccagccagccaggctctcaggccctgcgcctgcctcaggtctttcttgctgcagcctgctccagcctggcccccaccccaggggcaggcggcccctcctggcttctcctgtagggcacctccctgcccctagcctcccaggaaatggtgctctcctggccctgcctctggcccttcccgggccgctgcccctcagccatgtggcacttctgagctcctgacctaggccaaggggaggtctctgcccccttccccggccctgggctacccttgggtcctgctcctcaggccgctcccctgtccctggccatgggtaggagactgccctggtcatggccgcctgcctgtcattcctgactcaccaccgtccccaggtgaaccattcctcccttctcctcagctgcagtcgaaggctttaactttgcacacttgggatcacagttgcgtcattgtgtattaaatacttggaataaatcaagcaggt

SEQ ID NO: 2403 - DNA, 530 bp, Homo sapiens
tttccagccccagccccggaccctgcagccgcagagatgttgacgcctaagaagaaccggattgccatttatgaactcctttttaaggaggatggtcatggtggccaagaaggatgtccacatgcctaagcacccagagctggcagacaagaatgtgcccaaccttcatgtcatgaaggccatgcagtctctcaagtcccgaggctacgtgaaggaacactttgcctggagacatttctactggtaccttaccaatgagggtatccagtatctccgtgattaccttcatctgcccccggagattgtgcctgccaccctaccccgtagccgtccagagactggcagaccttggcctaaaggtctgtatgtgaggagtgctgtgctacctggtgccgacaagaaagccgaggctggggctgggtcagcaaccgaattctagtttagaggcggatttggtcgtggacgtggtcagccacctcagtaaaactggagaggattcttttgcattgaataaacttacagccaaaaaa

SEQ ID NO: 2404 - DNA, 2070 bp, Homo sapiens
tgggattacaggtaagtgccaccacacccagctgatttttgtgttttttgtagagacgaggtttcgccatgtttcccagactgttctcaaactcctgagctcaaagcagtccacccaccttggcctcccaaagtgctgggattacaggtgtgagccaccttgctcattctagtttaaactttggagtggtttgtgtctcctgattggactcctgcaaatacagaattgatgctaggaagggtaccaggagatagacgcacacagatgggatttgggaataggtttggttatccaaggagcagtgctgagctccttgctaatgggatatgggatgctggtgatttccagtaagtgacctcaaaattactcaggctaccacatactgttgattgtgatgaaatgccagttgaagcacctgtcctgcgagcttaggggtgctacaagttgaccactgcagcagtaaagatgactctgaagaatggcatgggatggatcctttcgaatgcacttgagcagcggtctccaaccacagggccacagagctggagctggatctaccatgaaagacctctgaatccaggaagagagactgactgagcaacatgttattcaggtgggaccatccagttgcaggaaaacaagcttaagacgcccactgattctacattatgctcctacctcccggcagcctctccaggcccagaactttctccaatcagcctctacagaccaagctcatgactcacaatggcctatttaggcccataccctacgtcacggcagtctccgcagatgagcctactgccccacaacagcctccacaggcacagctccatcgttacaatggcctctttagacccagctcctgcctcccagccttctctccaggccctgaactttctcaagtcgacctcaccaggcccagctcatgcttctttgcagcctctccaggcccagctcctgcatcttggtggcccctccaggcccagcctctgcctcccgtcggcctctacagtcccaacatctgcctcacagcagattcttcacgcccagcatctgcctcactgtggaccccccaagccaagctcccaacctttcagcagcttctacacacccagctcctgccacccagtggcctctttaggccaagctcatgcttcacaagggcctttccaggcccaacttttgtctcatggcaaccttccctggccagattcctgcctgtctcccagcagcctagacaggcccagggcctctctacatgcagcttatgcctcacggtggcctctccaggcccaactcctgtcccaggacgtcatctccgggcccaaaacttactcaagtcagactctgtagtcccaactgctgcctcctggtggcctatgaaggcccaaaatctcctcaagttgacctttccaggcccagctcctgcctcctgtcagcgtctacaggcccaacctctacgtcatgggggcttctccaggcccacctcttcctcttggctgggtctacaggcacaactgctgcctcacaacagccttttttggcccagttcctgtccagctcatggcggccaatgtaggcccaaaacttcctcaagtcaaactctccaggcccaccttctgcttcccagtggcatgaacaggcccagctttgacttgagaacagcctctgcaggccctgctcttgcctcccaggggctttttccaggcccagctcttgcctcatggcagctgccccaggccaaatttctgcctgcctgccagcagcctcaacaggcatagctcctccctcacagtggcccatttaggcccaactcatgactgtcgggccatttccaggcctagtgcctgcctcgtggctgactcttgaagcccaaaacttcctcaaatcagccttttgcccaacttctgtctactgtcggactctacaggccagcctctgcctcacagtggaccctccagacccagatggtgtctcactgtggcatcctcagtcgaagctcctgcctttcggcagcctctccaggcccagctcctcctgcctcccagtggcctctttcggcccagc

SEQ ID NO: 2405 - protein, 371 aa, Homo sapiens
MLLPPGSLSRPRTFSNQPLQTKLMTHNGLFRPIPYVTAVSADEPTAPQQPPQAQLHRYNGLFRPSSCLPAFSPGPELSQVDLTRPSSCFFAASPGPAPASWWPLQAQPLPPVGLYSPNICLTADSSRPASASLWTPQAKLPTFQQLLHTQLLPPSGLFRPSSCFTRAFPGPTFVSWQPSLARFLPVSQQPRQAQGLSTCSLCLTVASPGPTPVPGRHLRAQNLLKSDSVVPTAASWWPMKAQNLLKLTFPGPAPASCQRLQAQPLRHGGFSRPTSSSWLGLQAQLLPHNSLFWPSSCPAHGGQCRPKTSSSQTLQAHLLLPSGMNRPSFDLRTASAGPALASQGLFPGPALASWQLPQAKFLPACQQPQQA

SEQ ID NO: 2406 - DNA, 841 bp, Homo sapiens
tctaatacctattgatctgtcactttctcccatcacgctcaggtgggaccatccagttgcaggaaaacaagcttaagacgcccactgattctacattatggtgagttctataattattttattatatattacagtgtaataatggaaataaagtgcctaataaatgcaaatgtgcttacatcttttggcccagctcctacctcccggcagcctctccaggcccagaactttctccaatcagcctctacagaccaagctcatgactcacaatggcctatttaggcccataccctacgtcacggcagtctccgcagatgagcctactgccccacaacagcctccacaggcacagctccatcgttacaatggcctctttagacccagctcctgcctcccagccttctctccaggccctgaactttctcaagtcgacctcaccaggcccagctcatgcttctttgcagcctctccaggcccagctcctgcatcttggtggcccctccaggcccagcctctgcctcccgtcggcctctacagtcccaacatctgcctcacagcagattcttcacgcccagcatctgcctcacttggaccctccagacccagatggtgtctcactgtggcatcctcagtcgaagctcctgcctttcggcagcctctccaggcccagctcctcctgcctcccagtggcctctttcggcccagcccagctcatgcctcccggcggccttcccaagccccgcttttgactttcggtggcctctgcaggcctcgacaaggcccagcctcctgcctcccgaaggcctgcacaggcccagcctctgcctcacagcggactctc

SEQ ID NO: 2407 - DNA, 8975 bp, Homo sapiens
agcccaaaccgcggccctagccccggccgcacccccagcccgcgccagcatgatgaacaacagcggctactcagacgccggcctcggcctgggcgatgagacagacgagatgccgtccacggagaaggacctggcggaggacgcgccgtggaagaagatccagcagaacacattcacgcgctggtgcaatgagcacctcaagtgcgtgggcaagcgcctgaccgacctgcagcgcgacctcagcgacgggctccggctcatcgcgctgctcgaggtgctcagccagaagcgcatgtaccgcaagttccatccgcgccccaacttccgccaaatgaagctggagaacgtgtccgtggccctcgagttcctcgagcgcgagcacatcaagctcgtgtccatagacagcaaggccatcgtggatgggaacctgaagctgatcctgggcctgatctggacgctgatcctgcactactccatctccatgcccatgtgggaggatgaagatgatgaggatgcccgcaaacagacgcccaagcagcggctgcttggctggatccagaacaaggtgccccagctgcccatcaccaacttcaaccgtgactggcaggacggcaaagctctgggcgccctggtggacaactgcgcccccggtctctgccccgactgggaggcctgggaccccaaccagcccgtggagaacgcccgggaggccatgcagcaggccgacgactggcttggggtgccccaggtcattgcccctgaggagattgtggaccccaacgtggatgagcattctgttatgacctacctgtcccagttccccaaggccaagctcaaacctggtgcccctgttcgatccaagcagctgaaccccaagaaagccatcgcctatgggcctggcatcgagccacagggcaacaccgtgctgcagcctgcccacttcaccgtgcagacggtggacgcgggcgtgggcgaggtgctggtctacatcgaggaccctgaaggccacaccgaggaggctaaggtggttcccaacaatgacaaggatcgcacctatgctgtctcctatgtgcccaaggtcgctgggttacacaaggtgaccgtgctctttgctggccagaacattgaacgcagtccctttgaggtgaacgtgggcatggccctgggagatgccaacaaggtgtcagcccgtggccctggcctggaacctgtgggcaatgtggccaacaaacccacctactttgacatctacactgcgggggccggcactggcgatgttgctgtggtgatcgtggacccacagggccggcgggacacagtggaggtggccctggaggacaagggtgacagcacgttccgctgcacatacagacctgccatggaggggccacataccgtgcatgtggcctttgcgggtgcccccatcacccgcagtcccttccctgtccatgtgtcggaagcctgtaaccccaacgcctgccgcgcctctgggcgaggcctgcagcccaagggtgttcgcgtgaaagaggtggctgacttcaaggtgtttaccaagggtgccggcagcggggagctcaaggtcacggtcaaggggccaaagggcacagaggagccagtgaaggtgcgggaggctggggatggtgtgttcgagtgcgagtactacccggtggtgcctgggaagtatgtggtgaccatcacgtggggcggctacgccatccctcgcagcccctttgaggtacaggtgagcccagaggcaggagtgcaaaaggtccgggcctggggtcctggtttggagactggccaggtgggcaagtcagccgattttgtggtggaagccattggcaccgaggtggggacactgggcttctccatcgaggggccctcacaagccaagatcgaatgtgacgacaagggggatggctcctgcgatgtgcggtactggcccacggagcctggggagtacgctgtgcacgtcatctgtgacgatgaggacatccgagactcacccttcattgcccacatcctgcccgccccacctgactgcttcccagataaggtgaaggcctttgggcctggcctggagcctaccggctgcatcgtggacaagcccgctgagttcaccattgatgctcgtgcagctggcaagggagacctgaagctctatgcccaggacgccgacggctgtcccatcgacatcaaggtgatccccaacggcgacggcaccttccgctgctcctacgtgcccaccaagcccattaagcacaccatcatcatctcctggggaggcgtaaacgtgcccaagagccccttccgggtgaacgtgggcgagggcagccaccccgagcgggtaaaggtgtacggccccggagtggagaagacaggcctcaaggccaatgagcccacctacttcacggtggactgcagcgaggcggggcaaggcgacgtgagcatcggcatcaagtgcgccccaggcgtggtgggccctgcagaggctgacattgacttcgacatcatcaagaatgacaacgacaccttcaccgtcaagtacacgccaccaggggcgggccgctacaccatcatggtgctgtttgccaaccaggagatccccgccagccccttccacatcaaggtggacccatcccacgatgccagcaaagtcaaggccgagggccctgggctgaatcgcacaggtgtggaagtcgggaagcccacccacttcacggtgctgaccaagggagccggcaaggccaagctggatgtgcagtttgcagggacagccaagggcgaggttgtgcgggactttgagatcatagacaaccatgactactcctacactgtcaagtacaccgctgtccagcagggcaacatggcagtgacagtgacttatggcggggaccctgtccccaagagcccctttgtggtgaatgtggcacccccgctggacctcagcaaaatcaaagttcagggccttaatagcaaggtggctgtgggacaggaacaagcattctctgtgaacacacgaggggctggcggtcagggccaactggatgtgcggatgacttcgccctctcgccggcccatcccctgcaagctggagccaggcggtggagcggaagcccaggctgtgcgctacatgcccccggaggaggggccctacaaggtggatatcacctacgatggtcacccggtgcctggcagcccgtttgctgtggagggtgtcctgccccctgatccctccaaggtctgtgcttatggcccgggtctcaagggtggactggtaggcacccccgcgccattctccatcgacaccaagggggctggcacaggtggcctggggctgaccgtagagggcccctgcgaggccaagatcgagtgccaggacaatggtgatggctcatgtgctgtcagctacctgcccacggagcctggcgagtacaccatcaacatcctgtttgctgaggcccacatccctggctcgcccttcaaagccaccattcggcctgtgtttgacccgagcaaggtgcgggccagtggaccgggcctggagcgcggcaaggtcggtgaggcagccaccttcactgtggactgctcagaggcaggcgaggcggagctgaccattgagatcctgtcggatgccggggtcaaggccgaggtgctgatccacaacaacgcggatggcacctaccacatcacctacagccctgccttccctggcacctacaccattaccatcaagtatggcgggcatcccgtgcccaaattccccacccgtgtccatgtgcagcctgcggtcgataccagtggcgtcaaggtctcagggcctggtgttgagccacacggtgtcctgcgggaggtgaccactgagttcactgtggatgcaagatccctaacagccacaggcggcaaccacgtgacggctcgtgtgctcaacccctcgggggccaagacagacacctatgtgacagacaatggggacggcacctaccgagtgcagtacaccgcctacgaggagggcgtgcatctggtggaggtcctgtatgatgaggtcgctgtgcccaagagccccttccgagtgggcgtgaccgagggctgtgatcccacccgcgtccgagccttcgggccaggcctggagggtggcttggtcaacaaggccaaccgattcactgtggagaccaggggagcgggcaccgggggccttggcctagccatcgagggtccctcggaagccaagatgtcctgcaaggacaacaaggatggtagctgcaccgtggagtacatccccttcactcctggagactatgacgtcaacatcaccttcggggggcggcccatcccagggagcccgttccgcgtgccagtgaaggatgtggtggaccctgggaaggtgaagtgctcagggccagggctgggggctggtgtcagggcccgggttcctcagaccttcacagtggattgcagtcaagctggccgggcgcccctgcaggtggctgtgctgggccccacaggtgtggccgagcctgtggaggtgcgggacaatggagatggcacccacactgtccactacaccccagccactgacgggccctacacggtagccgtcaagtatgctgaccaggaggtgccacgcagccccttcaagatcaaggtcctcccagctcatgatgccagcaaggtgcgggccagcggcccaggcctcaacgcctctggcatccctgccagcctgcctgtggagttcaccatcgacgcacgggacgcgggcgaggggttgctcactgtccagatcttggaccccgagggtaagcccaagaaggccaacatccgggacaatggggatggcacgtacactgtgtcctacctgccggacatgagtggccggtacaccatcaccatcaagtatggcggtgatgagatcccctactcgcccttccgcatccatgctctgcccactggggatgccagcaagtgcctcgtcacagtgtccattggaggccatggcctgggtgcctgcctgggccctcgaatccagattgggcaggagacggtgatcacggtggatgccaaggcagccggtgaggggaaggtgacatgcacggtgtccacgccggatggggcagagctcgatgtggatgtggttgagaaccatgacggtacctttgacatctactacacagcgcccgagccgggcaagtacgtcatcaccatccgcttcgggggtgagcacatccccaacagccccttccacgtgctggcgtgtgaccccctgccgcacgaggaggagccctctgaagtgccacagctgcgccagccctacgctcctccccggcccggcgcccgccccacacactgggccacagaggagccagtggtgcctgtggagccaatggagtccatgctgaggcccttcaacctggtcatccccttcgcggtgcagaaaggggagctcacaggagaggtgcggatgccctcggggaagacggcacggcccaacatcaccgacaacaaggacggcaccatcacggtgaggtatgcacccactgagaaaggcctgcaccagatggggatcaagtatgacggcaaccacatccctgggagccccttacagttctatgtggatgccatcaacagccgccatgtcagtgcctatgggccaggcctgagccatggcatggtcaacaagccagccaccttcactattgtcaccaaagatgctggagaagggggtctgtcactggccgtggagggcccatccaaggcagagatcacctgtaaggacaacaaggatggcacctgcaccgtgtcctatctgccgactgcgcctggagactacagcatcatcgtgcgcttcgatgacaagcacatcccggggagccccttcacagccaagatcacaggtgatgactccatgaggacctcacagctgaatgtgggcacctccacggacgtgtcactgaagatcaccgagagtgatctgagccagctgaccgccagcatccgtgccccctcgggcaacgaggagccctgcctgctgaagcgcctgcccaaccggcacattgggatctccttcacccccaaggaggtcggggagcacgtggtgagcgtgcgcaagagtggcaagcatgtcaccaacagccccttcaagatcctggtggggccatctgagatcggggacgccagcaaggtgcgggtctggggcaaggggctttccgagggacacacattccaggtggcagagttcatcgtggacactcgcaatgcaggttatgggggcttggggctgagtattgaaggcccaagcaaggtggacatcaactgtgaggacatggaggacgggacatgcaaagtcacctactgccccaccgagcccggcacctacatcatcaacatcaagtttgctgacaagcacgtgcctggaagccccttcactgtgaaggtgaccggcgagggccgcatgaaggagagcatcacccggcggagacaggcaccttccatcgccaccatcggcagcacctgtgacctcaacctcaagatcccaggaaactggttccagatggtgtctgcccaggagcgcctgacacgcaccttcacacgcagcagccacacctacacccgcacggagcgcacggagatcagcaagacgcggggcggggagacaaagcgcgaggtgcgggtggaggagtccacccaggtcggcggggaccccttccctgctgtgtttggggacttcctgggccgggagcgcctgggatccttcggcagcatcacccggcagcaggagggtgaggccagctctcaggacatgactgcacaggtgaccagcccatcgggcaaggtggaagccgcagagatcgtcgagggcgaggacagcgcctacagcgtgcgctttgtgccccaggaaatggggccccatacggtcgctgtcaagtaccgtggccagcacgtgcccggcagcccctttcagttcactgtggggccgctgggtgaaggtggtgcccacaaggtgcgggccggaggcacagggctggagcgaggtgtggccggcgtgccagccgagttcagcatctggacccgggaggctggcgctgggggcctgtccattgctgtggagggtcctagcaaagcggagattgcatttgaggatcgcaaagatggctcctgcggcgtctcctatgtcgtccaggaaccaggtgactatgaggtctccatcaagttcaatgatgagcacatcccagacagcccctttgtggtgcctgtggcctccctctcggatgacgctcgccgtctcactgtcaccagcctccaggagacggggctcaaggtgaaccagccagcgtcctttgccgtgcagctgaacggtgcccggggcgtgattgatgcccgggtgcacacaccctcgggggctgtggaggagtgctacgtctctgagctggacagtgacaagcacaccatccgcttcatcccccacgagaatggcgtccactccatcgatgtcaagttcaacggtgcccacatccctggaagtcccttcaagatccgcgttggggagcagagccaggctggggacccaggcttggtgtcagcctacggtcctgggctcgagggaggcactaccggtgtgtcatcagagttcatcgtgaacaccctgaatgccggctcgggggccttgtctgtcaccattgatggcccctccaaggtgcagctggactgtcgggagtgtcctgagggccatgtggtcacttatactcccatggcccctggcaactacctcattgccatcaagtacggtggcccccagcacatcgtgggcagccccttcaaggccaaggtcactggtccgaggctgtccggaggccacagccttcacgaaacatccacggttctggtggagactgtgaccaagtcctcctcaagccggggctccagctacagctccatccccaagttctcctcagatgccagcaaggtggtgactcggggccctgggctgtcccaggccttcgtgggccagaagaactccttcaccgtggactgcagcaaagcaggcaccaacatgatgatggtgggcgtgcacggccccaagaccccctgtgaggaggtgtacgtgaagcacatggggaaccgggtgtacaatgtcacctacactgtcaaggagaaaggggactacatcctcattgtcaagtggggtgacgaaagtgtccctggaagccccttcaaagtcaaggtcccttgaatcccaaaagtgcctccccagcctcagcccccacctccagccacacacacattacacacacacacacacacacacaaatgtgccacacccagacacgcacagaatcagacactacaaacacctgccttgggggtgaagtgaaggcccagcctccccaccccaccgcgccccaggggttggaggaccttgtctgtgtcaggacagtgtccctccctgggaatgtgacatgagggccgactggggccaggctcaggggcagaggctgggacacaaggggctggcgagggctgcgaggccagggaagccctgagtttctggcggggctgagcagtgggggagcattgtgttgtgggtgtctgtgtgtgaggtcaccctcaaactgcaccgccggccagataccctcctgaccccgaggacttggtctggtctctctggtggctacaaccccagagttttaaggacttggaaaggaaagcacaatcagagaagaaaacagcccccgaaccagcaggagtggcctggcacatggaccggcctgagcgatgtgcactccacccaagccaggctcccagggggcctgatttctctctcactgtctctttttttaaaatggttgcacggctctgccccatggggggccttttttacacactgcgaggcccagctttctaggggacttttgcacatgtcatgcagctcagctgggagctgcttaggtggaaaactccaaataaagtgcggctgtcgc

SEQ ID NO: 2408 - protein, 208 aa, Homo sapiens
MAPGNYLIAIKYGGPQHIVGSPFKAKVTGPRLSGGHSLHETSTVLVETVTKSSSSRGSSYNSIPKFSSDASKVVTRGPGLSQAFVGQKNSFTVDCSKAGTNMMMVGVHGPKTPCEEVYVKHMGNRVYNVTYTVKEKGTTSLSSSGVTKVSLEAPSKSRSLESQKCLPSLSPHLQPNTHYIHTHTHTNVPHPDTHTQNQTLQTPALGVK

SEQ ID NO: 2409 - DNA, 5064 bp, Homo sapiens
ggaggcggggccgaccaagagcaggagctggagtctgagccggtggttgcagcggaggcggtgatgtcggtgcaggttgtgtcagccgcggctgccgccaaggtgcctgaggtggagctgaaggacctgagcccctccgaggcggagtcgcaactaggactgagcacggccgccgtgggcgccatggcccccccggcgggcggtggagaccctgaggctccagctcccgccgcggagcggcccccggtccccggcccgggctcggggcccgccgccgctctcagccccgccgccgggaaggtgcctcaggcgtcggccatgaagcggagcgacccacatcaccagcaccagcggcaccgcgacggcggcgaggccctggtcagccccgacggcaccgtcaccgaggcgccgcgcacagtcaagaagcagatccagtttgctgaccagaagcaagaattcaacaaacgtcccaccaaaattggacgtcgctctttgtctcgttccatttctcagtcatctactgacagctacagctcagcggcttcatatacagatagctctgatgatgagacatcgcccagggacaagcagcaaaagaactctaagggaagcagtgacttctgtgttaagaacatcaaacaggcagagtttggacgaagagaaattgaaattgctgaacaagaaatgcctgcattgatggctttgaggaagagagctcaaggagaaaagcctttggctggagccaaaatcgtgggttgcacacacatcactgctcagactgctgtgcttatggaaactctgggtgctctgggggcccagtgccgatgggctgcctgcaacatctattccactctcaatgaagtggctgctgctctagcagaaagtggatttcctgtttttgcctggaagggagagtcagaagatgacttttggtggtgtatcgatagatgtgtgaatgtggagggctggcagccaaacatgatcttggatgatggaggggatcttacccactggatttataaaaagtatcccaacatgtttaagaaaatcaagggcatagtagaggagagtgttactggagttcacaggctgtaccaactgtccaaagctgggaagctgtgtgttccagccatgaatgtcaatgactcagtcaccaaacagaaatttgacaacctctactgttgccgtgaatcaattcttgatggacttaaaaggacaacagacatgatgtttggtggaaagcaagtggtagtctgtggctatggagaggtggggaaagggtgctgtgctgccctgaaagccatgggctccattgtgtatgtaactgaaattgaccccatctgtgccctgcaagcctgtatggatggatttcgactggtgaaattaaatgaggtcatccgacaagtggacattgttattacctgtacaggtaacaagaatgtggtaaccagagagcacttggaccgtatgaagaatagctgcatcgtttgtaacatgggacattccaacacagagattgacgtggcgagtctgcggacaccagaactgacctgggagcgagtgagatctcaagttgaccatgtgatatggcctgatggcaagaggatagtactgctggcagagggccgcctgctgaaccttagctgctccacagtgcctacatttgtgctctcaatcactgctactactcaggctcttgccttgatagagctttacaatgctcctgagggtcgctataagcaggatgtctacctgttgcccaagaagatggatgagtatgtggccagcctacacctgcctacctttgatgcccacttgacagagctgacagatgaacaggccaagtatctgggactcaacaagaatgggcccttcaagcctaattactacaggtattaagttcctgtaactcaaaccagaatttttaaggaatagaactccaagccttttctccactactatacaagaaagaattcagcaagctgcttctccaatcaaagctgcctgccgtgctcaccctgtgtgttaggttatttatttattaaaatcaagaatcctgtgcctgtagtgttggcccagagtgtggttactgccctgagggccatgaaagccacagaggatgggctgaggaaggaaagaaatggggttactgctcccagtgcatcatttgcatcattccccattgactgaatcctcagcagtggccgtttttcctcttgtccaggctcacgagttagtccagggattccatactccctattccctggagttttctggaataaattttcagcacctgcttttctcagcttggcccttccccgggtgaggccgtttggaattaacatggccagtgtttcacacaagattgggttcccaatcttgaccatcactatcactgccttctttatataaaggctaataaggaaggagtgttatttatggctttgccaagctacatcaagaactcagctgtgctgtgcctaccaggggtctcctttcttacccaggactcctttcttctccttgaatatttatgtccattttaacacttcctggttgcaagagggatgtgcctccattatttcctccacagttttggtatttgtcagacatttgttctgctgtctttctaatccagccaacgtctgctcaggaagtggggccagctccactgggacccatagttttacttccttgtcatttgattggatagtttccaaggaagcccctccagattggcactatctcagaaaaggagagcttgttgtgaaacactgcttcctgaaacttcctgctattgcctaaagctacgtctgaaactgagtagggaaaggcatacttttccagggacttagggggataggctttggaaatgggacaggtctttcagactcacagcttgataccctaacaaagcagagtatatttatttgtttcccaggaaggccattgcagtttgactggctgagggatacagagatgaaattgtaaactgtatccagattatcaaagctaatttgactagtttgaacctcgtcagacattcattcctttggccattgccatggatgaaaccgagatctgcagtctgatctgtggacttctctgctggcatatcttttatgatttaacctcttccatttgatgattctgtatttcagagtcagtttcttgagtaactccagtgctacaaaaagaattagtaatgtggtgtgggcagcgtgacattttatgtcccacccaaaaattggattccttttggagactgatctgttggtctcaggcatttcattaggaccagattggttctaagagttagtctggactggccctaggaaacttgaattaaataagcctcttccccttaccgatcctttttaacactctcaggtttgtttgtttcccacttttttcctatgctggtctgcctcaaagtctcaagaccaaggtgactcaagataacaccagaccacgcatgatcaccaaaaccttcccatcctgattctcttcttctacctctaccctctccaacttctcctggtcttcacatatactctcaaagctagtctgaaagtgaccttactttcggaagtagggaagtggaactttggtaaatgactgtttgcctcatttaatagtatacaggctcagcccatagactacagttcttcagaggccatatgtctcagcaagtactggttatattctttttttgtaaggaagatcataaatgctaaaaattccactaagccattcagttcttccttttgcctacctagtcctgatttttgtattaattggttccctttagcaagggattcagatctttgtaccttatcttatatccagagcagattccatttggcagatagatggtctctagcctattgtattcttagaccaaaaatcataacctgctgtttctcagcaaagccttgctctctggagcttactatgtgctggtacttaaagagtacattctgccttgctgtagtgaagagacccactccaaataaaaaaggggccacacggggcttctaagttaggttgccagtgttgctgcccatgatgagttatttgcctctgagtttcagatgacctctctgtagggacactgtgttatcaaccattaagaagaaagaaccacaagcctcccaagtatttgggttctatcttagggttgaaatctggtcattattccctctacccttggaatcagagcaatgtgtcttctttcctccaacctcttaccttagatgcatcctggttatctggaagcatgggaaagaaggctacttatctctttgtatgtggctccagtctgtgaggatacataacattttctctacaatgaatctgtgctaatattttgccttctttctttcttttcttttcacccttagagacagggtttcactatgttgcccaggctggtctcaaactcctgggctcaagcaatcctcctgcctcagcttcctgagtagctggaaccacaggtgtgtgctaccgtgcctggcacttttttgccttcttaatggagatattcagttttctttttttcatttaaacaaagaaaaaaaatgtatctactctaccttccctctgctctcctccctccctatcctacttgcccatatgagcacggctccccatggccacatactcctgcaaagcttttatgctgcttcgcttttctctaaacagatctgatattgctgctcctgtggttttctcaaaattaactttgccgtggtttttaaaaaggaatcaaaatgcattgttgcattaagctttttcaataaaggaaaattacggaaggaaaataggcaacaccagcaaattatatgtggacaggttctaaactctatatatacatatatatatatatatctatatatctatatacgtaatcatctagttctgtcatcttactgaaaggaataacacttctaaagatcaccatttctgagaagttcttggaaatctttatgtctaagtgattgtattagatcagcaataatgactatgtaatctcaaaaaacaaataaaatattcttaacatgg

SEQ ID NO: 2410 - protein, 611 aa, Homo sapiens
MSVQVVSAAAAAKVPEVELKDLSPSEAESQLGLSTAAVGAMAPPAGGGDPEAPAPAAERPPVPGPGSGPAAALSPAAGKVPQASAMKRSDPHHQHQRHRDGGEALVSPDGTVTEAPRTVKKQIQFADQKQEFNKRPTKIGRRSLSRSISQSSTDSYSSAASYTDSSDDETSPRDKQQKNSKGSSDFCVKNIKQAEFGRREIEIAEQEMPALMALRKRAQGEKPLAGAKIVGCTHITAQTAVLMETLGALGAQCRWAACNIYSTLNEVAAALAESGFPVFAWKGESEDDFWWCIDRCVNVEGWQPNMILDDGGDLTHWIYKKYPNMFKKIKGIVEESVTGVHRLYQLSKAGKLCVPAMNVNDSVTKQKFDNLYCCRESILDGLKRTTDMMFGGKQVVVCGYGEVGKGCCAALKAMGSIVYVTEIDPICALQACMDGFRLVKLNEVIRQVDIVITCTGNKNVVTREHLDRMKNSCIVCNMGHSNTEIDVASLRTPELTWERVRSQVDHVIWPDGKRIVLLAEGRLLNLSCSTVPTFVLSITATTQALALIELYNAPEGRYKQDVYLLPKKMDEYVASLHLPTFDAHLTELTDEQAKYLGLNKNGPFKPNYYRY

SEQ ID NO: 2411 - DNA, 3016 bp, Homo sapiens
agttcctggtccagaactttacacagaaaaggtgctcaaaggatatttgtttaatgaatgtggtatgctgacatttaaacaggacaaaacttgtagaacttcatggaggaacacggagtgacccaaaccgaacatatggctaccatagaagcacatgcagtggcccagcaagtgcagcaggtccatgtggctacttacaccgagcatagtatgctgagtgctgatgaagactcgccttcttctcccgaggacacctcttacgatgactcagatatactcaactccacagcagctgatgaggtgacagctcatctggcagctgcaggtcctgtgggaatggccgctgctgctgctgtggcaacaggaaagaaacggaaacggcctcatgtatttgagtctaatccatctatccggaagaggcaacaaacacgtttgcttcggaaacttcgagccacgttagatgaatatactactcgtgtgggacagcaagctattgtcctctgtatctcaccctccaaacctaaccctgtctttaaagtgtttggtgcagcacctttggagaatgtggtgcgtaagtacaagagcatgatcctggaagacctggagtctgctctggcagaacacgcccctgcgccacaggaggttaactcagaactgccgcctctcaccatcgacggaattccagtctctgtggacaaaatgacccaggcccagcttcgggcatttatcccagagatgctcaagtactctacaggtcggggaaaaccaggctgggggaaagaaagctgcaagcccatctggtggcctgaagatatcccctgggcaaatgtccggagtgatgtccgcacagaagagcaaaagcagagggtttcatggacccaggcactacggaccatagttaaaaactgttataaacagcatgggcgggaagaccttttgtatgcctttgaagatcagcaaacgcaaacacaggccacagccacacatagtatagctcatcttgtaccatcacagactgtagtccagacttttagtaaccctgatggcactgtctcacttatccaggttggtacgggggcaacagtagccacattggctgatgcttcagaattgccaaccacggtcaccgttgcccaagtgaattattctgccgtggctgatggagaggtggaacaaaattgggccacgttacagggaggtgagatgaccatccagacgacgcaagcatcagaggccacccaggcggtggcatcgttggcagaggccgcagtggcagcttctcaggagatgcagcagggagctacagtcactatggcgcttaacagcgaagctgccgcccatgctgtcgccaccctggctgaggccaccttacaaggtgggggacagatcgtcttgtctggggaaaccgcagcagccgtcggagcacttactggagtccaagatgctaatggcctctttatggcagatcgtgcaggtcgcaagtggatcctgactgacaaagccacaggcctggtccagatccctgtgagcatgtaccagactgtggtgaccagcctcgcccagggcaacggaccagtgcaggtggccatggcccctgtgaccaccaggatatcagacagcgcagtcaccatggacggccaagctgtggaggtggtgacattggaacagtgacatacagccatattatggcatcgttttctagtctacttcaaaattttttacacgtttgcagaggtgcaatcaaatggaattaagtctctcgactttggaaggaaagttttgttaacctttttttttttaaaaggaagaaagcggattttggaattgcattttttaaagcaccactcttgattttctgggattggtgaagaaactgcattgtcaatttcactgtcccaaaaaagccaaattgtggcaggacttctttctgcggaaatgtgtgtgtatacttatgtgtgtgtatgtgtgagtgtgaatatatgtatatgtgtacatatggacatacacatttacatatatataaagtatatatatacatatatatatatatatatgtatgaaacccgcatggaattatctgtatgaaatcaaggtgcgctgtggaaacaataattcacccagtttagtgggtggtagggtacgtggccagacacagtcacccagtttttgttcataccagggtcatgcgttgagctactgacaaactcaggcggaggtgaccatgcccttcaccaaagctgcctcccagtggccacacagaactctccctgctggactcacctgaggaaagaggctccagcatggggtgggtcagagatgtgcttgcaaggtccagggactgcgtggtctgccagctgagatgctcctcgggctggcccaggtgctgaccttgccacaggcagatgaatgtcttgaaagctcccgggcctcagcctcccatctcctctccttcccaggaatccttgatctcatgactattaaaatgttgctctggttttaaggtcagtcctgaattgctcgtatatatgaactgaaggtaaccgaagtattaggggtttgaggagtgcgtgcgtgtaagtgtgcttgtgtgtgtgcgtgcatggtgggggagaggatgggaagggggcgggggcagtggaagggaaaggaaggaaagaaaaatcgtcctagaccaggatacacccgtgggagcaattttctctactgtctgtagcttcacagaggaggcgctggaatgaacaagaagagacatctggtctgtggccacagcaccctgaacgcccctgatcttgtgtgatcttggaagctaagcttggttgggcccggtcagtacgcggaagggaagaagggacacctggccatagaaaacagctgagggtgtttgctgtgttcctggatcaggccctgcttcagaagggactcctggaggcccatgttccttgatgcaacctcgtggcccaggccgggagcagcttgcctcctcagaggtgttgactatctgggtgttcttggtaac

SEQ ID NO: 2412 - protein, 503 aa, Homo sapiens
MEEHGVTQTEHMATIEAHAVAQQVQQVHVATYTEHSMLSADEDSPSSPEDTSYDDSDILNSTAADEVTAHLAAAGPVGMAAAAAVATGKKRKRPHVFESNPSIRKRQQTRLLRKLRATLDEYTTRVGQQAIVLCISPSKPNPVFKVFGAAPLENVVRKYKSMILEDLESALAEHAPAPQEVNSELPPLTIDGIPVSVDKMTQAQLRAFIPEMLKYSTGRGKPGWGKESCKPIWWPEDIPWANVRSDVRTEEQKQRVSWTQALRTIVKNCYKQHGREDLLYAFEDQQTQTQATATHSIAHLVPSQTVVQTFSNPDGTVSLIQVGTGATVATLADASELPTTVTVAQVNYSAVADGEVEQNWATLQGGEMTIQTTQASEATQAVASLAEAAVAASQEMQQGATVTMALNSEAAAHAVATLAEATLQGGGQIVLSGETAAAVGALTGVQDANGLVQIPVSMYQTVVTSLAQGNGPVQVAMAPVTTRISDSAVTMDGQAVEVVTLEQ

SEQ ID NO: 2413 - DNA, 1972 bp, Homo sapiens
gcctcaagaggcggatattaacctcccaggacggaagttccggagccttcaaactctcggggaagcaactcggcagcggaccaagatggcggcgccctgtgagggacaagcgtttgccgtaggggttgaaaagaattggggtgcagtagttcgctccccagaagggaccccccagaaaatccggcagctgatagatgaggggattgccccggaagagggaggcgtggacgcgaaggacacgtctgccacatcccagtcagttaatggatcaccccaagcggaacaaccttcattggaatctacaagcaaagaagccttctttagcagagtggaaacattttcttctttgaaatgggcaggtaagccctttgagctgtctccactcgtctgtgcaaaatatggctgggtcacagtggaatgtgatatgctcaagtgctctagctgtcaagcttttctctgtgccagtttacaaccagcttttgactttgacagatataagcaacgatgtgctgagctgaagaaagccttgtgtactgcccatgagaagttctgtttctggccagacagcccatccccagaccgatttgggatgttgcccctggatgagcctgctattcttgttagtgaattcctagatcgttttcaaagcctttgtcacttggacctccagcttccttccctaaggccggaggacttgaaaactatgtgcttgacagaagacaagatcagtcttctcctacacttgcttgaagatgaacttgatcaccgaactgatgagagaaaaactacaatcaaattaggctcagacatccaagtccacgtcactgcctgtattctctctgtgtgtggctgggcgtgtagttcctctttggaatccatgcagctctccctgataacatgttcgcaatgtatgaggaaggtggggctctggggcttccagcagattgaatcgtccatgactgacctggatgcatcctttggcctgaccagctccccaatcccaggccttgaggggcgaccagagcgcttacctctggtgcctgaatctcctcggaggatgatgacccggagccaggatgccactttctccccaggctcagagcaggctgaaaagagccctggtcccattgtctctcgaactcggagctgggactcttccagtcctgttgaccgtcctgagccagaggctgctagccccaccaccagaactcgcccagtgacccgaagcatgggaacaggagacacccctggcctggaggtaccatctagccctctgcggaaagccaagcgagctcgcctctgctcctccagcagttcggacacatcttcccgaagcttctttgatcccacctctcagcatagagactggtgcccttgggtgaatatcacacttggcaaagaaagcagggagaatggtggaactgaaccagatgccagcgccccagcagagccaggctggaaagcagtgctgaccatcctcttggcgcacaaacagtctagccagccagctgaaacggactccatgagtctctctgagaaatcaaggaaagtattccgaatatttcggcagtgggaatctctgtgctcatgctgaagatactccagcgccttcctggagatagctggaatgagagtgactttttgaaaaattaaggctgagttcctttcggtcagctgacactaagtttttcctgttctgggttaatcataaggagccccctgccatagcaaaggcagtgagtgtcaactatctgcatctggctgagagagacccgtttcctttcagggatgtggacagggtaagggcagcaagcatggttctgttaaaggagtgtgggattaacagactagaaggaagactaaggacctgaccacccatttcagcatcttcaatgtggagcagtgttctgaggactcttctatcctaggactatgacagtgtgtattaataaaatatttgctaagattctca

SEQ ID NO: 2414 - DNA, 2435 bp, Homo sapiens
ggcgctgacgcctggcagggagaaggcggcagcacatgctgggctcgggggcgatgggcttgtgcgcggacctggcgacgctctagccccgagccgcgtattcgtggccgggtcctccctgggaacagggtgaaggccgagaacctctggcctcaggaagcgcatgcgcaaccggttctccgaaacatggagtcctgtaggcaaggtcttacctgaatcaggatgagggagtggtgggtccaggtggggctgctggccgtgcccctgcttgctgcgtacctgcacatcccaccccctcagctctcccctgcccttcactcatggaagtcttcaggcaagtttttcacttacaagggactgcgtatcttctaccaagactctgtgggtgtggttggaagtccagagatagttgtgcttttacacggttttccaacatccagctacgactggtacaagatttgggaaggtctgaccttgaggtttcatcgggtgattgcccttgatttcttaggctttggcttcagtgacaaaccgagaccacatcactattccatatttgagcaggccagcatcgtggaagcgcttttgcggcatctggggctccagaaccgcaggatcaaccttctttctcatgactatggagatattgttgctcaggagcttctctacaggtacaagcagaatcgatctggtcggcttaccataaagagtctctgtctgtcaaatggaggtatctttcctgagactcaccgtccactccttctccaaaagctactcaaagatggaggtgtgctgtcacccatcctcacacgactgatgaacttctttgtattctctcgaggtctcaccccagtctttgggccgtatactcggccctctgagagtgagctgtgggacatgtgggcagggatccgcaacaatgacgggaacttagtcattgacagtctcttacagtacatcaatcagaggaagaagttcagaaggcgctgggtgggagctcttgcctctgtaactatccccattcattttatctatgggccattggatcctgtaaatccctatccagagtttttggagctgtacaggaaaacgctgccgcggtccacagtgtcgattctggatgaccacattagccactatccacagctagaggatcccatgggcttcttgaatgcatatatgggcttcatcaactccttctgagctggaaagagtagcttccctgtattacctcccctactcccttatgtgttgtgtattccacttaggaagaaatgcccaaaagaggtcctggccatcaaacataattctctcacaaagtccactttactcaaattggtgaacagtgtataggaagaagccagcaggagctctgactaaggttgacataatagtccacctcccattactttgatatctgatcaaatgtatagacttggctttgttttttgtgctattaggaaattctgatgagcattactattcactgatgcagaaagacgttcttttgcataaaagacttttttttaacactttggacttctctgaaatatttagaagtgctaatttctggcccacccccaacaggaattctatagtaaggaggaggagaaggggggctccttccctctcctcgaatgacgttatgggcacatgccttttaaaagttctttaagcaacacagagctgagtcctctttgtcatacctttggatttagtgtttcatcagctgtttttagttataaacattttgttaaaatagatattggtttaaatgatacagtattttaggtatgatttaagactatgatttacctatacattatatatattttataaagatactaaaccagcatacccttactctgccagagtagtgaagctaattaaacacatttggtttctgaataaattgaactaaatccaaactatttcctaaaatcacaggacattaaggaccaatagcatctgtgccagagatgtactgttattagctgggaagaccaattctaacagcaaataacagtctgagactcctcatacctcagtggttagaagcatgtctctcttgagctacagtagaggggaagggattgttgtgtagtcaagtcaccatgctgaatgtacactgattcctttatgatgactgcttaactccccactgcctgtcccagagaggctttccaatgtagctcagtaattcctgttactttacagacaggaaagttccagaaactttaagaacaaactctgaaagacctatgagcaaatggtgctgaatactttttttttaaagccacatttcattgtcttagtcaaagcaggattattaagtgattatttaaaattcgtttttttaaattagcaacttcaagtataacaactttgaaactggaataagtgtttattttctattaataaaaatgaattgtgac

SEQ ID NO: 2415 - protein, 326 aa, Homo sapiens
MREWWVQVGLLAVPLLAAYLHIPPPQLSPALHSWKSSGKFFTYKGLRIFYQDSVGVVGSPEIVVLLHGFPTSSYDWYKIWEGLTLRFHRVIALDFLGFGFSDKPRPHHYSIFEQASIVEALLRHLGLQNRRINLLSHDYGDIVAQELLYRYKQNRSGRLTIKSLCLSNGGIFPETHRPLLLQKLLKDGGVLSPILTRLMNFFVFSRGLTPVFGPYTRPSESELWDMWAGIRNNDGNLVIDSLLQYINQRKKFRRRWVGALASVTIPIHFIYGPLDPVNPYPEFLELYRKTLPRSTVSILDDHISHYPQLEDPMGFLNAYMGFINSF

SEQ ID NO: 2416 - DNA, 2634 bp, Homo sapiens
tgcttgtacctagaagggagacgaggaaacacacatgtagctgagcaaacttaaaccagtgcaccgctgaaaacgagagaaaaaggatacaaacagtccagaaacaatgtactttcctagcatcataagctgaagtctgaagctccactgacctgtagagaagctcctgagcaacaatatctccatagtcatgagaaagaaggttgatcctgcggttctggagccccagatgccgcaaaagcgcttccacgatgctggcctgctcaaatatggaatagtgatgtggtctctgaggaaaggaaagcccacatacacaggatgaagtcatgaggacagctctctctgccagcctgaccctcatagtctgcgtctgcccccacaccccatcaccagccccacataggtgctgcttaccggtttgtcactgaagccaaagcctaagaaatcaagggcaatcacccgatgaaacctcaaggtcagaccttcccaaatctacaagaaagaaacgatgatttgggctttctgctcctgcccctccctttcaccagacctacagttgcacaggagcttcagccctatcttggcttaacagacttccataaagagaaaacgccatgaaactaccacaggtcccacagatgatcctcttggaaaatgctttattcctggtaattaatccctgttgagggagggtaacttggcagtgatcccttccagagtgccaaggagttgtttattcccttcagtaaataaggaacagttcaacatttaatgtttttttaaaagcaattcaaatgtgcaagagccttctggtgctgacaacaaaatccttgaggttttttaaatttttattaaaaaaaaatttttttttgagacagactctcgctctgtcacctaggctgaagtgcagtggtgcaatctcagctcactgcaacctctgcctcccgggttcaagcgattctcctgcctcagcctcccaagtagctgggattacaggcttgtgccaccatgcctggccaatttttatacttttagtagagatggggttttgccatgttggcctggctggtctcaaactcctgacctcaggtcatcctcccacctcagcctcccaaagtgctaggatttgagcccccgcgcccggccgagattttttaagacatagtaggacgtagaagtctgacttcattaccttgtaccagtcgtagctggatgttggaaaaccgtgtaaaagcacaactatctctggacttccaaccacacccacagagtctaggaagaaggaaagtacaatcaattatgccaaatccctataaaaataacctcgaagatgttaaaatctaagtaatctgatacaaagaacaagcaactgtgaccaaattgacattaaaatgacacaattatttgtaaaatgtaagcttaactgcgttaggtgagaacaggccttttctcctttcaatctgtatattaaaacattgtaaaaatcatgctatgtgaaaatacttgaaggcaccttgtttactttcacctaggtgtttttaaacagcatctccccatttctccttttgttctgtaatatgcaaattttttcagtgaaaagtaaattttcagttaaaagcatatgatcacaacacataaactacaaattctttgtactttatcatgaatggcctcacagaaattctctaagatacagcaactattcccaaggaacacctttagcttatgctgtttgctcagcactttttattcagcaggagacccaatctaacatcaaaaacataataaaactattacaaaatcctgtcaactataaaaagggcttaatcaacataaacatgaacttttttaatgcatatgacaatatggaagcattcagcatcatctaaattaggtaaacatttagacaatattaaccttgctaatagtatgggattagaacaggtatattcatatactgccagtgacatgaaaatttggtaataaggttttcaaaaataatttagaagcagttaaaaattgtatatactttagcctaagagttttgttcttgagaatctgtgcaaataaaatcattccatttatacaagtagtatagtttgaaaatgtaaggaaaaaataaactgtatggacatgaagcttttacttcaacattagttttctaaaacagtaaaactggaagtaacccaagccaacataataaaaattgtatacttacttaattgaatatagcaaatgagaggaggtcaggagcaataatgaaaaacggtttatgacaaacatttttcgttattgctcttgacccccgctcaaaacaaatcatttccaatctgtttctcagtttcttcacctataaaatgaggttaatggcacctatctccaaatgctgttgtaaagattaaacaatgaaggctgaaaacataactcagtgcctggcatatggtaattacttgataagtagtggtcataataatcatcatcactagcaaattaatttatataatggtatcaagacttaaatcacagttacactacaaataatctacagaaaaaatgaaatcagggatggtaaggagagagaaccaatggtggttatatctattaatattttatatattacctgacaggttgctc

SEQ ID NO: 2417 - DNA, 529 bp, Homo sapiens
tttccagccccggccccggaccctgcagctgcagagatgttgatgcctaagaagaactggattgccatttatgaactcctttttaaggagggagtcatggtggccaagaaggatgtccacatgcctaagcacccggagctggcagacaagaatgtgcccaaccttcatgtcatgaaggccatgcagtctctcaagtgccgaggctacgtgaaagaacactttgcctggagacatttctactggtaccttaccaatgagtgtatccagtatctccgtgattaccttcatctgcccccggagattgtgcctgccaccctacgccgtagccgtccagagactggcaggcctcggcctaaaggtctgtatatgaggagtgctgtgctacctggtgccgacaagaaagccgaggctggggctgggtcagcaaccgaattctagtttagaggcggatttggttgtggacgtggtcagccacctcagtaaaactggagaggattcttttgcattgaataaatttacagccaaaaaa

SEQ ID NO: 2418 - DNA, 685 bp, Homo sapiens
ctctttctgctgctccccagctctcggatacagccgacaccatgggtttcggagacctgaaaagccccaccggcctccaggtgctcaacgattacctggcggacaagagctacatcaaggggtatggtgccatcacaagcagatgtggcagtatttgaagccgtgtccggcccaccacctgccgacttgtgtcatgccctacgttggtataatcacatcaagtcttacgaaaaggaaaaggccggcctgccaggagtgaagaaagctttgagcaagtatggtcctgccgatgtggaagacactacaggaagtggagctacagacagtaaagatgatgatgacattgatctctttggatccgattatgaggaggaaagtgaagaagcaaagaggctaagggaagaacatcttgcacaatatgaatcaaagaaagccaatgatgagacagatatggcgaaattagaggagtgtgtcagaagcattcaagcagacggcttagtctggggctcatctaaactagttccagtgggatacggaattaagaaacttcaaatacagtgtgtagttgaagatgataaagttggaacagatatgctggaggagcagatcactgcttttgaggactatgtgcagtccatggatgtggctgctttcaacaagatctaaaaatccatcctggatcatg

SEQ ID NO: 2419 - protein, 180 aa, Homo sapiens
MVPSQADVAVFEAVSGPPPADLCHALRWYNHIKSYEKEKAGLPGVKKALSKYGPADVEDTTGSGATDSKDDDDIDLFGSDYEEESEEAKRLREEHLAQYESKKANDETDMAKLEECVRSIQADGLVWGSSKLVPVGYGIKKLQIQCVVEDDKVGTDMLEEQITAFEDYVQSMDVAAFNKI

SEQ ID NO: 2420 - DNA, 1409 bp, Homo sapiens
ctttctttgcggaatcaccatggcggctgggaccctgtacacgtatcctgaaaactggagggccttcaaggctctcatcgctgctcagtacagcggggctcagatccgcgtgctctccgcaccaccccacttccattttggccaaaccaaccgcacctctgaatttcttcgcaaatttcctgccggcaaggtcccagcatttgagggtgatgatggattctgtgtgtttgagagcaacgccattgcctactatgtgagcaatgaggagctgcggggaagtactccagaggcagcagcccaggtggtgcagtgggtgagctttgctgattccgatatagtgcccccagccagtacctgggtgttccccaccttgggcatcatgcaccacaacaaacaggccactgagaatgcaaaggaggaagtgaggcgaattctggggctgctggatgcttacttgaagacgaggacttttctggtgggcgaacgagtgacattggctgacatcacagttgtctgcaccctgttgtggctctataagcaggttctagagccttctttccgccgggcctttcgcaataccaaccgctggttcctcacctgcattaaccagccccagttccgggctgtcttgggggaactgaaactgtgtgagaagatggcccagtttgatgctaaaaagtttgcagagacccagcctaaaaaggacacaccacggaaagagaagggttcacgggaagagaagcagaagccccaggctgagcggaaggaggagaaaaaggcggctgcccctgctcctgaggaggagatggatgaatgtgagcaggcgctggctgctgagcccaaggccaaggaccccttcgctcacctgcccaagagtacctttgtgttggatgaatttaagcgcaagtactccaatgaggacacactctctgtggcactgccatatttctgggagcactttgataaggacggctggtccctgtggtactcagagtatcgcttccctgaagaactcactcagaccttcatgagctgcaatctcatcactggaatgttccagcgactggacaagctgaggaagaatgccttcgccagtgtcatcctttttggaaccaacaatagcagctccatttctggagtctgggtcttccgaggccaggagcttgcctttccgctgagtccagattggcaggtggactacgagtcatacacatggcggaaactggatcctggcagagaggagacccagacgctggttcgagagtacttttcctgggagggggccttccagcatgtgggcaaagccttcaatcacggcaagatcttcaagtgaacatctcttgccatcacctagctgcctgcacctgcccttcagggagatgggggtcattaaaggaaactgaacattg

SEQ ID NO: 2421 - protein, 437 aa, Homo sapiens [sequence omitted]

SEQ ID NO: 2422 - DNA, 621 bp, Homo sapiens
atcaccatggcggctgggaccctgtacacgtatcctgaaaactggagggccttcaaggctctcatcgctgctcagtacagcggggctcagatccgcgtgctctccgcaccaccccacttccattttggccaaaccaaccgcacctctgaatttcttcgcaaatttcctgccggcaaggtcccagcatttgagggtgatgatggattctgtgtgtttgagagcaacgccattgcctactatgtgagcaatgaggagctgcggggaagtactccagaggcagcagcccaggtggtgcagtgggtgagctttgctgattccgatatagtgcccccagccagtacctgggtgttagcccaaggccaaggaccccttcgctcacctgcccaagagtacctttgtgttggatgaatttaagcgcaagtactccaatgaggacacactctctgtggcactgccatatttctgggagcactttgataaggacggctggtccctgtggtactcagagtatcgcttccctgaagaactcactcagaccttcatgagctgcaatctcatcactggaatgttccagcgactggacaagctgaggaagaatgccttcgccagtgtcatcctttt

SEQ ID NO: 2423 - DNA, 1367 bp, Homo sapiens
gaaggccgcaccgtactgggcgggggtctggggagcgcagcagccatggcaagccgtctcctgctcaacaacggcgccaagatgcccatcctggggttgggtacctggaagtcccctccagggcaggtgactgaggccgtgaaggtggccattgacgtcgggtaccgccacatcgactgtgcccatgtgtaccagaatgagaatgaggtgggggtggccattcaggagaagctcagggagcaggtggtgaagcgtgaggagctcttcatcgtcagcaagctgtggtgcacgtaccatgagaagggcctggtgaaaggagcctgccagaagacactcagcgacctgaagctggactacctggacctctaccttattcactggccgactggctttaagcctgggaaggaatttttcccattggatgagtcgggcaatgtggttcccagtgacaccaacattctggacacgtgggcggccatggaagagctggtggatgaagggctggtgaaagctattggcatctccaacttcaaccatctccaggtggagatgatcttaaacaaacctggcttgaagtataagcctgcagttaaccagattgagtgccacccatatctcactcaggagaagttaatccagtactgccagtccaaaggcatcgtggtgaccgcctacagccccctcggctctcctgacaggccctgggccaagcccgaggacccttctctcctggaggatcccaggatcaaggcgatcgcagccaagcacaataaaactacagcccaggtcctgatccggttccccatgcagaggaacttggtggtgatccccaagtctgtgacaccagaacgcattgctgagaactttaaggtctttgactttgaactgagcagccaggatatgaccaccttactcagctacaacaggaactggagggtctgtgccttgttgagctgtacctcccacaaggattaccccttccatgaagagttttgaagctgtggttgcctgctcgtccccaagtgacctatacctgtgtttcttgcctcatttttttccttgcaaatgtagtatggcctgtgtcactcagcagtgggacagcaacctgtagagtggccagcgagggcgtgtctagcttgatgttggatctcaagagccctgtcagtagagtagaagtctcttccagtttgctttgcccttctttctaccctgctggggaaagtacaacctgaatacccttttctgaccaaagagaagcaaaatctaccaggtcaaaatagtgccactaacggttgagttttgactgcttggaactggaatcctttcagcaagacttctctttgcctcaaataaaaagtgcttttgtg

SEQ ID NO: 2424 - protein, 316 aa, Homo sapiens
MASRLLLNNGAKMPILGLGTWKSPPGQVTEAVKVAIDVGYRHIDCAHVYQNENEVGVAIQEKLREQVVKREELFIVSKLWCTYHEKGLVKGACQKTLSDLKLDYLDLYLIHWPTGFKPGKEFFPLDESGNVVPSDTNILDTWAAMEELVDEGLVKAIGISNFNHLQVEMILNKPGLKYKPAVNQIECHPYLTQEKLIQYCQSKGIVVTAYSPLGSPDRPWAKPEDPSLLEDPRIKAIAAKHNKTTAQVLIRFPMQRNLVVIPKSVTPERIAENFKVFDFELSSQDMTTLLSYNRNWRVCALLSCTSHKDYPFHEEF

SEQ ID NO: 2425 - DNA, 1560 bp, Homo sapiens
ggcacgaggcctgagctcaggagtttgagaccagcctgtctctactaacaatataaaaattagctgggagtcacggtgggcgcctgtaatcccagctactcgggaggctgaggcaggagaattgcttgaacccaggagacagaggttgtagtgagctgagatcgcaccactgcactctagccttggcaacagtgcaagactgtctcaaaaacagcaacagagagcaggacgtgagacttctacctgctcactcagaatcatttctgcaccaaccatggccacgtttgtggagctcagtaccaaagccaagatgcccattgtgggcctgggcacttggaagtctcctcttggcaaagtgaaagaagcagtgaaggtggccattgatgcaggatatcggcacattgactgtgcctatgtctatcagaatgaacatgaagtgggggaagccatccaagagaagatccaagagaaggctgtgaagcgggaggacctgttcatcgtcagcaagttgtggcccactttctttgagagaccccttgtgaggaaagcctttgagaagaccctcaaggacctgaagctgagctatctggacgtctatcttattcactggccacagggattcaagtctggggatgaccttttccccaaagatgataaaggtaatgccatcggtggaaaagcaacgttcttggatgcctgggaggccatggaggagctggtggatgaggggctggtgaaagcccttggggtctccaatttcagccacttccagatcgagaagctcttgaacaaacctggactgaaatataaaccagtgactaaccaggttgagtgtcacccatacctcacacaggagaaactgatccagtactgccactccaagggcatcaccgttacggcctacagccccctgggctctccggatagaccttgggccaagccagaagacccttccctgctggaggatcccaagattaaggagattgctgcaaagcacaaaaaaaccgcagcccaggttctgatccgtttccatatccagaggaatgtgattgtcatccccaagtctgtgacaccagcacgcattgttgagaacattcaggtctttgactttaaattgagtgatgaggagatggcaaccatactcagcttcaacagaaactggagggcctgtaacgtgttgcaatcctctcatttggaagactatcccttcgatgcagaatattgaggttgaatctcctggtgagattatacaggagattctctttcttcgctgaagtgtgactacctccactcatgtcccattttagccaagcttatttaagatcacagtgaacttagtcctgttatagacgagaatcgaggtgctgttttagacatttatttctgtatgttcaactaggatcagaatatcacagaaaagcatggcttgaataaggaaatgacaattttttccacttatctgatcagaacaaatgtttattaagcatcagaaactctgccaacactgaggatgtaaagatcaataaaaaaaataataatcataaaaaaaaaaaaaaaaaa

SEQ ID NO: 2426 - protein, 316 aa, Homo sapiens
MATFVELSTKAKMPIVGLGTWKSPLGKVKEAVKVAIDAGYRHIDCAYVYQNEHEVGEAIQEKIQEKAVKREDLFIVSKLWPTFFERPLVRKAFEKTLKDLKLSYLDVYLIHWPQGFKSGDDLFPKDDKGNAIGGKATFLDAWEAMEELVDEGLVKALGVSNFSHFQIEKLLNKPGLKYKPVTNQVECHPYLTQEKLIQYCHSKGITVTAYSPLGSPDRPWAKPEDPSLLEDPKIKEIAAKHKKTAAQVLIRFHIQRNVIVIPKSVTPARIVENIQVFDFKLSDEEMATILSFNRNWRACNVLQSSHLEDYPFDAEY

SEQ ID NO: 2427 - DNA, 1498 bp, Homo sapiens
cagagtttgggcgccaggcgagacggcagggcttaaagttccgggaatcaaagatcaactcccactgaggacaaatggacctgtaattccgggtgtgacgagagaacgagatttaccttcctgaattaaaaaacaggtcattaagcttgggccctgacttttctttgtgagaaggtacagagatggaaaccttacaatccgagactaaaacgagggtccttccctcatggctgacagcccaggtggctacaaagaatgtggcaccaatgaaggcccccaagaggatgagaatggcagcagtgccagtggcagcagcaagactccctgcgacaaggactgtgtactgcatgaatgaggctgagatagttgatgttgctctgggaatcctgattgagagccgcaaacaggaaaaggcctgcgagcagccggccctggcgggggctgataacccagagcactcccctccctgctccgtgtcgcctcacacaagttctgggagcagcagtgaggaagaggacagtgggaaacaggcactggctccaggcctcagcccttcccagaggccggggggttccagctctgcctgtagcaggagccctgaggaggaggaggaagaggatgtgctgaaatacgtccgggagatctttttcagctagggcataaactgtgcactgaactgtctgccgagagcagctggaggacagctgagcttccactggtgctgctgggccgcccgcctgtgggaatggggctctctgtgctcctacctttgtgccttcttgggcctggcagattcacctcaggccagaagcccctggacactccgggccttggggctgccgttctgagtgtgcggaaggcaggactcaaaatgagatcccatttgactccctctgtatgtactgtgccctctcctggctcttgaggctctggagtcccaattgtctgtgttagtcagtgaccaggttccagggaaaatgatgtcatgtggtggtccaacttactggaaccaaagagacagtactttgcaaagaaaaggatcactgccaggtgcactggaattgctacagtttagtccgcatgatctctcctgaaggaggaagcctgtttcaaaaatagtttccatcatgagtctatcaatgagctcccacctctccagccagcctagaaagcaaacgagctgcccacagttctctgccctgtctgggaggttgaggccacagtgtatagactggtaagccagacaggcctcctcccgcaagctgctaccttgctttcacctgtaccttggtccccgggcagctagctataaagcaagagggacaggagcccagaagagacactgaggacaagagatcacaccagagtacatgtctctgcctctgttttcagtgtggctttggacaggaatatatgaataaatcactgccatacaggttttccaatacacaagtgctagaaaatacacacaattccccaatgaaaaaaaaaaaaaaaa

SEQ ID NO: 2428 - protein, 129 aa, Homo sapiens
MKAPKRMRMAAVPVAAARLPATRTVYCMNEAEIVDVALGILIESRKQEKACEQPALAGADNPEHSPPCSVSPHTSSGSSSEEEDSGKQALAPGLSPSQRPGGSSSACSRSPEEEEEEDVLKYVREIFFS

SEQ ID NO: 2429 - DNA, 2411 bp, Homo sapiens
gaggtaggctcggaccggcccgcggagctgctgcagtccttcgcgccctcctcgccctccccaccgacatcatgctccagttcctgataccaaacctggctaaaaaacttgaagaaattaaaaaggacttggatgccaagaagaaaccccctagtgcatgagactgcctccagcactgccttcaggatatactgattctactgctcttgagggcctcgtttactatctgaaccaaaagcttttgttttcgtctccagcctcagcacttctcttctttgctagaccctgtgttttttgctttaaagcaagcaaaatggggccccaatttgagaactacccgacatttccaacatactcacctcttcccataatccctttccaactgcatgggaggttctaagactggaattatggtgctagattagtaaacatgacttttaatgagtagtgtcttctttatcgtttgcgatttttactaccttttttcaaaagaaaaattgatgagttttgtatagctggtcagatacaaataatagtgacttcacagtttagtaattataatgggtacttgttaaacatttggtactaaattatgttgctgcaaagtaattaaaattagtatctagagctagtttctggtgaattattcatttattttgtactgttgttaggcagctctgtagttgctaatttaaccaataagtcaatttgctattcatgaagaaacgattctgagaatcctgtcaggaattggggaatgaaaaaatacacaaaataatggtctttgtcccagtagagttcatagtctatttagtgtgcatgtttttccttaatgatgtatttgatctgacttttttccttctcaaaagaatcatacttgggattacaggtacatttgatgttatatgatggataagtgaaaagtttttaaaggagattttataccttttcacattaaaaaaggtatttatattattactttgtagtgattgtcttaagaaaaaatatagcccaaatgtatagtaaaatcagcagctcaagaagaatttctgcttctctttgtagttgatgctttgttttttcctgcagtcagaaattccttgtatttgtcaaatgtataatcagcttgtattgtttttaaattaaaaaaaatttgaataattaacttttgccatgggacaagatacaaaagtaatttcatataaagggcctctcccacccctgttctctggctcctggctcctgtttgacaagttactgttaccacttcgccttatacttttgagaaagagtctgtgcctaaacaaacacgtgtaacacaaatagtaactatacatggaggtctagccctcacctttttttttcttttttttcttttttaatggagatcattctataccagcatgtaagtagcaaggaacctcattctttttttggctgcctaaaatttttttgaatagatataacataattgatttaatctgctactggtgaatgcttaggttgttcttttgctattacagtgataacttcaatcctaatgttattaagcatatcgattcagggtatagctataagatgaagtcctaaaagtataatttagactaaatacaaatacccatttcgctagctgttttgtttcagaggacttgttgagcagcttcactaataatgccatttttgaagacatggcaggttcagaatcaataaactggaagaattgttcagagcatcttttttcagacagtgatgacattgattctgtatatgataaagtgattctgcttctctttgacaacttgcatctctcctacatggaagtaagttttattcctgtcaatgttgtctttgtgtgtgacagattaggattaaattatggtttgacttttcctagcagcgtgatcatgggcaagtggcttatttttttttttttttttgagacagagtctcactctgctgcccaggctggagtgcagtggcacagtcttggctcactgcaactcctgcctcccggtccaagtgattctcgtgctgcagcttctcaagtagctggcatcaccaccacacctggctaatttttgtatttttagtaacgacgaggtttcaccatgttggcaaagctggtctcaaattcctggcctcaagtgatctgcccacttcagcctcccaaagtgttgggattacaggcgtgagccactgcgcccggcttttttaaacttttagattcatttaataggtaaattgcatgtcacgggtttgtagcttattctttcagaaactcttgcattatctgtagacgtggacgtaaatatccacctcatagggttttcataaaaaataattgagataatgtatgtaatgtttcacagtgctttgcagactatctaataaatagtagctattagtacaaa

SEQ ID NO: 2430 - DNA, 2213 bp, Homo sapiens
cgcggaggagaagaggaagaggaagttgggggagggtcctagcggggagtgaaccggaagtgtaaaggttcctgcctctcctcggccaggcggaacctctctgctgggcccggtggccgcaaaagaactttctttctcccgcccgaacggtcgccgcggccaactgcctcgcccgcctggcagcctaaccctccttctcttcttctcctctccggcttcgcgcggccctgcctccctctcgcccggcggcatccgcttgctgctgccaccgcctcctcatcttctgcccggccaaccggcctgccccgctgcagtgatgtgcgacaaggagttcatgtgggccctgaaaaacggagacttggatgaggtgaaagactatgtggccaagggagaagatgtcaaccggacactagaaggtggaaggaaacctcttcattatgcagcagattgtgggcagcttgaaatcctggaatttctgctgctgaaaggagcagatattaatgctccagataaacatcatattactcctcttctgtctgctgtctatgagggtcatgtttcctgtgtgaaattgcttctgtcaaagggtgctgataagactgtgaaaggcccagatggactgaccgcctttgaagccactgacaaccaggcaatcaaagctcttctccagtgatggatggatggactgataactccggaagaatgactctcctgtggcctcacactgctgcctgtctgtctgtcactctctatctgccagcttcttcagctaaatactttaagaggggtgaggggagagagaaattcataacaaatccgactaccagaaaaaaaaaattgttttggaggaggggcaaaaggaaccatgatcaggcttttactgggattcctgatcaagtaagcctcttccctttctaataaaatatacaccttatacccaagggagagcaaagacaaaatacaccagtaacatttgaccttttcagctccctagctaatttattagattgtgttgaaggtctgattctacaaaggccaactctacatatttggtagccctaactgtctgagcagtagtggctgctgtgatgtaaacttagggtgctgagataagcaattagctctagccttctgccttaagaatgcactctactggggatttcctggcatagttaagagcgctgcctataaggttggtgaccaaatctttcctcggtgactttaagctttatgtgaaagcttagttaaggtgaggaggggcacactcctaaattgctggatgactgaactttggattttctctcccctttcacatggatttcatgtctctttagataaaactgactagttttatttataaaatcttaagttttggaagtctaaaggagaaaccattccagtatgcatatttttttctcctctagattcatacatttatatagcattgaaacactttcaaactcctgctggtagtaaaaggggatttaaaaatagaatcatagccataagcctgttagtatcatatgaagagagaacagttatcttagtacctatggattttctttatttgctgtttgaatggattgaccttggttatgtgttgagaattaaggaacattctttgaaatgcctctctcagacccatcttggaggctgattacttactgcaccaaagctatcactggggtgagatttactgtttggacaaatttagccccatcccttcaaaaatacacttgtaaccaggtttcccagagttgttgataggcttctgctgaacatatgccaacccacctgcataatatatttttgttgcttttataaatcatgcattacataaagtgtgacaacttcaaaatgtattctctgttcttggaatacagtgccctaaaatggtgttcttatgacctgcagaaaatatttacacataaataagcaattgcagtgttttgcatgcaaaatataaaaaatttaaattgtcctgattctattttgtaaatggagaaacaatcatatctttctaagcggtaatggaggaagactagtgctttgtgcattttgatatatttgagttcattttttccacaatgtcatacttttgacgcagttgggtttctcataagtatcctagttcatgtacatccgaatgctaaataatactgtgttttaagttttgtgttgcaagaacaaatggaataaacttgaattgtgct

SEQ ID NO: 2431 - protein, 118 aa, Homo sapiens
MCDKEFMWALKNGDLDEVKDYVAKGEDVNRTLEGGRKPLHYAADCGQLEILEFLLLKGADINAPDKHHITPLLSAVYEGHVSCVKLLLSKGADKTVKGPDGLTAFEATDNQAIKALLQ

SEQ ID NO: 2432 - DNA, 738 bp, Homo sapiens
atgaggcggtttttcagtagtacagagggtactttgcatattagaccttttctggctcttttaacaaggacgctgttgcttattcctaatacaatgtcgttctctggcagattcatagtccaccagtccagctctggcccaagatctcctctcaccatgatcccaagttattctttccggatatcattaggaaaggacagcgaatcatcccttttcatcctcttcccatatgccaacccctcactccctcttttcttatttgcaatcagagagggaagaatgcagatctgccaagtgcgttataaatactgtgaaacaaaagggacgctctggggcagcgcaggaggggtacagtcctacaaggtgtccacctctggcccctgggccttcagcagccgctcctgcacgagtgggccctgtgcccgcatgagctcctcgagcttctcccgagtggacagcagcagctttcggggtggcctgggcagcggctatgaggtgaaccccaacatccaggccgtgcgcatccaggggaaggagcagatcaagaccctcaacaagaagtttgcctccttcatagacaaggtacggttcctggagcagcagaacaagatgctggagaccaagtggagcctcctgcagcagcagacgacgactcggagcaacatggacaacatgttcgagagctacatcaacaaccttaggcggcagctgaagcactcttcttttaaaagtttctga

SEQ ID NO: 2433 - DNA, 919 bp, Homo sapiens
ctctttcccatcttgcaagatggcgggtgaaaaagttgagaagccagatactaaagagaagaaacctgaagccaagaaggctgatgctggtggcaaggtgaaaaagggtaacctcaaggctaaaaagcccaagaaggggaagccccattgcagccgcaaccctgtcattgtcagaggaattggcaggtattcccgatctgctatgtattccagaaaggccatgtacaagaggaagtactcagccgctaaatccaaggttgaaaagaaaaagaaggagaaggttcttgcaactgttacaaaaccagttggtggtgacaagaacggcagtacccgggtggttaaacttcgcaaaatgcctagatattatcctactgaagatgtgcctcgaaagctgttgagccacagcaaaaaacccttcagtcagcacgtgagaaaactgcgagccagcattacccccgggaccattctgatcatcctcactggacgccacaggggcaagagggtggttttcctgaagcagctggctagtggcttgttacttgtgactggacctctggtcctcaatcgagttcctctacgaagaacacaccagaaatttgtcattgccacctcaaccaaaatcgatatcagcaatgtaaaaatcccaaaacatcttactgatgcttacttcaagaagaagaagctgcggaagcccagacaccaggaaggtgagatcttcgacacagaaaaagagaaatatgagattacggagcagtgcaagattgagcagaaagctgtggactcacaaattttaccaaaaatcaaagctattcctcagctccagggctacctgtgatctgtggttgccctgacgaatggaatttatcctcacaaattggtgttctaaatgtcttaagaacttaattaaatagttgactac

SEQ ID NO: 2434 - DNA, 2795 bp, Homo sapiens
cagggcccctgagatcatccttggtttaccattttgtgaggcaattgacatgtggtccctgggctgtgttattgcagaattgttcctgggttggccgttatatccaggagcttcggagtatgatcagattcggtatatttcacaaacacagggtttgcctgctgaatatttattaagcgccgggacaaagacaactaggtttttcaaccgtgacacggactcaccatatcctttgtggagactgaagacaccagatgaccatgaagcagagacagggattaagtcaaaagaagcaagaaagtacattttcaactgtttagatgatatggcccaggtgaacatgacgacagatttggaagggagcgacatgttggtagaaaaggctgaccggcgggagttcattgacctgttgaagaagatgctgaccattgatgctgacaagagaatcactccaatcgaaaccctgaaccatccctttgtcaccatgacacacttactcgattttccccacagcacacacgtcaaatcatgtttccagaacatggagatctgcaagcgtcgggtgaatatgtatgacacggtgaaccagagcaaaacccctttcatcacgcacgtggcccccagcacgtccaccaacctgaccatgacctttaacaaccagctgaccactgtccacaaccaggctccctcctctaccagtgccactatttccttagccaatcccgaagtctccatactaaactacccatctacactctaccagccctcagcggcatccatggctgcagtggcccagcggagcatgcccctgcagacaggaacagcccagatttgtgcccggcctgacccgttccagcaagctctcatcgtgtgtccccccggcttccaaggcttgcaggcctctccctctaagcacgctggctactcggtgcgaatggaaaatgcagttcccatcgtcactcaagccccaggagctcagcctcttcagatccaaccaggtctgcttgcccagcaggcttggccaagtgggacccagcagatcctgcttcccccagcatggcagcaactgactggagtggccacccacacatcagtgcagcatgccaccgtgattcccgagaccatggcaggcacccagcagctggcggactggagaaatacgcatgctcacggaagccattataatcccatcatgcagcagcctgcactattgaccggtcatgtgacccttccagcagcacagcccttaaatgtgggtgtggcccacgtgatgcggcagcagccaaccagcaccacctcctcccggaagagtaagcagcaccagtcatctgtgagaaatgtctccacctgtgaggtgtcctcctctcaggccatcagctccccacagcgatccaagcgtgtcaaggagaacacacctccccgctgtgccatggtgcacagtagcccggcctgcagcacctcggtcacctgtgggtggggcgacgtggcctccagcaccacccgggaacggcagcggcagacaattgtcattcccgacactcccagccccacggtcagcgtcatcaccatcagcagtgacacggacgaggaggaggaacagaaacacgcccccaccagcactgtctccaagcaaagaaaaaacgtcatcagctgtgtcacagtccacgactccccctactccgactcctccagcaacaccagcccctactccgtgcagcagcgtgctgggcacaacaatgccaatgcctttgacaccaaggggagcctggagaatcactgcacggggaacccccgaaccatcatcgtgccacccctgaaaacccaggccagcgaagtattggtggagtgtgatagcctggtgccagtcaacaccagtcaccactcgtcctcctacaagtccaagtcctccagcaacgtgacctccaccagcggtcactcttcagggagctcatctggagccatcacctaccggcagcagcggccgggcccccacttccagcagcagcagccactcaatctcagccaggctcagcagcacatcaccacggaccgcactgggagccaccgaaggcagcaggcctacatcactcccaccatggcccaggctccgtactccttcccgcacaacagccccagccacggcactgtgcacccgcatctggctgcagccgctgccgctgcccacctccccacccagccccacctctacacctacactgcgccggcggccctgggctccaccggcaccgtggcccacctggtggcctcgcaaggctctgcgcgccacaccgtgcagcacactgcctacccagccagcatcgtccaccaggtccccgtgagcatgggcccccgggtcctgccctcgcccaccatccacccgagtcagtatccagcccaatttgcccaccagacctacatcagcgcctcgccagcctccaccgtctacactggatacccactgagccccgccaaggtcaaccagtacccttacatataaacactggaggggagggagggagggagggagggagagaatggcccgagggaggagggagagaaggagggaggcgctcctgggaccgtgggcgctggccttttatactgaagatgccgcacacaaacaatgcaaacggggcaggggcgggggggggggggggggcagagggcagggggacgggtcgggacaccagtgaaacttgaaccgggaagtgggaggacgtagagcagagaagagaacatttttaaaaggaagggattaaagagggtgggaaatctatggtttttattttaaaaaa

SEQ ID NO: 2435 - DNA, 628 bp, Homo sapiens
cctgcgtggctgggctgctcgggttagatcgtcaggaaaagcctaaagattagactgtaagaaaagaaaatagaagccatgtttcgaagacctgtattacaggtacttcgtcagtttgtaagacatgagtccgaaacaactaccagtttggttcttgaaagatccctgaatcgtgtgcacttacttgggcgagtgggtcaggaccctgtcttgagacaggtggaaggaaaaaatccagtcacaatattttctctagcaactaatgagatgtggcgatcaggggatagtgaagtttaccaactgggtgatgtcagtcaaaagacaacatggcacagaatatcagtattccggccaggcctcagagacgtggcatatcaatatgtgaaaaaggggtctcgaatttatttggaagggaaaatagactatggtgaatacatggataaaaataatgtgaggcgacaagcaacaacaatcatagctgataatattatatttctgagtgaccagacgaaagagaaggagtagaaaggatgattcttctttggccatcatttggtacagtctcatttccaagtcatgtataatctttatggcttccaaggacaagaattaaaatactcttttacgt

SEQ ID NO: 2436 - protein, 148 aa, Homo sapiens
MFRRPVLQVLRQFVRHESETTTSLVLERSLNRVHLLGRVGQDPVLRQVEGKNPVTIFSLATNEMWRSGDSEVYQLGDVSQKTTWHRISVFRPGLRDVAYQYVKKGSRIYLEGKIDYGEYMDKNNVRRQATTIIADNIIFLSDQTKEKE

SEQ ID NO: 2437 - DNA, 2794 bp, Homo sapiens
gaccagccgtgcaaatctctagaagatgacggtgttctttaaaacgcttcgaaatcactggaagaaaactacagctgggctctgcctgctgacctggggaggccattggctctatggaaaacactgtgataacctcctaaggagagcagcctgtcaagaagctcaggtgtttggcaatcaactcattcctcccaatgcacaagtgaagaaggccactgtttttctcaatcctgcagcttgcaaaggaaaagctaggactctatttgaaaaaaatgctgccccgattttacatttatctggcatggatgtgactattgttaagacagattatgagggacaagccaagaaactcctggaactgatggaaaacacggatgtgatcattgttgcaggaggagatgggacactgcaggaggttgttactggtgttcttcgacgaacagatgaggctaccttcagtaagattcccattggatttatcccactgggagagaccagtagtttgagtcataccctctttgccgaaagtggaaacaaagtccaacatattactgatgccacacttgccattgtgaaaggagagacagttccacttgatgtcttgcagatcaagggtgaaaaggaacagcctgtatttgcaatgaccggccttcgatggggatctttcagagatgctggcgtcaaagttagcaagtactggtatcttgggcctctaaaaatcaaagcagcccactttttcagcactcttaaggagtggcctcagactcatcaagcctctatctcatacacgggacctacagagagacctcccaatgaaccagaggagacccctgtacaaaggccttctttgtacaggagaatattacgaaggcttgcgtcctactgggcacaaccacaggatgccctttcccaagaggtgagcccggaggtctggaaagatgtgcagctgtccaccattgaactgtccatcacaacacggaataatcagcttgacccgacaagcaaagaagattttctgaatatctgcattgaacctgacaccatcagcaaaggagactttataactataggaagtcgaaaggtgagaaaccccaagctgcacgtggagggcacggagtgtctccaagccagccagtgcactttgcttatcccggagggagcagggggctcttttagcattgacagtgaggagtatgaagcgatgcctgtggaggtgaaactgctccccaggaagctgcagttcttctgtgatcctaggaagagagaacagatgctcacaagccccacccagtgagcagcagaagacaagcactctgagaccacactttaggccaccggtgggaccaaaagggaacaggtgcctcagccatcccaacagtgtcgtcagagggtccccagggcattttcatggcaagtacccctctgcccccactccagcagtgcttcccaaagtgtgctctgtcacctgctttgcaatcggcttccattagcgcatgttttattttggtgtgacggttggccctcctaaacacggactttcctcaggctggttcaagacggaaaaggactttcttctgttttcttccaaagtgcaaccacagtggagagcccacggtgggcttagcctgcctaggcccttccatttctcttctttgaccgtgctaggaattccaggaaagtgcattcctgccctggtgaccttttcctatgtctaggctcctccacaggtgctgctattttgtgagctccggctcctgtttagcttttatttcagttctaacctcagtccagaaacatatgtgaggttgtttccctcttcagccacggctacaataccggaaaatgctagtttttatttatttttttaagtagtgcttcctaaatggtttgcatgagagccacctggggtacatgttgaaaacttatttggggtctaccccaaacctaataacccaaatttggggatggggcccaggaatatgcatttttaaaaagtcatctgcccttcccaggtgattctgtaagttgtccctcaactgtacttggagaaatcgtgttttaaagcagtagtccacaaagtattctgctcatgtgcccccaaaagtattttgaaaaatcatgtataccctcacccatctaagttgatatctaaaattttatctaagttggtatctaaaatttttcatgggaagttaaatagttgacaaagtatgtatttgctggtgtcgtgtaaatattggtattttaaaataaaaactgttacatcactattttaaacatatccagtacaatttaaatatcacaacaatttgacacccttcattcatttataaaaataaatgagctagttctttagtagttaaacatttcaaattggcttttctccttctgtatttccataccacttttcagccaagaatcctatcataatgtaatctattatgcccgacatcttttaatcattcaccccattacttcttgtcaacaaaaaatataaatggaaattttttttttagctcttgctttaagtgtttgtttgttatctcagtccagaaccaatattatcgtaattaattattggtatataatgaaaacggtattaattcttggatgattaaaagtttttttattagaatgttctttatcctaattagttcatttatccaagaatacatgaatgtgatttacagctgagatggggttcaacctcagctgtattccttgtttctgtatagatgtaagcacataaattcgatggaatagaattacgttaacaatgaaaaaaaaaaaaaaa

SEQ ID NO: 2438 - protein, 422 aa, Homo sapiens
MTVFFKTLRNHWKKTTAGLCLLTWGGHWLYGKHCDNLLRRAACQEAQVFGNQLIPPNAQVKKATVFLNPAACKGKARTLFEKNAAPILHLSGMDVTIVKTDYEGQAKKLLELMENTDVIIVAGGDGTLQEVVTGVLRRTDEATFSKIPIGFIPLGETSSLSHTLFAESGNKVQHITDATLAIVKGETVPLDVLQIKGEKEQPVFAMTGLRWGSFRDAGVKVSKYWYLGPLKIKAAHFFSTLKEWPQTHQASISYTGPTERPPNEPEETPVQRPSLYRRILRRLASYWAQPQDALSQEVSPEVWKDVQLSTIELSITTRNNQLDPTSKEDFLNICIEPDTISKGDFITIGSRKVRNPKLHVEGTECLQASQCTLLIPEGAGGSFSIDSEEYEAMPVEVKLLPRKLQFFCDPRKREQMLTSPTQ

SEQ ID NO: 2439 - DNA, 2470 bp, Homo sapiens
cgcctcccttccccctccccgcccgacagcggccgctcgggccccggctctcggttataagatggcggcgctgagcggtggcggtggtggcggcgcggagccgggccaggctctgttcaacggggacatggagcccgaggccggcgccggcgccggcgccgcggcctcttcggctgcggaccctgccattccggaggaggtgtggaatatcaaacaaatgattaagttgacacaggaacatatagaggccctattggacaaatttggtggggagcataatccaccatcaatatatctggaggcctatgaagaatacaccagcaagctagatgcactccaacaaagagaacaacagttattggaatctctggggaacggaactgatttttctgtttctagctctgcatcaatggataccgttacatcttcttcctcttctagcctttcagtgctaccttcatctctttcagtttttcaaaatcccacagatgtggcacggagcaaccccaagtcaccacaaaaacctatcgttagagtcttcctgcccaacaaacagaggacagtggtacctgcaaggtgtggagttacagtccgagacagtctaaagaaagcactgatgatgagaggtctaatcccagagtgctgtgctgtttacagaattcaggatggagagaagaaaccaattggttgggacactgatatttcctggcttactggagaagaattgcatgtggaagtgttggagaatgttccacttacaacacacaactttgtacgaaaaacgtttttcaccttagcattttgtgacttttgtcgaaagctgcttttccagggtttccgctgtcaaacatgtggttataaatttcaccagcgttgtagtacagaagttccactgatgtgtgttaattatgaccaacttgatttgctgtttgtctccaagttctttgaacaccacccaataccacaggaagaggcgtccttagcagagactgccctaacatctggatcatccccttccgcacccgcctcggactctattgggccccaaattctcaccagtccgtctccttcaaaatccattccaattccacagcccttccgaccagcagatgaagatcatcgaaatcaatttgggcaacgagaccgatcctcatcagctcccaatgtgcatataaacacaatagaacctgtcaatattgatgacttgattagagaccaaggatttcgtggtgatggaggatcaaccacaggtttgtctgctaccccccctgcctcattacctggctcactaactaacgtgaaagccttacagaaatctccaggacctcagcgagaaaggaagtcatcttcatcctcagaagacaggaatcgaatgaaaacacttggtagacgggactcgagtgatgattgggagattcctgatgggcagattacagtgggacaaagaattggatctggatcatttggaacagtctacaagggaaagtggcatggtgatgtggcagtgaaaatgttgaatgtgacagcacctacacctcagcagttacaagccttcaaaaatgaagtaggagtactcaggaaaacacgacatgtgaatatcctactcttcatgggctattccacaaagccacaactggctattgttacccagtggtgtgagggctccagcttgtatcaccatctccatatcattgagaccaaatttgagatgatcaaacttatagatattgcacgacagactgcacagggcatggattacttacacgccaagtcaatcatccacagagacctcaagagtaataatatatttcttcatgaagacctcacagtaaaaataggtgattttggtctagctacagtgaaatctcgatggagtgggtcccatcagtttgaacagttgtctggatccattttgtggatggcaccagaagtcatcagaatgcaagataaaaatccatacagctttcagtcagatgtatatgcatttggaattgttctgtatgaattgatgactggacagttaccttattcaaacatcaacaacagggaccagataatttttatggtgggacgaggatacctgtctccagatctcagtaaggtacggagtaactgtccaaaagccatgaagagattaatggcagagtgcctcaaaaagaaaagagatgagagaccactctttccccaaattctcgcctctattgagctgctggcccgctcattgccaaaaattcaccgcagtgcatcagaaccctccttgaatcgggctggtttccaaacagaggattttagtctatatgcttgtgcttctccaaaaacacccatccaggcagggggatatggtgcgtttcctgtccactgaaacaaatgagtgagagagttcaggagagtagcaacaaaaggaaaataaatgaacatatgtttgcttatatgttaaattgaataaaatactctctttttttttaaggtg

SEQ ID NO: 2440 - DNA, 2298 bp, Homo sapiens
ggcacgagggtgtccctccccgcccggctggaggctgctccggaccgggacgcagagtctgcggacccggcgccgaggcggccacccgagacgcggcgcgcacgctccggcctgcgcagcccggcccggccatggcggccccccgcccgtctcccgcgatctccgtttcggtctcggctccggctttttacgccccgcagaagaagttcggccctgtggtggccccaaagcccaaagtgaatcccttccggcccggggacagcgagcctcccccggcacccggggcccagcgcgcacagatgggccgggtgggcgagattcccccgccgcccccggaagactttcccctgcctccacctccccttgctggggatggcgacgatgcagagggtgctctgggaggtgccttcccgccgccccctcccccgatcgaggaatcatttccccctgcgcctctggaggaggagatcttcccttccccgccgcctcctccggaggaggagggagggcctgaggcccccataccgcccccaccacagcccagggagaaggtgagcagtattgatttggagatcgactctctgtcctcactgctggatgacatgaccaagaatgatcctttcaaagcccgggtgtcatctggatatgtgcccccaccagtggccactccattcagttccaagtccagtaccaagcctgcagccgggggcacagcacccctgcctccttggaagtccccttccagctcccagcctctgccccaggttccggctccggctcagagccagacacagttccatgttcagccccagccccagcccaagcctcaggtccaactccatgtccagtcccagacccagcctgtgtctttggctaacacccagccccgagggcccccagcctcatctccggctccagcccctaagttttctccagtgactcctaagtttactcctgtggcttccaagttcagtcctggagccccaggtggatctgggtcacaaccaaatcaaaaattggggcaccccgaagctctttctgctggcacaggctcccctcaacctcccagcttcacctatgcccagcagagggagaagccccgagtgcaggagaagcagcaccccgtgcccccaccggctcagaaccaaaaccaggtgcgctcccctggggccccagggcccctgactctgaaggaggtggaggagctggagcagctgacccagcagctaatgcaggacatggagcatcctcagaggcagaatgtggctgtcaacgaactctgcggccgatgccatcaacccctggcccgggcgcagccagccgtccgcgctctagggcagctgttccacatcgcctgcttcacctgccaccagtgtgcgcagcagctccagggccagcagttctacagtctggagggggcgccgtactgcgagggctgttacactgacaccctggagaagtgtaacacctgcggggagcccatcactgaccgcatgctgagggccacgggcaaggcctatcacccgcactgcttcacctgtgtggtctgcgcccgccccctggagggcacctccttcatcgtggaccaggccaaccggccccactgtgtccccgactaccacaagcagtacgccccgaggtgctccgtctgctctgagcccatcatgcctgagcctggccgagatgagactgtgcgagtggtcgccctggacaagaacttccacatgaagtgttacaagtgtgaggactgcgggaagcccctgtcgattgaggcagatgacaatggctgcttccccctggacggtcacgtgctctgtcggaagtgccacactgctagagcccagacctgagtgaggacaggccctcttcagaccgcagtccatgccccattgtggaccacccacactgagaccacctgcccccacctcagttattgttttgatgtctagcccctcccatttccaacccctccctagcatcccaggtgccctgacccaggacccaacatggtctagggatgcaggatccccgccctggggtctggtcctcgcccatcctgcagggattgcccaccgtcttccagacaccccacctgaggggggcaccaggtttagtgctgctgctttcactgctgcacccgcgccctcggccggccccccgagcagcctttgtactctgcttgcggagggctgggagaccctccaggacattcccaccctcccccatgctgccaagttgtagctatagctacaaataaaaaaaaaccttgttttccagaaaaaaaaaaaaaaaaaaaaa

SEQ ID NO: 2441 - protein, 572 aa, Homo sapiens
MAAPRPSPAISVSVSAPAFYAPQKKFGPVVAPKPKVNPFRPGDSEPPPAPGAQRAQMGRVGEIPPPPPEDFPLPPPPLAGDGDDAEGALGGAFPPPPPPIEESFPPAPLEEEIFPSPPPPPEEEGGPEAPIPPPPQPREKVSSIDLEIDSLSSLLDDMTKNDPFKARVSSGYVPPPVATPFSSKSSTKPAAGGTAPLPPWKSPSSSQPLPQVPAPAQSQTQFHVQPQPQPKPQVQLHVQSQTQPVSLANTQPRGPPASSPAPAPKFSPVTPKFTPVASKFSPGAPGGSGSQPNQKLGHPEALSAGTGSPQPPSFTYAQQREKPRVQEKQHPVPPPAQNQNQVRSPGAPGPLTLKEVEELEQLTQQLMQDMEHPQRQNVAVNELCGRCHQPLARAQPAVRALGQLFHIACFTCHQCAQQLQGQQFYSLEGAPYCEGCYTDTLEKCNTCGEPITDRMLRATGKAYHPHCFTCVVCARPLEGTSFIVDQANRPHCVPDYHKQYAPRCSVCSEPIMPEPGRDETVRVVALDKNFHMKCYKCEDCGKPLSIEADDNGCFPLDGHVLCRKCHTARAQT

SEQ ID NO: 2442 - DNA, 2930 bp, Homo sapiens
ggcacgaggggcggcggagccgactcgtcgcggccgaggcgcacgcggtccgcgccggcgtcagtctgggattggccggcccgcgacttcctccgccccctgccaatcgccggggacgacttccgtgggtttttccggctctcccgcgtcgctaaggagcgacgggctgtcggccagaccccgagttctcggtgcgctcagcggccgccgacgctaggaggccgcgctccgcccccgctaccatgaggccccggaaagccttcctgctcctgctgctcttggggctggtgcagctgctggccgtggcgggtgccgagggcccggacgaggattcttctaacagagaaaatgccattgaggatgaagaggaggaggaggaggaagatgatgatgaggaagaagacgacttggaagttaaggaagaaaatggagtcttggtcctaaatgatgcaaactttgataattttgtggctgacaaagacacagtgctgctggagttttatgctccatggtgtggacattgcaagcagtttgctccggaatatgaaaaaattgccaacatattaaaggataaagatcctcccattcctgttgccaagatcgatgcaacctcagcgtctgtgctggccagcaggtttgatgtgagtggctaccccaccatcaagatccttaagaaggggcaggctgtagactacgagggctccagaacccaggaagaaattgttgccaaggtcagagaagtctcccagcccgactggacgcctccaccagaagtcacgcttgtgttgaccaaagagaactttgatgaagttgtgaatgatgcagatatcattctggtggagttttatgccccatggtgtggacactgcaagaaacttgcccccgagtatgagaaggccgccaaggagctcagcaagcgttctcctccaattcccctggcaaaggtcgacgccaccgcagaaacagacctggccaagaggtttgatgtctctggctatcccaccctgaaaattttccgcaaaggaaggccttatgactacaacggcccacgagaaaaatatggaatcgttgattacatgatcgagcagtccgggcctccctccaaggagattctgaccctgaagcaggtccaggagttcctgaaggatggagacgatgtcatcatcatcggggtctttaagggggagagtgacccagcctaccagcaataccaggatgccgctaacaacctgagagaagattacaaatttcaccacactttcagcacagaaatagcaaagttcttgaaagtctcccaggggcagttggttgtaatgcagcctgagaaattccagtccaagtatgagccccggagccacatgatggacgtccagggctccacccaggactcggccatcaaggacttcgtgctgaagtacgccctgcccctggttggccaccgcaaggtgtcaaacgatgctaagcgctacaccaggcgccccctggtggtcgtctactacagtgtggacttcagctttgattacagagctgcaactcagttttggcggagcaaagtcctagaggtggccaaggacttccctgagtacacctttgccattgcggacgaagaggactatgctggggaggtgaaggacctggggctcagcgagagtggggaggatgtcaatgccgccatcctggacgagagtgggaagaagttcgccatggagccagaggagtttgactctgacaccctccgcgagtttgtcactgctttcaaaaaaggaaaactgaagccagtcatcaaatcccagccagtgcccaagaacaacaagggacccgtcaaggtcgtggtgggaaagacctttgactccattgtgatggaccccaagaaggacgtcctcatcgagttctacgcaccatggtgcgggcactgcaagcagctagagcccgtgtacaacagcctggccaagaagtacaagggccaaaagggcctggtcatcgccaagatggacgccactgccaacgacgtccccagcgaccgctataaggtggagggcttccccaccatctacttcgcccccagtggggacaaaaagaacccagttaaatttgagggtggagacagagatctggagcatttgagcaagtttatagaagaacatgccacaaaactgagcaggaccaaggaagagctttgaaggcctgaggtctgcggaaggtgggaggaggcagacaccctgcgtggcccatggtcggggcgtccacgccgaggccggcaacaaacgacagtatctcggattccttttttttttttttttaattttttatactttggtgtttcacttcatgctctgaatactgaataaccatgaatgactgaatagtttagtccagatttttacagaggatacatctatttttatcattatttggggtttgaaaaatttttttttacaccttctaatttctttatttctcaaagcagataattcttctgtgtgaaaatgttttctttttttaatttaaggtttaaaattcctttgccaaatcatgttgattttgctctttgctttttcgttgtctgagaaattgttggcgtagatttggcttctggtatgtgtttctgattgcttcctgttgagcacaaagtgagagctgccactgagcagccctgccaggggtgctgtttcaggctgggcatcgccaggcggcctccctgcaaaccaagggctgggggcaaaggggcatgatccagggtcccccagggtgggctcagctccagggagaggccacccacgtggcagccccacctcttgagagcccccagtgccggagcagaaaggaccctggacccagaggcagatactgcggggtggtagaaaaggtagagtaggctgtggcaatggaataaaacacgattaaaaacgttaaaaaaaaaaaaaaaaaaa

SEQ ID NO: 2443 - protein, 645 aa, Homo sapiens
MRPRKAFLLLLLLGLVQLLAVAGAEGPDEDSSNRENAIEDEEEEEEEDDDEEEDDLEVKEENGVLVLNDANFDNFVADKDTVLLEFYAPWCGHCKQFAPEYEKIANILKDKDPPIPVAKIDATSASVLASRFDVSGYPTIKILKKGQAVDYEGSRTQEEIVAKVREVSQPDWTPPPEVTLVLTKENFDEVVNDADIILVEFYAPWCGHCKKLAPEYEKAAKELSKRSPPIPLAKVDATAETDLAKRFDVSGYPTLKIFRKGRPYDYNGPREKYGIVDYMIEQSGPPSKEILTLKQVQEFLKDGDDVIIIGVFKGESDPAYQQYQDAANNLREDYKFHHTFSTEIAKFLKVSQGQLVVMQPEKFQSKYEPRSHMMDVQGSTQDSAIKDFVLKYALPLVGHRKVSNDAKRYTRRPLVVVYYSVDFSFDYRAATQFWRSKVLEVAKDFPEYTFAIADEEDYAGEVKDLGLSESGEDVNAAILDESGKKFAMEPEEFDSDTLREFVTAFKKGKLKPVIKSQPVPKNNKGPVKVVVGKTFDSIVMDPKKDVLIEFYAPWCGHCKQLEPVYNSLAKKYKGQKGLVIAKMDATANDVPSDRYKVEGFPTIYFAPSGDKKNPVKFEGGDRDLEHLSKFIEEHATKLSRTKEEL

SEQ ID NO: 2444 - DNA, 3732 bp, Homo sapiens
gccgccgaaggggactgtttgctcctacgggctgtagatggagctgtccggccccggagagggggaaggcgcctggaaaacgttcttcttctccctggccgacccgagcggggaacagcactcccaggatgcagtttgtgtcaacacggccgcagcctcagcagctgggcatccagggcctggggctggacagcgggagctggagctgggcccaggctctgcccccggaggaggtctgccaccaggagccggcgctgcgcggggaaatggccgagggaatgccgcccatgcaggctcaagaatgggacatggacgcccggcggccaatgccttttcagttcccaccctttccagatagggcacctgtcttccccgaccgcatgatgcgagagccccagttgcccacagcagagatctcactctggactgtggtggctgccattcaggctgtggagaggaaggtggatgcccaggccagccagctgctgaacctggaggggcgcacggggacagccgagaagaagctggccgactgtgaaaagacggccgtggaatttgggaaccacatggagagcaagtgggccgtgctggggaccctgctgcaggagtacgggctgctgcagaggcggctggagaacttggagaacttgctgcgcaacaggaacttctgggtcctgcggctgcccccgggcagcaagggggaggcccccaaggttccagtgacttttgtcgacattgctgtgtacttctccgaagacgagtggaagaacttggacgaatggcagaaggagctttataacaaccttgttaaggagaactacaaaaccctcatgtccctggacgcggagggctcagtccccaagccagatgctccagtccaggctgagcccagggaagaaccttgtgtgtgggagcagcgccaccccgaagagagagaaatcccaatggatcccgaagcaggagcagagcccctggtgcctgcgcaggatgcgtcctcccaggtgaagcgtgaggacaccctgtgtgtccggggtcagcggggcctggaggaaagagccatccctacggaatccattaccgactccccaatttctgcccaggacctcttgtcccggattaaacaggaggagcatcagtgcgtgtgggatcagcaggatttggcagacagagatattcccacggatcccaattcagagtctctcatctcagcacatgacattttgtcatggatcaagcaggaggagcagccatacccatggggaccacgcgactcaatggacggagagcttggattagactctggccctagtgacagcctgctgatggtgaagaacccacccccggccccgccacagccccagccccagccccagccaccgcagccgcagctgcagtcgcagccccagccccagagcctgccccccatcgcggtggccgagaacccgggcggccccccgagccgagggctgctggacgacggtttccaggtgctgcccggggagcgtggctccggcgaggcgccgccgggtggggaccgcagcaccgggggcggcgggggcgatgggggcggtgggggcggcggcgcggaggcggggacgggggcaggcggcggctgtggcagctgctgccctggcgggctgcggcggagcctcctcctgcacggcgcccgcagcaagccctactcgtgccccgagtgcggcaagagcttcggcgtgcgcaagagcctcatcatccaccaccgcagccacaccaaggagcggccctacgagtgcgctgagtgcgagaagagcttcaactgccactcgggcctcatccgccaccagatgacgcaccgcggcgagcggccctacaagtgctcggagtgcgagaagacctacagccgtaaggagcacctgcagaaccaccagcggctgcacacgggcgagcggcctttccaatgtgcactgtgcggcaagagcttcatccgcaagcagaacctgctcaagcaccagcgcatccacacgggcgagcgcccctacacgtgcggcgagtgcggcaagagcttccgctacaaggagtcgctcaaggaccacctgcgcgtgcacagcggcggcccgggccccggcgccccacggcagctcccgccgcctcctgagcgagactagggctgggctgggggagggcagggccggacggagtggatcgggggcggcctgagcaccaaccaccttgccgggtgtcctcagccaccgtctggaaatcggcaacaggcattgcactccggttgggggtccccagggtggggcagggatcccccagatctgtctggtctgaatggacgcccagctcatctagggtggacccagctgctggggaagagccagggggaccgcgaggagccgagcgtcctcgggcaccgccctcacacctcctcgagtgccctgggaccactgggccacagatggtcatcaggggaagccaccagggagtcccgaagcccttctgagatcaggaaatcaggtcccaaggttaggagacgccctgaaaaaaagcgaaggccgagggatgtgctaagggtaacaccttcatgatgacaacactgcctcgcgtttcaatagcgctttatacttttttaagtgttttctatccgttatccatttcacccttggcctatccctctcagataggtggggtaggattttcctggtgaccgagtaaagtgagaggcaggtgagacggttcacccaatcacacgggaaggggcgcgcgctgcccaaccgcgctctccgcctacctccgctgctcgggaagctgctggcctggccctcctggtctctcttcctttcctggtctctcttcctttccttgctctcacccacggataaaaccagaagcgacaggaggccagctcctggggttcctgggagccgggaacagattggctacggaacgccccaggttgtacattcagagggctctttctccatgggagctcctggtgccgcctcggccccagcctgtccccagcccctcaatctggtgcagcagcatcttgtcactgcacaacagtggcctggtcccccacaggcagttagggccccaggtcagacctcaccatgatgatttgttccagttctcccagggcagaggggcgagggagaggcttttgctgtgagagtagccgtcacgtgtctcttcccagcagcgccgggcaagtgggtgctagagtctgagcctcaggctctcctgccctgggcctcccaattggtgctatctgttactgcccgtgctcacggacatggatacagaccctgctgtgctccacaccctgcaggcgcctcgggaagcgcccaaaggattccccttcacgttggtgcacctgctccatagctccgggcgctgcgtcccgaggggccacagtctccatttcagcgtcttgcatggcctggcaccgggtggggtggtatgccccaggacccttgtttgtgtcaaaaatgactttccctgcccttgccgtgggtccggcgttcctcccagccgggatcacagtgggcagccggcacccggcaccactttggcgagcgtcctgcttccgccctcgccctcatctacgctgctccgctttcctcagacccctttttgccgtgcaaagggaattcttgacattaaataaaaggtatccagattgcagactgcatgttcacagagctgggggttctccagcttgcctacagtaaagcctcaatgaactgg

SEQ ID NO: 2445 - protein, 671 aa, Homo sapiens
MQFVSTRPQPQQLGIQGLGLDSGSWSWAQALPPEEVCHQEPALRGEMAEGMPPMQAQEWDMDARRPMPFQFPPFPDRAPVFPDRMMREPQLPTAEISLWTVVAAIQAVERKVDAQASQLLNLEGRTGTAEKKLADCEKTAVEFGNHMESKWAVLGTLLQEYGLLQRRLENLENLLRNRNFWVLRLPPGSKGEAPKVPVTFVDIAVYFSEDEWKNLDEWQKELYNNLVKENYKTLMSLDAEGSVPKPDAPVQAEPREEPCVWEQRHPEEREIPMDPEAGAEPLVPAQDASSQVKREDTLCVRGQRGLEERAIPTESITDSPISAQDLLSRIKQEEHQCVWDQQDLADRDIPTDPNSESLISAHDILSWIKQEEQPYPWGPRDSMDGELGLDSGPSDSLLMVKNPPPAPPQPQPQPQPPQPQLQSQPQPQSLPPIAVAENPGGPPSRGLLDDGFQVLPGERGSGEAPPGGDRSTGGGGGDGGGGGGGAEAGTGAGGGCGSCCPGGLRRSLLLHGARSKPYSCPECGKSFGVRKSLIIHHRSHTKERPYECAECEKSFNCHSGLIRHQMTHRGERPYKCSECEKTYSRKEHLQNHQRLHTGERPFQCALCGKSFIRKQNLLKHQRIHTGERPYTCGECGKSFRYKESLKDHLRVHSGGPGPGAPRQLPPPPERD

SEQ ID NO: 2446 - DNA, 497 bp, Homo sapiens
tcttgtcccggattaaacaggaggagcatcagtgcgtgtgggatcagcaggatttggcagacagagatattcccacggatccctcgggaagcgcccaaaggattccccttcacgttggtgcacctgctccatagctccgggcgctgcgtcccgaggggccacagtctccatttcagcgtcttgcatggcctggcaccgggtggggtggtatgccccaggacccttgtttgtgtcaaaaatgactttccctgcccttgccgtgggtccggcgttcctcccagccgggatcacagtgggcagccggcacccggcaccactttggcgagcgtcctgcttccgccctcgccctcatctacgctgctccgctttcctcagacccctttttgccgtgcaaagggaattcttgacattaaataaaaggtatccagattgcagactgcatgttcacagagctgggggttctccagcttgcctacagtaaagcctcaatgaactgg

SEQ ID NO: 2447 - DNA, 2965 bp, Homo sapiens
agtgcctgcgcttcttccagcagcgcaagagcctgctgctgcaccagcgcctgcacaccggcaatggccagggctggcccgcctgcccctactgcggcaaggccttccgccggccctcggacctcttccggcaccagcgcatccacaccggtgagcggccctaccagtgcccccagtgtggccggaccttcaaccgcaaccaccacctggccgtgcacatgcagacccacgcccgaggccaggtgggcccacacttccctgccgcccccgcccgccacgggagcctgcccctgccctggcccagccggaaggaggagggctgacctggcaggagcccacagaggacccctggcggggtctctcccctgtgcctgacgcaggttcttccttttcctgggatggagagaggtttgttgtttttacccattcaaatgggaagctagctgcccttctggtgacattgtgtgtgaccgggtgctttctgtttcctgtttgcactcttcgctgccttttctgcattcctgacttctaaaagatgccttaaggcttaagggatgccatatttttgataaggcctctggtaggtaccacagccaagaggaccagagatcatggcccttccagtatgggggcgatagagacatcggggacctgggatttttgttttgtgcagagatctcctgcctgctgtcaccatgagaaacagtggagtggagtggatggatggcctgacttgaagaaagggccctggaaagttttctactttgctattttgaaatttttttcccttcttatagagactttgaaatacttttgtaaatgtgtgtagttgttaatggaactttgccttttgcaaagtcggaaagagtcggcttttccatgtgaggctcgcagagctgaaaggggagctacgtccaccagcctgtgggtcttttggttttttttttgttgttgttgttgtttttttaagatggagtttcactcttgttgcccaggctggagtgcaatggtacaatctccgctcactgcaacctccgcctctcgggttcaggtgattctcctgcctcagcctcctgagtagctgggattacaggcgcccaccaccactcccggctaatttttgtatttttagtagagacagggtttcatcatgttgtccagactggtctcgaactcctgatgttaggtgacccgcacacctcggcctcctgaagtgctgggattacaggcgtgagccaccactcttggcccagcctgtgggttttgatggggatgtcttggctgctgtcttggaggcacagtgtctccccatgtgtgtgtttcttggcccagagtgactcccagtattcctagtccttccccacaggatagtcacatccattatttacttttgttgtcagctgggaggggaaactgaagcctggacacgtctccccaagggctcagtgttcatgggtgtgtaagatccattgactggaccccagaaagcaccctgaggggcagtgcagagagagcccaggaagcccctccactagaggaggcccttggtctggctgaggaccacgtccaccctgggcctccaggcctgcttttcacattaaaggcggggcagtctcctctcaaaggagttctcccttgagcactttgggctctggggcagagttgggctaggagatctgggtgaatcctttagtcacagctagtctcatgttcctcttctgtcaaaggggtcatggccccagtgtgtcctacctcagagttgtcagggtcaaagtaacaggcactgggacaaatatgaagcctagctttgtgcttcctttcaaattcagggcctcctttctactccattccagcctttttttcctgtcagaatccctcaggaaggacctttatcttctggagtgagtggcagttccactgggttcagtgaaagagtcgcccatggggctctgttccccaggagtcctttgtattttggtgaacaaattcttaccaaagcatgagattcggactgtagaagttcagactgcctcagttcagactgcctcatggggcagtctggaggtcagctggcttctggtgtctctcatcacaccactgcggacgctgtctgtagagcagccttggtgtgggtgactctgaagctggagtgatgggaccccagctatccttgttttttaccgccttgtctggcactgtgaccacgcttcagggctgcttctgggggtcttggtccctggatgtgccatttccttgcccttctgaccctcacacttcttccaaagtcttgagcagagttgggggccaatggtagcattgctgtcatctctgggaggagagtgagtatacaagtcagtgacagttcagccaggctcccttgggtttgggaagaggcactgcccttctgtgctgtggatcctgcttgtctgctctggagtccccccacccttgccaggagcttcacaaaccagagacgggctgtcagcaagagctcagacaggatgtggtgcaagtgcaggtgcacgagtttaaccctcagctgcaggagctagtctcaggtgttctggggatgcctcaggctaagaattttgccgactttctgggcttggttggctaatgccaaatgcccctgcttaaatatcacaaggtgctgattctccttttttctttttttcataccaatgtgctcaaactttgagctaggtcttgtgagtttgcctagcactcagacctgtttaagtaacgttctttacattgaaacaagtcaaccgaagctttgtggtgcaggagctgagggtgccccagactcagtgggagccctggttgggccccaaactctcccagcagggtcctcggtttcctcatttgtgaaataaatgagtgggccacgacgttaataagcccaagagaactgtgaaggtggtagtcccttgccctaattggtgctcaataaagttgttggcat

SEQ ID NO: 2448 - protein, 103 aa, Homo sapiens
MARAGPPAPTAARPSAGPRTSSGTSASTPVSGPTSAPSVAGPSTATTTWPCTCRPTPEARWAHTSLPPPPATGACPCPGPAGRRRADLAGAHRGPLAGSLPCA

SEQ ID NO: 2449 - DNA, 1505 bp, Homo sapiens
gcacgaggccagcttggccagtggctccgcaggctgccggctccacccctcagggactggctggcttcgagcagggcatcggaaccaggcctcctggcactggcctgggtagagccagggcgagcaccagctgacccccagtggaaccctgtgacagtcctgccagggcccaggccatcccaaccgacttccatctcatggaccctccagcggagaagccgggagaggctggcggactgcagatcacaccccagctgctgaagtcacgcacaggcgagttctccctggagtccatcctgctactgaagctgcgtggcttgggactggctgacctgggctgcctgggagagtgcctgggcctggagtggctggacctatcaggcaacgcgctcacccacctgggcccgctggcctccttgcgccagctagctgtgctcaatgtctccaacaatcggctgacgggcctggagccactggccacctgtgagaacttgcagagtctcaatgccgcaggcaacctactggccaccccgggccagctgcagtgtctggctgggctaccgtgcctggagtacctgcggctccgagaccctttggcccggctcagcaacccgctctgtgccaacccctcctactgggctgcagtccgggagctgctgcctggcctgaaagtcatcgacggtgagcgtgtgattgggcgtggtagtgagttctaccagctgtgccgagacctggacagctccttgcgtcccagctccagtccaggccccagagccaccgaggcccagccctgggtggagccaggctactgggagtcctggcccagccggagcagctccatcctggaggaggcctgccggcagttccaggacacactgcaggagtgctgggacctggaccgccaggccagcgacagcctggcccaggcggagcaggtactcagctctgcgggccccacctcttccttcgtcttctgaacgtggcctatggcccaggacagcctggcaggtggcctcgctgcccccagttcccctctctgcccccacactcgtcttagttgcttcacactggtcactggccctgcacactgggctattgctttatccctatcctgagagcagcccctccccaccatccctccacatgctgcaaggacagactgaagggctgtgagcaggtgtaagggctcccacatccgtgagcctgtgtccgcagctgctgccactctgggctgctccagcctgcaacttagtggaaggaattacttcctcctgaggctacaggcgagaaaggtagggatgggccagcctcccgtctcagctgttgggagacagtaggcaggctgagtggcccagagcactcctggaagtgggactcccctgccttgcaaatgtgcctctccagactgctcctgcacttaccccctccccgcagcaccttctctgcccgttcttgtccacacatctattaaatgcttctgttttcaaaaaaaaaaaaaaaaaaaa

SEQ ID NO: 2450 - protein, 259 aa, Homo sapiens
MDPPAEKPGEAGGLQITPQLLKSRTGEFSLESILLLKLRGLGLADLGCLGECLGLEWLDLSGNALTHLGPLASLRQLAVLNVSNNRLTGLEPLATCENLQSLNAAGNLLATPGQLQCLAGLPCLEYLRLRDPLARLSNPLCANPSYWAAVRELLPGLKVIDGERVIGRGSEFYQLCRDLDSSLRPSSSPGPRATEAQPWVEPGYWESWPSRSSSILEEACRQFQDTLQECWDLDRQASDSLAQAEQVLSSAGPTSSFVF

SEQ ID NO: 2451 - DNA, 2433 bp, Homo sapiens
ggcaggcaccagctggggaaggctggtgttgccttgtcggccacattctggagcccggcagacagcctcagcaagctcctgtagcccttccagatggtggtccgcgaggcgagtgcggcacaggcctctctgagccaggtgctgccccagctgcgctacctgcacatcttcctggagcaggttcacacacactttcaggagcagagtgtcggggagaggggcgcagccatccagctggctgaggggttggcccggcagctctgcaccgactgtcagctcaacaagctcttctaccgcgaggagtttgtgctggccaccttgctggacccttgcttcaaggggaagattgaggccatcctgccatgggggccgaccgacattgaccactggaagcaagtcctcgtgtacaaggtgaaggagattagagtgtctgaatactctttgaactccccaagtcccctgcaaagccccaggggtctgtgcgtggaccccaccagggtagccaagagctccggggtggaggggagaagccagggggagcctctgcagagcagcagccactctggggccttcctgctggcccagagggagaagggcttgctggagagcatggggctgctggcctctgagagaagcgggggctcgctgtccaccaagagccactgggccagcatcattgtcaagaagtatctgtgggagaatgagaccgttggagcccaggatgaccccctggcttactgggagaagaagcgagaagcctggccaccatctatctgtcttaccccccacaggagccttctctgaaagcatctttgcctccctgaacagccccacccttgtagagcaaaactcttctctcaaggtggaagccattgagcatctcctcttcttgaaggccaacctggagcagttccccaactacaccccgcctcccctcatctgctctagtggtgacctggccaaggggatacagaccctgcagtccgctcagggtgggatggcagacatggcaggtgccggtgctcaccctgcccgtgaactcctagagagcccctgcctgtaataggtcaaagcagagagctgggtgttgcatcctgggcgccacatgctcatggccagaatcttaaacctatttggtaggaaagggtcagtttctcacttgacagattgccatatttttttttctgggagatgtcattttccatctcccgattacttcctttacgtctagcagtatgtgccgagaagaggcttactctcttcgtaggtgactgtgaattttgtactacgtggctttgtacatgtgatgctctgttaaaacataagtgggtatgaaggtccttgcatacaccttgtctgtgtggataagtggacacatgcccttaagaggcttgctttctcaaaaagtggccaaggatgtggagtgggcatgtgctggcaggtgggatatgtcctcagcctttgggggcctggataagctattgcagcactttctgaggctttcactgtagggagaaggaaaccccaagggtagaatagccatttccagagggaagtacacacatacccccacacaccagtctttttgggggtttcagagtggccggagaaaccgactgaagggactgaccagctagctaggagagctgagacgccagtcctcaaatggcgttcttaccaatagtctatttccagactactggaaacgttggggtttcttcctccagtgacagcagcctcagtagctttcctgggctccaggcggctggctgcacaccctgcctgccatcacccttgcccctgcttgtcctggaccacttttaaaggggaagtcccttatttggaagagagaaaggatgtgtgtagcacacactcatcatggattgctcagagttcctttagggcagagctgagggcctgggatccaggaaccagtgggattggatgggagaagaaggaagggggtggcccgtcacccccgcaagacttgcatccaggtagcctaaggactcctggtcactgggtagggtggctgctgagatgcaggtcggaagaggcaggggaaggctccaggcctaacttggagcatgtcactggccatgggggtgaggggacagactctgctctcactggctggcagccccaggagcctgttcccttgcctctcctggatgggttgtcagccctgtgtttcactgtgaccaattcattataacatttggatattactgaaaatgtaaggaagcaggaaaaattaactactttcattcagagatagcctctatcaatagtttgacatttttccctcttttacattgagatcataccctaggtactgtttagtatgcaatattttcattttcgcagtataataattgcacctgttaaataaagttttgtaaacatttaaaaaaaaaaaaaaaaaaaaaaaaa

SEQ ID NO: 2452 - protein, 236 aa, Homo sapiens
MVVREASAAQASLSQVLPQLRYLHIFLEQVHTHFQEQSVGERGAAIQLAEGLARQLCTDCQLNKLFYREEFVLATLLDPCFKGKIEAILPWGPTDIDHWKQVLVYKVKEIRVSEYSLNSPSPLQSPRGLCVDPTRVAKSSGVEGRSQGEPLQSSSHSGAFLLAQREKGLLESMGLLASERSGGSLSTKSHWASIIVKKYLWENETVGAQDDPLAYWEKKREAWPPSICLTPHRSLL

SEQ ID NO: 2453 - DNA, 3003 bp, Homo sapiens
cttgaaatgttatctaaaaacccaagattgaaataatacataccacacaaggaaacaggagagtagtctagctccatgtccggggctctaggggttcatagatggcagctcctgtccggggctgaggttgggaggggagaaacaggggcagagtgagttggtctctggagtgactgtgcttttccaccctcagcagaggaagaaccgatgctggaacgtcgttgcaggggccccctggccatgggcctggcccagccccgactcctttctgggccctcccaggagtcaccccagaccctggggaaggagtcccgcgggctgaggcaacaaggcacgtcagtggcccagtctggtgcccaagccccaggcagggcccatcgctgtgcccactgtcgaaggcacttccctggctgggtggctctgtggcttcacacccgccggtgccaggcccggctgcccttgccctgccctgagtgtggccgtcgctttcgccatgcccccttcttagcactgcaccgccaggtccatgctgctgccaccccagacctgggctttgcctgccacctctgtgggcagagcttccgaggctgggtggccctggttctgcatctgcgggcccattcagctgcaaagcggcccatcgcttgtcccaaatgcgagagacgcttctggcgacgaaagcagcttcgagctcatctgcggcggtgccaccctcccgccccggaggcccggcccttcatatgcggcaactgtggccggagctttgcccagtgggaccagctagttgcccacaagcgggtgcacgtagctgaggccctggaggaggccgcagccaaggctctggggccccggcccaggggccgccccgcggtgaccgccccccggcccggtggagatgccgtcgaccgccccttccagtgtgcctgttgtggcaagcgcttccggcacaagcccaacttgatcgctcaccgccgcgtgcacacgggcgagcggccccaccagtgccccgagtgcgggaagcgctttaccaataagccctatctgacttcgcaccggcgcatccacaccggcgagaagccctacccgtgcaaagagtgcggccgccgcttccggcacaaacccaacctgctgtctcacagcaagattcacaagcgatccgaggggtcggcccaggccgcccccggcccggggagcccccagctgccagccggcccccaggagtccgcggccgagcccaccccggcggtacctctgaaaccggcccaggagccgccgccaggggccccgccagagcacccgcaggacccgatcgaagcccccccctccctctacagctgcgacgactgcggcaggagcttccggctggagcgcttcctgcgggcccaccagcggcagcacaccggggagcggcccttcacctgcgccgagtgcgggaagaacttcggcaagaagacgcacctggtggcgcactcgcgcgtgcactccggcgagcggcccttcgcctgcgaggagtgcggccgccgcttctcccagggcagccatctggcggcgcatcggcgcgaccacgcccccgatcggcccttcgtgtgtcccgactgcggcaaggccttccgccacaaaccctacctggcggcgcaccggcgcatccacaccggcgagaagccctacgtctgccccgactgcggcaaagccttcagccagaagtccaacctggtgtcgcaccggcgcatccacacgggcgagcggccctacgcctgtcccgactgcgaccgcagcttcagccagaagtccaacctcatcacccaccgcaagagccacatccgggacggcgccttctgctgtgccatctgtggccagaccttcgacgacgaggagagactcctggcccaccagaagaagcacgatgtctgagacggtgggcggggccgtgttggctgagagagggctggggtccttcgtggtgggagtcgcagtgggctgggggtgcctgcctagtgctggagtaggggacaatgggaatcctagaggggatggaagacgcggggagtgagctgggtgggccctgctagcgagagaggtcaaccccggtggccagggaacccacttccaagcgcagggacgccggcctccagctggtgtgtgctaaggctccgtcctgactgccctgtgccctggaaaagcagcaatagcatccgccccttagagccctctggctagaggagccaccagtggaaaggaagaccctccatcctctggtattaacgccttaatgcccctgtcttttactgtaagttacttaagatcatttttggaagcaggcgtggtagagtcctgtaaatgaatgctctgggctagatacagcttggagaacctgctggccttgttagacagcacttgggcctttgccagcagcaagaggtgaagcgaagccactcttacctctcccttcccctcccacctgccccctgcgtaggcacccagacttggagagacccgtctgctgttaatacttccatcctcttccttcccaaagagcagatcccaaggcatttactccttggtctgtctcgctttatctgtcgcccctcccagcgctgagagcctcccctggctgtcagcagcactgtgtccaggctcttgtctgaacaccgcagcccctccttcgctccttccagagctcagcatgtcacggcaaggactgccgcattggtgatggagggccagctgaggggaagttgctggtgagtttccttttctccatttctagcatatggacacctggcctctgcttgagcacttaggtgacaggaacttccgcacctcctgaggccctggatgattctaattgttagaaattctaattgttagaaatccttccttataatgaatgaattctgctttcctataatttctacctattgggccttgttctgttctctggaactaaacagaacaaccatttacccctccttttcaaactagagaataaagatttggttttag

SEQ ID NO: 2454 - DNA, 4061 bp, Homo sapiens
ggggagccgggagccgagcgaggacccggcgcccgcagtccagtcttggccgcgcccgtgctcggcttggccgcggggtgcggggaccacggcccggccgggccacccgaagcctagtgctgggccgggccgggccggggtgggtgggggcccgcccggcccgcccatgggctcaggatgccggtgcggaggggccacgtcgcgccgcagaacaccttcctggacaccatcatccgcaagtttgagggccagagccgtaagttcatcatcgccaacgctcgggtggagaactgcgccgtcatctactgcaacgacggcttctgcgagctgtgcggctactcgcgggccgaggtgatgcagcgaccctgcacctgcgacttcctgcacgggccgcgcacgcagcgccgcgctgccgcgcagatcgcgcaggcactgctgggcgccgaggagcgcaaagtggaaatcgccttctaccggaaagatgggagctgcttcctatgtctggtggatgtggtgcccgtgaagaacgaggatggggctgtcatcatgttcatcctcaatttcgaggtggtgatggagaaggacatggtggggtccccggctcatgacaccaaccaccggggcccccccaccagctggctggccccaggccgcgccaagaccttccgcctgaagctgcccgcgctgctggcgctgacggcccgggagtcgtcggtgcggtcgggcggcgcgggcggcgcgggcgccccgggggccgtggtggtggacgtggacctgacgcccgcggcacccagcagcgagtcgctggccctggacgaagtgacagccatggacaaccacgtggcagggctcgggcccgcggaggagcggcgtgcgctggtgggtcccggctctccgccccgcagcgcgcccggccagctcccatcgccccgggcgcacagcctcaaccccgacgcctcgggctccagctgcagcctggcccggacgcgctcccgagaaagctgcgccagcgtgcgccgcgcctcgtcggccgacgacatcgaggccatgcgcgccggggtgctgcccccgccaccgcgccacgccagcaccggggccatgcacccactgcgcagcggcttgctcaactccacctcggactccgacctcgtgcgctaccgcaccattagcaagattccccaaatcaccctcaactttgtggacctcaagggcgaccccttcttggcttcgcccaccagtgaccgtgagatcatagcacctaagataaaggagcgaacccacaatgtcactgagaaggtcacccaggtcctgtccctgggcgccgacgtgctgcctgagtacaagctgcaggcaccgcgcatccaccgctggaccatcctgcattacagccccttcaaggccgtgtgggactggctcatcctgctgctggtcatctacacggctgtcttcacaccctactcggctgccttcctgctgaaggagacggaagaaggcccgcctgctaccgagtgtggctacgcctgccagccgctggctgtggtggacctcatcgtggacatcatgttcattgtggacatcctcatcaacttccgcaccacctacgtcaatgccaacgaggaggtggtcagccaccccggccgcatcgccgtccactacttcaagggctggttcctcatcgacatggtggccgccatccccttcgacctgctcatcttcggctctggctctgaggagctgatcgggctgctgaagactgcgcggctgctgcggctggtgcgcgtggcgcggaagctggatcgctactcagagtacggcgcggccgtgctgttcttgctcatgtgcacctttgcgctcatcgcgcactggctagcctgcatctggtacgccatcggcaacatggagcagccacacatggactcacgcatcggctggctgcacaacctgggcgaccagataggcaaaccctacaacagcagcggcctgggcggcccctccatcaaggacaagtatgtgacggcgctctacttcaccttcagcagcctcaccagtgtgggcttcggcaacgtctctcccaacaccaactcagagaagatcttctccatctgcgtcatgctcattggctccctcatgtatgctagcatcttcggcaacgtgtcggccatcatccagcggctgtactcgggcacagcccgctaccacacacagatgctgcgggtgcgggagttcatccgcttccaccagatccccaatcccctgcgccagcgcctcgaggagtacttccagcacgcctggtcctacaccaacggcatcgacatgaacgcggtgctgaagggcttccctgagtgcctgcaggctgacatctgcctgcacctgaaccgctcactgctgcagcactgcaaacccttccgaggggccaccaagggctgccttcgggccctggccatgaagttcaagaccacacatgcaccgccaggggacacactggtgcatgctggggacctgctcaccgccctgtacttcatctcccggggctccatcgagatcctgcggggcgacgtcgtcgtggccatcctggggaagaatgacatctttggggagcctctgaacctgtatgcaaggcctggcaagtcgaacggggatgtgcgggccctcacctactgtgacctacacaagatccatcgggacgacctgctggaggtgctggacatgtaccctgagttctccgaccacttctggtccagcctggagatcaccttcaacctgcgagataccaacatgatcccgggctcccccggcagtacggagttagagggtggcttcagtcggcaacgcaagcgcaagttgtccttccgcaggcgcacggacaaggacacggagcagccaggggaggtgtcggccttggggccgggccgggcgggggcagggccgagtagccggggccggccgggggggccgtggggggagagcccgtccagtggcccctccagccctgagagcagtgaggatgagggcccaggccgcagctccagccccctccgcctggtgcccttctccagccccaggccccccggagagccgccgggtggggagcccctgatggaggactgcgagaagagcagcgacacttgcaaccccctgtcaggcgccttctcaggagtgtccaacattttcagcttctggggggacagtcggggccgccagtaccaggagctccctcgatgccccgcccccacccccagcctcctcaacatccccctctccagcccgggtcggcggccccggggcgacgtggagagcaggctggatgccctccagcgccagctcaacaggctggagacccggctgagtgcagacatggccactgtcctgcagctgctacagaggcagatgacgctggtcccgcccgcctacagtgctgtgaccaccccggggcctggccccacttccacatccccgctgttgcccgtcagccccctccccaccctcaccttggactcgctttctcaggtttcccagttcatggcgtgtgaggagctgcccccgggggccccagagcttccccaagaaggccccacacgacgcctctccctaccgggccagctgggggccctcacctcccagcccctgcacagacacggctcggacccgggcagttagtggggctgcccagtgtggacacgtggctcacccagggatcaaggcgctgctgggccgctccccttggaggccctgctcaggaggccctgaccgtggaaggggagaggaactcgaaagcacagctcctcccccagcccttgggaccatcttctcctgcagtcccctgggccccagtgagaggggcaggggcagggccggcagtaggtggggcctgtggtccccccactgccctgagggcattagctggtctaactgcccggaggcacccggccctgggccttaggcacctcaaggacttttctgctatttactgctcttattgttaaggataataattaaggatcatatgaataattaatgaagatgctgatgactatgaataataaataattatcctgaggaga

SEQ ID NO: 2455 - DNA, 3961 bp, Homo sapiens
agtccagagcgagcgggttatgcctccgcctcgttgccctgaaagccgcagcgacagcgaaaagggctaagattcggccatgagcagcgcccctcggcgccccgccaagggcgcagattctttctgtacgccagagccagagagcttgggccctgggacgcctgggttccccgagcaggaggaagacgaacttcaccgcaccctgggcgtggagcggtttgaggagatcctacaggaggccgggtctcgtggaggggaggagccaggccgcagctatggggaggaagactttgagtaccaccgccagtcctcccaccacatccatcacccactgtccacccacctgcctccggatgcacgccgccgcaagacaccccagggcccaggacggaagcctcgaaggcgcccgggagcctccccgactggagaaaccccgaccattgaggagggggaggaagatgaggatgaggccagcgaggctgagggggcccgggctctcactcagccgtcccctgtctccacaccctcctcggtgcagttctttctccaagaggatgacagtgctgaccggaaggcagagaggaccagtccatcttcccctgcaccactgccccaccaggaggcgactcctcgggcctccaaaggggcccaggctggaacccaggtggaggaggcggaggcggaggcggtggcggtggccagtggcactgcagggggtgacgacgggggtgcctcggggcgccccctgcccaaagcccagcctgggcaccgcagctacaaccttcaggagaggaggcgcatcgggagcatgactggggctgagcaggcactgctgccccgggtccccacggatgagattgaggcccagacgctggccacggccgacctagacctcatgaagagtcaccggtttgaggacgttcctggggtgcggcggcacttggtgcggaagaatgccaaaggttccacacagagtggccgagaagggcgggagcctggccccacacctcgggcccgaccccgggccccccacaagccccatgaggtgtttgtggagctgaatgagttgctcctggacaaaaaccaggagccccagtggcgggagacagctcgctggatcaaatttgaagaggacgtggaggaggagactgagcgctgggggaagccccacgtggcctccctctccttccgcagtctcctggagctccgcaggaccctggcccatggggctgtgctcttggatctggaccagcagaccctgcccggagtggcccaccaggtggtggagcagatggtcatctctgaccagatcaaggccgaggacagggccaacgtgctgcgggctctgctgttgaaacacagccacccaagtgatgagaaggacttctccttcccccgcaacatctcagctggctccctgggctccctgctggggcatcaccatggtcagggggctgagagtgacccccacgtcaccgagcctctcatgggaggtgttcctgagacccggctggaggtggagcgagagcgtgagctgccgcctccagcaccaccagctggcatcacccgctccaagtccaagcacgagctgaaactgctggagaagattcctgagaatgccgaggccacggtggtccttgtgggctgcgtggagttcctctcccgccccaccatggcctttgtgcggctccgggaggctgtggagttggacgcagtgttggaggtgccggtgcctgtgcgtttcctcttcctgctgctgggcccgagtagtgccaacatggactaccacgagatcggccgctccatctccaccctcatgtcagacaagcaattccacgaggcagcctacctggctgacgagcgggaggacctgctgacggccatcaacgccttcctggactgcagcgtggtgctgccgccttcagaagtgcagggcgaggagctgctgcgctctgtggcccacttccagcgccagatgctcaagaagcgagaggagcagggccggctgctacctacaggggctgggctggagcccaaatctgcccaagataaggcgctcctgcagatggtagaggcggcaggggcagctgaagatgatccccttcggcggacggggcggccctttggggggctgatccgagatgtgcggcgccgctatccccactacctgagtgacttccgagatgcacttgaccctcagtgcctggccgcagtcatcttcatctactttgccgccctgtctcctgccatcacctttggggggctgctgggagagaagacgcaggacctgataggggtgtcggagctgattatgtccacagcgctccagggcgtggtcttctgcctgctgggtgcccagcccctgttggtgatcggcttctcagggcccctgctggtctttgaggaggccttcttctcgttctgtagcagcaaccacctggagtacctggtgggccgtgtgtggatcggcttctggctggtgttcctggccctgctcatggtggccctggaggggagcttcctggtccgcttcgtctcccgcttcacccaggagatcttcgccttcttgatctcactcatcttcatctatgagaccttctacaagctggtgaagatcttccaggagcaccccctgcatggctgctcagcctccaacagctcagaggtggacggcggtgagaacatgacatgggccggggcaagacccacgctggggccgggcaacaggagcttggctgggcagtctgggcaggggaagccccggggccagcccaacacggccctgctgtcgctggtgctcatggccggcaccttcttcatcgccttcttcctgcgcaaattcaagaacagccggttctttcctggccggatccggcgggtgattggggactttggggtgcccatcgccatcctcatcatggtgcttgtggattacagtattgaggacacctatacccagaagctgagcgttcccagtggattctcggtgactgccccagaaaagaggggctgggtcatcaaccccctgggagagaagagccccttccctgtgtggatgatggttgccagcctgctgcccgccatcctggtcttcattctcatcttcatggagacacagatcaccacgctcatcatctccaagaaggagcgcatgctgcagaagggctccggcttccacctggacctgctgctcatcgtggccatgggcggcatctgtgccctctttggcctgccctggttggctgctgccactgtccgctctgtcactcacgccaacgcgctcactgtcatgagcaaggctgtggcacctggggacaagcccaagattcaggaagtcaaggagcagcgggtgacggggctgctggttgccctgcttgtgggcctctccatagttatcggggatctgctccggcagatccccctggccgtgctctttggaattttcctgtacatgggagtcacctcccttaacgggatccagttctatgagcggctgcatctgctgctcatgccgcccaaacaccacccagatgtcacttacgtcaagaaggtccggaccctccgtatgcacctgttcacggccctgcagctgctctgcctggccctgctctgggccgtcatgtccacagctgcctccctggccttccccttcatcctcatcctcacagtgccgctccgcatggtggtgctcacccgtatcttcaccgaccgagagatgaaatgtctggatgctaacgaggcagagccggtgtttgatgagcgggagggtgtggacgagtacaatgagatgcccatgcctgtgtagccgccaccgagggacagccgagggaccgatggacgaggggacaggctggtgggatggggttccccctcccatgcccctccctcctttttatttaagtgaataatttaaagtcttctcctcccccactgcccctgcagtaaagtgctttggccccca

SEQ ID NO: 2456 - DNA, 1347 bp, Homo sapiens
gcggcggcggggaaggaggggtgcttcaggtgcctgcgacctccgcgcctcccgcccggaagtgcccgaggggccgcgatggagctgggggagccgggcgctcggtagcgcggcgggcaaggcaggcgccatgaccctgattgaaggggtgggtgatgaggtgaccgtccttttctcggtgcttgcctgccttctggtgctggcccttgcctgggtctcaacgcacaccgctgagggcggggacccactgccccagccgtcagggaccccaacgccatcccagcccagcgcagccatggcagctaccgacagcatgagaggggaggccccaggggcagagacccccagcctgagacacagaggtcaagctgcacagccagagcccagcacggggttcacagcaacaccgccagccccggactccccgcaggagcccctcgtgctacggctgaaattcctcaatgattcagagcaggtggccagggcctggccccacgacaccattggctccttgaaaaggacccagtttcccggccgggaacagcaggtgcgactcatctaccaagggcagctgctaggcgacgacacccagaccctgggcagccttcacctccctcccaactgcgttctccactgccacgtgtccacgagagtcggtcccccaaatcccccctgcccgccggggtccgagcccggcccctccgggctggaaatcggcagcctgctgctgcccctgctgctcctgctgttgctgctgctctggtactgccagatccagtaccggcccttctttcccctgaccgccactctgggcctggccggcttcaccctgctcctcagtctcctggcctttgccatgtaccgcccgtagtgcctccgcgggcgcttggcagcgtcgccggcccctccggaccttgctccccgcgccgcggcgggagctgctgcctgcccaggcccgcctctccggcctgcctcttcccgccgccctggagcccagccctgcgccgcagaggactcccgggactggcggaggccccgccctgcgaccgccggggctcggggccacctcccggggctgctgaccctcagcccgcactgggagtgggctcctcggggtcgggcatctgctgtcgctgcctcggccccgggcagagccgggccgccccgggggcccgtcttagtgttctgccggaggacccagccgcctccaatccctgacagctccttgggctgagttggggacgccaggtcggtgggaggctggtgaaggggagcggggaggggcagaggagttccccggaacccgtgcagattaaagtaactgtgaagttttcaaaaaaaaaaaaa

SEQ ID NO: 2457 - protein, 246 aa, Homo sapiens
MTLIEGVGDEVTVLFSVLACLLVLALAWVSTHTAEGGDPLPQPSGTPTPSQPSAAMAATDSMRGEAPGAETPSLRHRGQAAQPEPSTGFTATPPAPDSPQEPLVLRLKFLNDSEQVARAWPHDTIGSLKRTQFPGREQQVRLIYQGQLLGDDTQTLGSLHLPPNCVLHCHVSTRVGPPNPPCPPGSEPGPSGLEIGSLLLPLLLLLLLLLWYCQIQYRPFFPLTATLGLAGFTLLLSLLAFAMYRP

SEQ ID NO: 2458 - DNA, 2197 bp, Homo sapiens
cccagctccctgaaacaacagtaacctacccctgtgggtcatcatcatgccctccgacctggccaagaagaaggcagccaaaaagaaggaggctgccaaagctcgacagcggcccagaaaaggacatgaagaaaatggagatgttgtcacagaaccacaggtggcagagaagaatgaggccaatggcagagagaccacagaagtagatttgctgaccaaggagctagaggactttgagatgaagaaagctgctgctcgagctgtcactggcgtcctggcctctcaccccaacagtactgatgttcacatcatcaacctctcactcacctttcatggtcaagagctgctcagtgacaccaaactggaattaaactcaggccgtcgttatggcctcattggtttaaatggaattggaaagtccatgctgctctctgctattgggaagcgtgaagtgcccatccctgagcacatcgacatctaccatctgactcgagagatgccccctagtgacaagacacccttgcattgtgtgatggaagtcgacacagagcgggccatgctggagaaagaggcagagcggctggctcatgaggatgcggagtgtgagaagctcatggagctctacgagcgcctggaggagctggatgccgacaaggcagagatgagggcctcgcggatcttgcatggactgggtttcacacctgccatgcagcgcaagaagctaaaagacttcagtgggggctggaggatgagggttgcccttgccagagccctctttattcggcccttcatgctgctcctggatgagcctaccaaccacctggacctagatgcttgcgtgtggttggaagaagaactaaaaacttttaagcgcatcttggtcctcgtctcccattcccaggattttctgaatggtgtctgtaccaatatcattcacatgcacaacaagaaactgaagtattatacgggtaattatgatcagtatgtgaagacgcggctagagctggaggagaaccagatgaagaggtttcactgggagcaagatcagattgcacacatgaagaactacattgcgaggtttggtcatggcagtgccaagctggcccggcaggcccagagcaaggagaagacgctacagaaaatgatggcatcaggactgacagagagggtcgtgagcgataagacactgtcattttatttcccaccatgtggcaagatccctccacctgtcattatggtgcaaaatgtgagcttcaagtatacaaaagatgggccttgcatctacaataatctagaatttggaattgaccttgacacacgagtggctctggtagggcccaatggagcagggaagtcaactcttctgaagctgctaactggagagctactacccacagatggcatgatccgaaaacactctcatgtcaagatagggcgttaccatcagcatttacaagagcagctggacttagatctctcacctttggagtacatgatgaagtgctacccagagatcaaggagaaggaagaaatgaggaagatcattgggcgatacggtctcactgggaaacaacaggtgagcccaatccggaacttgtcagacgggcagaagtgccgagtgtgtctggcctggctggcctggcagaacccccacatgctcttcctggatgaacccaccaatcacctggatatcgagaccatcgacgccctggcagatgccatcaatgagtttgagggtggtatgatgctggtcagccatgacttcagactcattcagcaggttgcacaggaaatttgggtctgtgagaagcagacaatcaccaagtggcctggagacatcctggcttacaaggagcacctcaagtccaagctggtggatgaggagccccagctcaccaagaggacccacaacgtgtgcaccctgacattggcatctctgccaaggccatgagcatcatgaactcgtttgtaaacgacgtgtttgagcagctggcgtgtgaggctgcccggctggcccagtactcgggccggaccaccctgacatcccgagaagtccagacggctgtgcgtctgctgctgcctggggagctggccaagcacgctgtgtctgagggcaccaaggctgtcaccaagtacaccagctccaagtgacccagggcctgacaaaaataaagggtgaactgttaaaaaaaaaaaa

SEQ ID NO: 2459 - protein, 634 aa, Homo sapiens
MPSDLAKKKAAKKKEAAKARQRPRKGHEENGDVVTEPQVAEKNEANGRETTEVDLLTKELEDFEMKKAAARAVTGVLASHPNSTDVHIINLSLTFHGQELLSDTKLELNSGRRYGLIGLNGIGKSMLLSAIGKREVPIPEHIDIYHLTREMPPSDKTPLHCVMEVDTERAMLEKEAERLAHEDAECEKLMELYERLEELDADKAEMRASRILHGLGFTPAMQRKKLKDFSGGWRMRVALARALFIRPFMLLLDEPTNHLDLDACVWLEEELKTFKRILVLVSHSQDFLNGVCTNIIHMHNKKLKYYTGNYDQYVKTRLELEENQMKRFHWEQDQIAHMKNYIARFGHGSAKLARQAQSKEKTLQKMMASGLTERVVSDKTLSFYFPPCGKIPPPVIMVQNVSFKYTKDGPCIYNNLEFGIDLDTRVALVGPNGAGKSTLLKLLTGELLPTDGMIRKHSHVKIGRYHQHLQEQLDLDLSPLEYMMKCYPEIKEKEEMRKIIGRYGLTGKQQVSPIRNLSDGQKCRVCLAWLAWQNPHMLFLDEPTNHLDIETIDALADAINEFEGGMMLVSHDFRLIQQVAQEIWVCEKQTITKWPGDILAYKEHLKSKLVDEEPQLTKRTHNVCTLTLASLPRP

SEQ ID NO: 2460 - DNA, 1396 bp, Homo sapiens
gcgtaattaaaaggcggcggaagaaggtgggagggtcatgacgcagcgagtttcagtcgtgacttttctgggggcatcgcggcgtccccttttttttgcctttaaagtaaaacgtcgccccgacgcaccccccgcgtatttcggggggcggaggcggcgggccacggcgcgaagaggggcggtgctgacgccggccggtcacgtgggcgtgttgtgggggggaggggcgccgccgcgcggtcggttccgggcggttgggagcgcgcgagctagcgagcgagaggcagccgcgcccgccgccgcccctgctctgtatgccgctctctcccggcgcggccgccgccgatcacagcagcaggagccaccgccgccgcggttgatgtggttgggccggggctgaggaggccgccaagatgccgcagtccaagtcccggaagatcgcgatcctgggctaccggtctgtggggaaatcctcattgacgattcaatttgttgaaggccaatttgtggactcctacgatccaaccatagaaaacacttttacaaagttgatcacagtaaatggacaagaatatcatcttcaacttgtagacacagccgggcaagatgaatattctatctttcctcagacatactccatagatattaatggctatattcttgtgtattctgttacatcaatcaaaagttttgaagtgattaaagttatccatggcaaattgttggatatggtggggaaagtacaaatacctattatgttggttgggaataagaaagacctgcatatggaaagggtgatcagttatgaagaagggaaagctttggcagaatcttggaatgcagcttttttggaatcttctgctaaagaaaatcagactgctgtggatgtttttcgaaggataattttggaggcagaaaaaatggacggggcagcttcacaaggcaagtcttcatgctcggtgatgtgattctgctgcaaagcctgaggacactgggaatatattctacctgaagaagcaaactgcccgttctccttgaagataaactatgcttcttttttcttctgttaacctgaaagatatcatttgggtcagagctcccctcccttcagattatgttaactctgagtctgtccaaatgagttcacttccattttcaaattttaagcaatcatattttcaatttatatattgtatttcttaatattatgaccaagaattttatcggcattaatttttcagtgtagtttgttgtttaaaataatgtaatcatcaaaatgatgcatattgttacactactattaactaggcttcagtatatcagtgtttatttcattgtgttaaatgtatacttgtaaataaaatagctgcaaacctcaaaaaaaaaaaaaaaaaaa

SEQ ID NO: 2461 - protein, 184 aa, Homo sapiens
MPQSKSRKIAILGYRSVGKSSLTIQFVEGQFVDSYDPTIENTFTKLITVNGQEYHLQLVDTAGQDEYSIFPQTYSIDINGYILVYSVTSIKSFEVIKVIHGKLLDMVGKVQIPIMLVGNKKDLHMERVISYEEGKALAESWNAAFLESSAKENQTAVDVFRRIILEAEKMDGAASQGKSSCSVM

SEQ ID NO: 2462 - DNA, 4382 bp, Homo sapiens
gatttacttggagaagatttgctatctggcaaaaagaatcagtcggatttgtcagatgaagagctaaatgatgatcttttgcagagtgataatgaagatgaagaaaatttcagttctcagggtgttacaattagtctgaatgctacatctggcatggttacatcatttgaactctctgacaacactaacgaccaatctggagaacaggaatctgagtatgaacaagaacaaggagaggatgaactggtttatcacaaatctgatggatcagaattgtatactcaagagtacccagaagaaggacagtatgaaggccacgaagctgagttgacagaagaccaaatagaatatgtggaagagccagaggaggagcagctttacactgatgaagtgttagacatcgagatcaatgaacctttagatgaatttacaggaggtatggaaacattggaacttcaaaaggacatcaaagaagaatcagatgaagaagaagaagatgatgaagaatctggacgattacgtttcaaaactgaaaggaaagaaggaacaattattaggctctcagatgtaactagagagagaaggaacattccagaaactttggagctttcagcagaggccaaggcagcattgcttgaatttgaagaaagggagcgacagcataaacaaggacgctacagctccaggcggggaggacggcgaggaggtccgctgatgtgtcgtggtgtgggggaccagaggagagagagcaccgagaggggcaggatgaaggaccacagacctgcgctgcttcctacacagcctcctgtcgtgatacttccagaggaggaattaatgagcgacctgatgccctaagatgacataagctgttggaccttgctacctaaagcctctagagagccccaggctccccctccaccgcctccgccgcctcagcagcagccgatcagaagcctgttccagccgcagccgctgcagccgctgcttccggtgcagcacccgcaccacccatccccgcctcagggaatgcacatgcctccccagctagagaccccaaggatgatgatgaccccgccacccgtgactccacagcagcccaagaacatacacatcaacccgcacttcaaagggacggtggtcacgcctgttcaagtgcccttgctaccagttccgagccagccgagacctgccgtgggaccccagagattcccaggccctccagaatttccacagcatacacctggacctgttcccaacagtttcagccagcccccacgactccctctccaggaccagtggagagccccacccccgcctcaggatcgagaccctttcttcttaggagtttcaggtgaaccaagattcccgagccatctttttctggaacagcgaagtccccctccaccaccaccgcctcctacccttcttaacagtagccatcctgttcctactcagagtcctctaccattcactcagccaggaccagcatttaatcagcaaggacagcagccagtgttcccaagagagcggcccgtacgaccagccttgcagcctccaggtccggtggggattctgcactttagccagcctgggtcggcaaccacacggcccttcattcctcctagacagccgttcctgccaggcccaggacagccgtttctgcccacacacacacagcccaacctgcaggtaatgcatcctgagtgaacctccagggaaaaaatgtgtagcttcaaggctttgtgttccataaagtttcagatttttatttgagcctactaatttgtggttatttaaagaatagagtattagtctcaaatgtactgtttgttaaagacaacttttttcaacaatgttacttatctcaatacaagaaaaaaatgggaaaatgtcattttttgggaattgaaaaatgctacttattataattgtttaaagggtatactactaataaaattaggacatgttttgataatacatttgctcatctgtataaaatttcatgagaggtttaccagtggaaatactttgtcaaattatattcctgcagtagacagttttgaaaagagtctttgcatggagggaagaagatgttgctgttcactggttatttgaaggccttgagtgccctctgccgaccggcttctgcttcatgggttttcactggttatttgaaggccttgagtgccctctgcccatcggcttctgcttcatgggttgacatgcgtctgtaacatctttcttaccaagtgtatatttcttcttgtattgtagggttactattaaaatacatagcgatggtaaacttgaatcaactatttaaaaatacgtggaatacgtatctaagccaaaaacggaaaatgaatattatctagggtgttaaaggaagataaaatgtttttaagaatttttctttttattaaaaaaatgcaattaatacatccccattgcagaaattttcaagtatatataagaaaggaaattaaatactctcgttacctagaaacaattcaggagcttttttttttgtctttttttaaatgcacatcttctcgccacctgctttttccctccagtgtcacatatcatttgatcttttcatgtcagcgagttggttttgatgccatcgtttgagagtgctgtatgcggttccctttcatgctgtctgtgtggttgcatgtgtgtatactggtttcagtactttagtatcatagtgctacagggaacatgctttagagttatgagtttgtctgcatacctagttttccttaggacaattcaatcctagaattactggattaaatataaaatttaaggtaatagcttctggcttattactgcattttagatagtattaccttcatcagcaagtctaaaatgaagttttggtatcgctgaaagttcctttcttgtgttgaggttttttaggaaatgattgaagtgattatgcccggtgtaaccatttatgaactgttgtttctctttctttggaaatggaaggggccgttgcatcctccattgccccctccgcatcagcctcagcctcagcaacctcagcaacagcccccgccacagcaccagcctccgcaccagcccccgcaccagcccccgccccagcaccagcccccaccccagcacccaccacagcacccgccgcagcaccagcaccaccaccaccaccaccacctgtccgtcccgccccctcctttgatgccgatgtctcagccacagttccggcctcacgtacagaccgctcagcctcaggccagcagcagccggatgcagtgcccccagcgccaggggctccggcataatacaacttctcagaatgtaagcaagcggcccatgcagcaaatgcagcccactgcgccaaggaacagcaatttgcgtgaattacccatagcgccgtcacacgtgatagaaatgagcagcagccgctgctctgccacgccctcagcacaagtgaaacctatcgtcagcgcgtcaccaccctcgcgggccgtggcgggttccagaagctcacagggaaagacggaagtgaaagtcaagccagctagccctgtggctcaacctaaagaagaggcaaaaacagaaacagagtttcctgatgaagatgaggaaacaaggttatatcgcttaaagatagaagaacagaaacgcctaagagaagaaatcctgaaacagaaggagttacggcggcagcagcaggctggtgccaggaagaaggagctgctggagagactcgcgcagcaacagcagcagctgtacgctcccccacccccagcagagcaggaagagcaggcactgtcaccatcacccaccaacggtaacccactgttgccctttccaggtgcacaggtcagacaaaatgtgaagaacagacttcttgttaaaaaccaggatgtcagtatttcaaacgttcagcccaaaacatccaattttgtaccatccagtgccaacatgcagtatcaaggacaacagatgaaagcactgaaacatttgagacagaccagaacagttcctcaaagtcagactcagccgctgcataaagtgctcccgatcaaacctgcagatgtggaggagccagctgtcccccagactcctcgagtggcgtccatccagggccggccccaggacacaaagcctggcgtgaaaaggactgtcacgcacaggacaaacagtggtggtggagacgggccccacatcagctccaaggtcagggtgattaagctgtcaggtggggtaagttgacaagttttatgagagcctctttgagtctgtgtatcacatagaatgtcctcatttgcagagaatgtttttgaagaaagaattaaaagttacctctgttatagtcttgtaaaaaaaaaaaaaaaaaaaaaaaa

SEQ ID NO: 2463 - protein, 439 aa, Homo sapiens
MIEVIMPGVTIYELLFLFLWKWKGPLHPPLPPPHQPQPQQPQQQPPPQHQPPHQPPHQPPPQHQPPPQHPPQHPPQHQHHHHHHHLSVPPPPLMPMSQPQFRPHVQTAQPQASSSRMQCPQRQGLRHNTTSQNVSKRPMQQMQPTAPRNSNLRELPIAPSHVIEMSSSRCSATPSAQVKPIVSASPPSRAVAGSRSSQGKTEVKVKPASPVAQPKEEAKTETEFPDEDEETRLYRLKIEEQKRLREEILKQKELRRQQQAGARKKELLERLAQQQQQLYAPPPPAEQEEQALSPSPTNGNPLLPFPGAQVRQNVKNRLLVKNQDVSISNVQPKTSNFVPSSANMQYQGQQMKALKHLRQTRTVPQSQTQPLHKVLPIKPADVEEPAVPQTPRVASIQGRPQDTKPGVKRTVTHRTNSGGGDGPHISSKVRVIKLSGGVS

SEQ ID NO: 2464 - DNA, 2781 bp, Homo sapiens
gccggtgtcgtggtcgcggtacctgttccaacacggctcgcgggcccgtgccggctccggtccccggcgcggctgtccgagcccctgcggcgggcggacgatggtgtggcggagcacgcggacgcgggcggcgcggcggcgggcatgaaggaggatggaagggcaggacgaggtgtcggcgcgggagcagcacttccacagccaagtgcgggagtccacgatatgtttccttctttttgccattctctacgttgtttcctacttcatcatcacaagatacaagagaaaatcagatgaacaagaagatgaagatgccatcgtcaacaggatttcgttgtttttgagcacgttcactctcgcagtgtcagctggggctgttttgcttttacccttctcaatcatcagcaatgaaatcctgctttcttttcctcagaactactatattcagtggctaaatggctccctgattcatggtttgtggaatcttgcttcccttttttccaacctttgtttatttgtattgatgccctttgcctttttctttctggaatcagaaggctttgctggcctgaaaaagggaatccgagcccgcattttagagactttggtcatgcttcttcttcttgcgttactcattcttgggatagtgtgggtagcttcagcactcattgacaacgatgccgcaagcatggaatctttatatgatctctgggagttctatctaccctatttatattcctgtatatcattgatgggatgtttgttacttctcttgtgtacaccagttggcctttctcgtatgttcacagtgatgggtcagttgctagtgaagccaacaattcttgaagacctggatgaacaaatttatatcattaccttagaggaagaagcactccagagacgactaaatgggctgtcttcatcggtggaatacaacataatggagttggaacaagaacttgaaaatgtaaagactcttaagacaaaattagagaggcgaaaaaaggcttcagcatgggaaagaaatttggtgtatcccgctgttatggttctccttcttattgagacatccatctcggtcctcttggtggcttgtaatattctttgcctattggttgatgaaacagcaatgccaaaaggaacaagggggcctggaataggaaatgcctctctttctacgtttggttttgtgggagctgcgcttgaaatcattttgattttctatcttatggtgtcctctgttgtcggcttctatagccttcgattttttggaaactttactcccaagaaagatgacacaactatgacaaagatcattggaaattgtgtgtccatcttggttttgagctctgctctgcctgtgatgtcgagaacactgggaatcactagatttgatctacttggcgactttggaaggtttaattggctgggaaatttctatattgtattatcctacaatttgctttttgctattgtgacaacattgtgtctggtccgaaaattcacctctgcagttcgagaagaacttttcaaggccctagggcttcataaacttcacttaccaaatacttcaagggattcagaaacagccaagccttctgtaaatgggcatcagaaagcactgtgagacgcacagacggcgtcttctgccaccaagagacccgagaactccagattcacgacattcctgtcccatgtagaagcatttccattcaaccgtggcccctcttcagaacctagacctatcagtgccatttttttttcataatctacgaagaacttggctatggctgatcttttttaaatttaactttctgatggaccctgtagtttccagttaagtgcagattccttacagacatatagaacagcgcattcttctgtagacatttgctcatgttggtaaatacaatcacccatatgaaaaaattgttttcacctgatatgaaaatgttagaaaaggcaaactccgggacttctaaagatttacttaaatcccattatgtactttattcagaatgtagaagctgacttgaaaggcatccttggtactaagtgaagcttattcagaaaatgcatttttcaaatgcaatggcaactgcttgtagatatcatttttgcagtgtatgttggagctgtaatggttgcaattatgtttcttatttccttaaaagcaaaaagcgtagtttctgatttatgttatagaatgatactgattagactttgagccaaggggaaaatactaaattcttttaaacctggagccttagagagccacaggaatatcttctgttgtacagtctaataagctgtggtaggaagtatcatgtaatcacagtttaatgacagtttatgtatatatataattcagtattccctctgataacatagttgccagtgtttaatacacttgtaacttggatttttaccttataggctatatgtatactcagttttttaaagcatttttttcagagatcacttaattccccatgcttctgcaatgcatataaaaactataaatgccgagtggtagaaactcctctttcttcatagtcctcaggctttggttacatttgcatatgccatttgaagcctccagcttttaccagtttaacatccaaagttcacagcatcagcattcatggtgtaagaacagttttgcagtataacacgatctgataatcattcagttattaaattgtaaataattattgggatggtttcttggctttaagtccactgaataaaaactatgaaattgcaaaaaaaaaaaaaaaa

SEQ ID NO: 2465 - protein, 490 aa, Homo sapiens
MEGQDEVSAREQHFHSQVRESTICFLLFAILYVVSYFIITRYKRKSDEQEDEDAIVNRISLFLSTFTLAVSAGAVLLLPFSIISNEILLSFPQNYYIQWLNGSLIHGLWNLASLFSNLCLFVLMPFAFFFLESEGFAGLKKGIRARILETLVMLLLLALLILGIVWVASALIDNDAASMESLYDLWEFYLPYLYSCISLMGCLLLLLCTPVGLSRMFTVMGQLLVKPTILEDLDEQIYIITLEEEALQRRLNGLSSSVEYNIMELEQELENVKTLKTKLERRKKASAWERNLVYPAVMVLLLIETSISVLLVACNILCLLVDETAMPKGTRGPGIGNASLSTFGFVGAALEIILIFYLMVSSVVGFYSLRFFGNFTPKKDDTTMTKIIGNCVSILVLSSALPVMSRTLGITRFDLLGDFGRFNWLGNFYIVLSYNLLFAIVTTLCLVRKFTSAVREELFKALGLHKLHLPNTSRDSETAKPSVNGHQKAL

SEQ ID NO: 2466 - DNA, 2903 bp, Homo sapiens
tctttccgtaaccgtagcttgaggcacatttcctaaatatgcagcatggaacgcttggcggttctgaacgcgcatctcgtgctgctcctgtagggcggttaggacgcgctcctctggcgaggaaggtggcagcctccactgtgcacgggtcacaggcgagtgtggtgtggtgtggttgtgggtggggtgtggactggatctgcaggcttgtccctctctcgtggagagctgtcggggtccaggcagtgctcagtggtgagagccacagcacatttgaaagtccacatgtgtttgccccactgtggtccaggacatgtgtgagccacactcagtggacttgcacctgtgacatgttggtcagcgtggcggccgtcagctgggtgtggaatgcatctgattggagcctggcacccggcctaccatgattgtgattctctggggcgagtcctgagtgtgggcagggcctcaggcccccaagagggctgtgagcaggcaccttcctgtgaggcacgatgccaccatgtgaagttgtgtgggtctttggagagttctggcaggttgagggcctgtgcgtgtgggacccaggcctgccctgcctgctgccggccatgttccctctgcccagtcatgttgacaattgtggccaaattcaacatcgggcctgtttcctgcacccacgttggcacacactgagttcaagacagtttctgcagaaatgaatccagaggtgtttatttctggcacgttggatcagacgttcagagggtgggcgtctttctccatgcacttcagctggatcagtcagtgtcagccattgactttagcaacagggaaatgaaagactttcctcaataagaaatgggactttctcacgctggatggcacagagctggcaaacatgaggccagtccacaccaaggctttgcctgcagaaaggctgcactgtggccagcgggggaagcggaggagacacctgtggacaccctccccacaggtgggcacacctttgcgcaggcccagtgtgcgttctgaaggagagcccagggtggggttccgggactgaggtgcagccgtgtccagggtgggcttctagctctgccgctgggcggaactggggtaggtcccagggtggggttccaggactgaggtgcagccgtgcccagggtgggcttctagctctgccgctgggcagaactggggtagtcccagggtgggcttttagctctgccgctgggcggaactcgggtaggtgggagtcctcacttctctgcagggtggtgaagctctctgggtagtgtgagcagttctcaacgtgcaccttggaaagcgcccgttttgaggtttagctgtggccaagatagatgacttcattttgttgctttttgttcttaacatggggagatatttagaaaacatgtttggctcttgctggggaagcagtgctgttccgtacagtgttttacaagccgtgtttccttaggattgaaagaaggtggcaagaggaagaagcagaagcagagagaggagtcgaagaagaagaagtcgaccaaaggcaatcactagaccggacttgaggcacgcggtgcacccccagacgctggcgctccaccgtgctcggcatgcggtcgtgcacacgcgctaggtagcagcgtcggtcaggactgtctcgaggccacactcgctcggcaggattatgcgatcacggatcagtcagagcagggtcaggagacggggctgacggcacgggtggcggggacagacgtttgggacttggccgcgactctctgcttctctccagctctcaatctgctgcattttcctctagtgcttccggatcctcttcattcttttcggctactcaaccactccgcatgctgctggaatatttctggctttagaagtacaggagggcgcagatggctaactgagtaacattcatgaaatgaggctttctgtggcggcgtagtgtttggaattagaaggtaattcagtagagtgtaacttagagaatattgcaagtgacacattgaatcctgcccgtcagggcaccttttcctcagagcaatccggccacacgaatagaaggctgtcgtgaatcacatcagatgtaaaatcattccttctgtttactcttttaattttcatcctttgcaggtagtgcaaattcaacttcaaatatggtgtaggttttgctagattccatatttttttcttggatttttgctaattatttttagcaaaaaatttttgctcagtggcactctccctagtgtccatgggttagggccatgctggggaaaacgggccggtatttacacacgcgcaaaacacccagagacggcacaaggaggttgaactcatgtttcagttcgcgaacattgactccttacgaaagtcacttcattctaactagatgcgcccacttccggtcattatttcgtttgcatgatgtattgcttcttcacgttttgtttttattgagcacggagtagaattccagggctgccttgacttcttccctgcatgctccctcccagtgactttccttccctttcacatgaggatctgccgttcatgttgctttctcctttgtcctcttggacttgagggcattgtgaaaagctttgctgtgatttaaaaatgccagcaattttaatctagcagtgttgaagctgggaattttttggcgcaatccatgtagcagtgacccaggcttgggagccagaaacaagtgtgacctgggattttatttaacacaactgttgccaaagagttggctttgtttatttggttttggcggggagaggagtggtatttgatgctttctgtggacaatgtaaccctaaacacatcatgtattttaaatgccacctacataaataaaacataagcatattgaatac

SEQ ID NO: 2467 - DNA, 3270 bp, Homo sapiens
ctaagacaggtgcagacgtatgtcggctttggcgtatccatcaagctttatattgctttgattatgatttggaggaaagtggagaaattaaagatatgttacttgagtgcttcataaatattaattatatcaagaaagaagagggaagaagatttcttagttgtctcttcaactggaatatcaacttcatcaaaatgatccacgggaccattaaaaaccagttacagggattacaaaagtctttgatggtatacattgcagaaatttatttcagagcttggaaaaaggcttcagggaaaatactggaggcgattgaaaatgattgcatccaggacttcatgtttcacgggatacaccttccgaggaggtctccagtgcattccaaagtgcgggaggttctgagttactttcaccatcaaaagaaagttcggcagggagtggaagagatgctttatagattatataagcccatcctttggagaggattaaaggccagaaactctgaagttcgatcaaatgctgcattgttgtttgttgaagcatttcctattagggatccaaaccttcatgctattgaaatggatagtgaaatccagaaacagtttgaagagctctatagccttttagaagatccttacccgatggtccgttccacagggatccttggtgtttgtaaaataacttctaagtactgggaaatgatgcccccgaccattcttattgacctcctgaagaaggtgactggggaactggcatttgacacgagctcagctgatgttcgttgttctgtctttaagtgtctgccaatgattttggacaacaaactgagccacccattgttagagcagctccttccagctctcagatacagtctccacgacaattcggagaaagtgagggtagcttttgtggacatgctgttgaagatcaaagctgtgagggctgctaagttttggaaaatatgtcccatggagcacattctggttcgtctggaaactgattctcgacctgtgtctcggcgcctggtgagcctcatctttaattctttcctgcctgtgaatcagccggaggaggtctggtgcgagcgctgtgtcaccctggtgcagatgaaccacgccgctgccaggaggttctatcagtacgcccacgaacacaccgcctgcaccaacatagcaaagctgattcacgttattcgtcattgcttaaatgcctgtatccagagggcagtgagagagcctccagaggacgaggaggaagaggacggaagggagaaggagaatgtgactgttctggacaaaacactgtcagtaaacgatgttgcatgcatggcaggtttactagaaatcattgtgattctctggaaaagtattgacagaagtatggaaaataataaagaggccaaactttacacgattaacaagtttgcctctgtgcttccagagtatctgaaagtatttaaggatgatcgctgcaagatccctttattcatgctaatgtcctttatgccggcctctgctgtccccccattcagctgtggtgtgatttccacgctgagaagccgggaggagggcgctgtggacaagagctactgcactttgttggattgcctctgctcctgggggcaagtggggcacattctggagcttgttgacaactggctgcccacagagcatgcccaggccaagagcaacacagcttctaaaggtagggtgcagatccatgacacacgcccagtcaaacctgaattggcattggtctacattgagtatctgctgactcatccaaagaaccgcgagtgcttgctctctgctcctcggaagaaacttaaccatcttttgaaagcccttgaaacgtcaaaggcagatctggagtcacttctgcagacaccgggtgggaagcctcgtggcttcagtgaagcagctgccccgcgagcctttggtctccactgtcgcctgagcatccatcttcagcacaagttctgctcagaaggaaaggtgtatttgtccatgttggaagacactggcttttggttagaaagcaaaattttatcttttattcaagatcaagaagaagactacctgaagcttcatagggtcatttatcagcaaattatccagacctacctgactgtgtgtaaagatgttgttatggtaggccttggtgaccatcagtttcagatgcaactcttacagcggagtcttggaatcatgcaaacagtgaagggatttttttatgtttcattacttcttgacattctgaaagagataactggaagttccttgattcagaaaacagattcagatgaagaagttgcaatgctgttggacacagtccagaaagtatttcagaaaatgttggaatgtattgcacggagcttcaggaagcagccggaagaaggcctgcggctgctttattctgttcagaggcctcttcatgagttcattactgctgttcagtctcggcacacagacacccctgtgcaccggggtgtactttctactctgatcgctgggcctgtggttgagataagtcaccagctacggaaggtttctgacgtagaagagcttacccctccagagcatctttctgatcttccaccattttcaaggtgtttaataggaataataataaagtcttcgaatgtggtcaggtcatttttggatgaattaaaggcatgtgtggcttctaatgatattgaaggcattgtgtgcctcacggctgctgtgcatattatcctggttattaatgcaggtaaacataaaagctcaaaagtgagggaggttgcagccactgttcacagaaaactaaagacattcatggaaattactttggaagaggatagcattgaaagatttctctatgaatcatcatcaagaactctgggagaacttttgaattcataaccaagccaacatctccagacatgtaaaaatagggaaaagtgattcaaattgaaatgcctgtgtattttcctattgtttttaatgttaataacccatataatagggaaagggtgggatttttttgtgggaatgtgggaaggtgggggttatggaggagataactcaaaacttcttcaattttgcctagtgcctgcgtaaataatatatttaatataaaggactccaggtataaatggtgtagaaatccatgattccaagaaaaaacacttttctagcaaacctggttgtttttaaaatgacttttatatatgtaatattgcttggaaactatgagtaataaagcaatgacaacaaaaaaaaaaaaaaa

SEQ ID NO: 2468 - protein, 935 aa, Homo sapiens
MLLECFININYIKKEEGRRFLSCLFNWNINFIKMIHGTIKNQLQGLQKSLMVYIAEIYFRAWKKASGKILEAIENDCIQDFMFHGIHLPRRSPVHSKVREVLSYFHHQKKVRQGVEEMLYRLYKPILWRGLKARNSEVRSNAALLFVEAFPIRDPNLHAIEMDSEIQKQFEELYSLLEDPYPMVRSTGILGVCKITSKYWEMMPPTILIDLLKKVTGELAFDTSSADVRCSVFKCLPMILDNKLSHPLLEQLLPALRYSLHDNSEKVRVAFVDMLLKIKAVRAAKFWKICPMEHILVRLETDSRPVSRRLVSLIFNSFLPVNQPEEVWCERCVTLVQMNHAAARRFYQYAHEHTACTNIAKLIHVIRHCLNACIQRAVREPPEDEEEEDGREKENVTVLDKTLSVNDVACMAGLLEIIVILWKSIDRSMENNKEAKLYTINKFASVLPEYLKVFKDDRCKIPLFMLMSFMPASAVPPFSCGVISTLRSREEGAVDKSYCTLLDCLCSWGQVGHILELVDNWLPTEHAQAKSNTASKGRVQIHDTRPVKPELALVYIEYLLTHPKNRECLLSAPRKKLNHLLKALETSKADLESLLQTPGGKPRGFSEAAAPRAFGLHCRLSIHLQHKFCSEGKVYLSMLEDTGFWLESKILSFIQDQEEDYLKLHRVIYQQIIQTYLTVCKDVVMVGLGDHQFQMQLLQRSLGIMQTVKGFFYVSLLLDILKEITGSSLIQKTDSDEEVAMLLDTVQKVFQKMLECIARSFRKQPEEGLRLLYSVQRPLHEFITAVQSRHTDTPVHRGVLSTLIAGPVVEISHQLRKVSDVEELTPPEHLSDLPPFSRCLIGIIIKSSNVVRSFLDELKACVASNDIEGIVCLTAAVHIILVINAGKHKSSKVREVAATVHRKLKTFMEITLEEDSIERFLYESSSRTLGELLNS

SEQ ID NO: 2469 - DNA, 1641 bp, Homo sapiens
cgggacggagggggcggcccccgcgctcggggcgctcggctacagctgcggggcccgaggtctccgcgcactcgctcccggcccatgctggaggcggcggaaccgcggggacctaggacggaggcggcgggcgctgggcggcccccggcacgctgagctcgggatgcggacgctgctgcctcccgcgctgctgacctgctggctgctcgcccccgtgaacagcattcacccagaatgccgatttcatctggaaatacaggaggaagaaacaaaatgtgcagagcttctgaggtctcaaacagaaaaacacaaagcctgcagtggcgtctgggacaacatcacgtgctggcggcctgccaatgtgggagagaccgtcacggtgccctgcccaaaagtcttcagcaatttttacagcaaagcaggaaacataagcaaaaactgtacgagtgacggatggtcagagacgttcccagatttcgtcgatgcctgtggctacagcgacccggaggatgagagcaagatcacgttttatattctggtgaaggccatttatacactgggctacagtgtctctctgatgtctcttgcaacaggaagcataattctgtgcctcttcaggaagctgcactgcaccaggaattacatccacctgaacctgttcctgtccttcatcctgagagccatctcagtgctggtcaaggacgacgttctctactccagctctggcacgttgcactgccctgaccagccatcctcctgggtgggctgcaagctgagcctggtcttcctgcagtactgcatcatggccaacttcttctggctgctggtggaggggctctacctccacaccctcctggtggccatgctcccccctagaaggtgcttcctggcctacctcctgatcggatggggcctccccaccgtctgcatcggtgcatggactgcggccaggctctacttagaagacaccggttgctgggatacaaacgaccacagtgtgccctggtgggtcatacgaataccgattttaatttccatcatcgtcaattttgtccttttcattagtattatacgaattttgctgcagaagttaacatccccagatgtcggcggcaacgaccagtctcagtacaagaggctggccaagtccacgctcctgcttatcccgctgttcggcgtccactacatggtgtttgccgtgtttcccatcagcatctcctccaaataccagatactgtttgagctgtgcctcgggtcgttccagggcctggtggtggccgtcctctactgtttcctgaacagtgaggtgcagtgcgagctgaagcgaaaatggcgaagccggtgcccgaccccgtccgcgagccgggattacagggtctgcggttcctccttctcccgcaacggctcggagggcgccctgcagttccaccgcggctcccgcgcccagtccttcctgcaaacggagacctcggtcatctagccccacccctgcctgtcggacgcggcgggaggcccacggttcggggcttctgcggggctgagacgccggcttcctccttccagatgcccgagcaccgtgtcgggcaggtcagcgcggtcctgactccgtcaagctggttgtccactaaaccccatacctgg

SEQ ID NO: 2470 - DNA, 3801 bp, Homo sapiens
gtgaaccgtgcatgtgagggatctaggttgcgctatccttatgagaatctaatacctattgatctgtcactttctcccatcacgctcaggtgggaccatccagttgcaggaaaacaagcttaacacgcccactgattctacattatgctcctacctcccagcagcctctccaggcccagaactttctccagtcagcctctacagaccaagctcatgactcacaatggcctatttaggcccataccctacctcacggcagtctccgcagatgagcctactgcctcacaacagcctccacaggcacagctccatcgttacaatggcctctttagacccagctcctgcctcccagccttctctccaggccctgaactttctcaagtcgacctcaccaggcccagctcatgcttctttgcagcctctccaggcccagctcctgcatcttggtggcacctccaggcccagcctctgcctcccgtcggcctctacaatcccaacatctgcctcacagcagattcttcaggcccagcatctgcctcactgtggaccccccaagccaagctcccaacctttcagcagcttctacacacccaactcctgccacccagtggcctctttaggccaagctcatgcttcacaagggcctttccaggctcaacttttgtctcatggcaacctttcctggccagattcctgcctgtctcccagcagcctagacaggcccaggtcttgcctcacactggcctctctacatccagctcatgcctcacggtggcctctccaggcccaactcctgtcccaggacgtcatctccgggcccaaaacttactcaagtcagactctctagtcccaactgctgcctcctggtggcctatgaaggcccaaaatctcctcaagtggacctctccaggcccagctcctgcctcctgtcagcgtctacaggcccaacctctgcctcatgggggcttctccaggcccacctcttcctcttggctgggtctacaggcacaactgctgcctcacaacagccttttttggcccagttcctctccagctcatggcggccaatgtaggcccaaaacttcctcaagtcaaactctccaggcccaccttctgcttcccggtggcatgaacaggcccagctttgacttgagaacagcctctgcaggccctgctcttgcctcccaggggctttttccagacccagctcctgcctcatggcagctgccccaggccaaatttctgcctgcctgccagcagcctcaacaggcacagctcctccctcacagtggcccatttaggcccaactcatgactgtcgggccatttccaggcctagtgcctgcctcgtggctgactcttgaagcccaaaacttcctcaaatcagccttttgcccaacttctgtctactgtcggactctacaggccagcctctgcctcacagtggaccctccagacccagatggtgtctcactgtggcatcctcaggcgaagctcctgcctttccgcagcctctacaggcccagctcctgccttgcagtggcctctttaggccaagctcatgccccatggcgacttttccaggcacagcttttgccttttgcagcctgtccaggcccagaatgtccttaactcggcatctccaggatgagctcatcctcccagtgcgtctacaggcccgtctcctgcctcacaacaacctcctttggcccaactcctgctgagctgctggcagcctctgtaggccacagaattcttaaggtaaagctttccaggcccacctttggcctcccggcaggctcagcaatcaaactattccctcactgcggccaccgaaagccaagtttctccctgcctcacggcatcctccgaaaactgagcatttgcctcacggtggcctccccaggccatgaatctgcctgcctcccaggcagctgctgcctcacaatggtctctttaggcccagctcatgctaaaagatggactctccaggcacagctcttgcctcctggcagcctctgcaggcccaaattctccaaaagttggcctctcctaactcagctcctgcctcatgtcggcctacacaggcccagactcttaccacacagtagaccctccaggcccaccacttgcctgatcatagcctcctaaggccaagctcctgcctttcggcagcctctacaggccaagctcctgcctcgcaattgcctctgtaggccaagatcatgccgtgaagtggccttccctagcctaacttttgctttttgacgcatactccagtcccaaaacttcctccagtcagccggtccaggccaagctcttcctcccaaaggcttctgcaggccaaaatcatcctgaagtcaccctctgcaggcgcagctcctgcctccaagtgctgtgtaggccaagctaatgcctcacagcacactttccaggctgagcatttccttttgtgcatcctctccaagccctgaacttactccagttggcctctccagaccaagctctccctcccagtggcctctacaggccaaaattgtcctcaggtcagcctctccagggccaactcctagctaccggtggcttctgcaggccaaaatcgacctcaagtcagcctcttcacacccagctcttgcctctgagtggcctctccaggagcaaaactttctcaagtcggcctctccaggcccagcctcctgcttcccgagggcatgtacaggcccagcctctgcctcacagcagactcttcacacccagctcttccctgtctgcggcctctccagtccaaagctgctcctgccttttggcagcttgtacaggcccagctcctccctcacggtggcctctttcggcccaactcatgcctcttgcaacgtgcccaagtgtcagctcctgcctcacactggcctgttgaggcccagctcatgcctctcgtggcctcaacgggcccatcccctgcctgtcggcggcctctacaggcccggcctctacctcacagtgggctctccaggcccacctcttcctcaccgtggcctcctggggcaatgctcctccctctcgggagcctctgtgggcccagctcctgcctcccagtggcctctgctggccaagcccgtgcctcagggcagcctttccaggcctagcgtttgctgctttgcatcctctccaggccctggacttcctccagtcggcctctccaggcccagctcttcctctcggcggcctctgcaggcccagactgtcgtcaagtcggcctgtccagggccagctcctgcctcccggcggcctctgcaggcccaagtcgtcctcaagttggcctccccaggcccagcaacggcctctcggcggcctttccgggtgcaaaagttcctcgagtcagcctctccaggcccagctcctcctgcctcccagtggcctctttcggcccagcccagctcatgcctcccggcggccttcccaggccctgcttttgactttcggtggcctctgcaggcctcgacaaggccaggcctcctgcctcccaaaggcctgcacaggcccagcctctgcctcacagcagactctccacgcccagctagctctcgcctcactgcggcttcccgagtccaaagctcctgcctctcagccgcttcggcaggcccagctcccgcctgccagtggcctcttcaggcccatggggctcattcctcacaacggcctttccaggcccagtttttcccttccggcggcctcttggcctctaatttgtttatcttttgggtataaatcccaaaatattgaattttggaatatttccaccatt

SEQ ID NO: 2471 - DNA, 772 bp, Homo sapiens; identical to SEQ ID NO: 619

SEQ ID NO: 2472 - DNA, 801 bp, Homo sapiens; identical to SEQ ID NO: 641

SEQ ID NO: 2473 - DNA, 789 bp, Homo sapiens
atgttgccaataacacagatgaagagactgggggatggcactatcactgctgctgtactgaaggttagcaaaggtgctaatccagtggaaatcaagagaggtgtgatgttagctgttgatgctgtaattgctgaacttaaaaagcagtctaaacctgtgaccaaacctgaagaaattgcacaggttgctacaatttctgcaaatggagacaaagaaattggtaacatcatctctgatgcaatgaaaaagtttggaagaaagggcatcatcacaaaaatttctagtgtccagtccattgtaactgctcttgaaattgccaatgcttactgtaagcctttggtcataattgctggagacattgatggagaagctctaactacactcatcctgaataggctaaaggttggtcttcaggttgtggcagtcaaagctccagggtttggtgacaatagaaagaaccagcttaaagatacggttattgctactggtggagaagttggagaggtcactgtgatcaaagattatgccatgctcttaaaaggaaaaggtaacaagtctcaaattgaaaaatgtgttcaagaaatcattgaccagtcagatgtcacaactagtgaatacgaaaaggaaaaactgagtggagaaactttcagatggagtagctgtgctgaagctaatgaagataaaataattggtatagaaattattaaaagaacactcaaaattccagcaatgacaattgctaagaatgcaggtgttgatggatttttgatagttgagaaaattatgtaa

SEQ ID NO: 2474 - protein, 262 aa, Homo sapiens
MLPITQMKRLGDGTITAAVLKVSKGANPVEIKRGVMLAVDAVIAELKKQSKPVTKPEEIAQVATISANGDKEIGNIISDAMKKFGRKGIITKISSVQSIVTALEIANAYCKPLVIIAGDIDGEALTTLILNRLKVGLQVVAVKAPGFGDNRKNQLKDTVIATGGEVGEVTVIKDYAMLLKGKGNKSQIEKCVQEIIDQSDVTTSEYEKEKLSGETFRWSSCAEANEDKIIGIEIIKRTLKIPAMTIAKNAGVDGFLIVEKIM

SEQ ID NO: 2475 - DNA, 519 bp, Homo sapiens
atgtactgggacatcgtgtctttggagacagctataccccacttgtccattctgctgaggcccacaaatgccatcacccagaagcccttcacatccactggggccacagcaggatacagtctgttgctggtccagcagcctgataaaatcattgtcctctccaccctgattcctacaggagactactcaccccataacctcaaaaacctcttcatgaggatggtgaccccagccatgaggaccctcgccatccttgctgccattctcctggtggccctgcaggcccaggctgagccactccaggcaagagctgatgaggttgctgcagccccggagcagattgcagcggacatcccagaagtggttgtttcccttgcatgggacgaaagcttggctccaaagcatccaggctcaaggaaaaacatggactgctattgcagaataccagcgtgcattgcaggagaacgtcgctatggaacctgcatctaccagggaagactctgggcattctgctgctga

SEQ ID NO: 2476 - DNA, 490 bp, Homo sapiens
ctatagaagacctgggacagaggactgctgtctgccctctctggtcaccctgcctagctagaggatctgtgaccccagccatgaggaccctcgccatccttgctgccattctcctggtggccctgcaggcccaggctgagccactccaggcaagagctgatgaggttgctgcagccccggagcagattgcagcggacatcccagaagtggttgtttcccttgcatgggacgaaagcttggctccaaagcatccaggctcaaggaaaaacatggcctgctattgcagaataccagcgtgcattgcaggagaacgtcgctatggaacctgcatctaccagggaagactctgggcattctgctgctgagcttgcagaaaaagaaaaatgagctcaaaatttgctttgagagctacagggaattgctattactcctgtaccttctgctcaatttcctttcctcatcccaaataaatgccttggtacaagaaaag

SEQ ID NO: 2477 - protein, 94 aa, Homo sapiens
MRTLAILAAILLVALQAQAEPLQARADEVAAAPEQIAADIPEVVVSLAWDESLAPKHPGSRKNMACYCRIPACIAGERRYGTCIYQGRLWAFCC

SEQ ID NO: 2478 - DNA, 487 bp, Homo sapiens
ccttgctatagaagacctgggacagaggactgctgtctgccctctctggtcaccctgcctagctagaggatctgtgaccccagccatgaggaccctcgccatccttgctgccattctcctggtggccctgcaggcccaggctgagccactccaggcaagagctgatgaggttgctgcagccccggagcagattgcagcggacatcccagaagtggttgtttcccttgcatgggacgaaagcttggctccaaagcatccaggctcaaggaaaaacatggactgctattgcagaataccagcgtgcattgcaggagaacgtcgctatggaacctgcatctaccagggaagactctgggcattctgctgctgagcttgcagaaaaagaaaaatgagctcaaaatttgctttgagagctacagggaattgctattactcctgtaccttctgctcaatttcctttcctcatctcaaataaatgccttgttac

SEQ ID NO: 2479 - protein, 94 aa, Homo sapiens
MRTLAILAAILLVALQAQAEPLQARADEVAAAPEQIAADIPEVVVSLAWDESLAPKHPGSRKNMDCYCRIPACIAGERRYGTCIYQGRLWAFCC

SEQ ID NO: 2480 - DNA, 741 bp, Homo sapiens
atgcaggtctgcaactgcaggtgcctctcacctggtgacctgcaggaagatggaggagcatattgggcacagtgctcggtttggggggcgcacttcgacccggaagtttacctagacaagctgcatagagtgtgccctctggcccagctgatggacagtgagacggacatggtgcggcagatccgggctatagacagcgacatgcagaccctggtctatgagaactacgacaaggagactatcggggtgcaacctggctggggcggggaggaggtgcagggcctggccagagcgggcctggccacgggcaagggacagcgaccgcctgggccaggacaggtgagagcggcgcagtcccgggcccggcgtgtccgcgctgcgcgggagaggccagcagagggcgccagagagccaggagcggcccgcggaggagcccgcgccagccggatgcccagctccgcgccgcgcggacccaacgagcccgcgctcagacgccccagctccgccgagaggccgctcgcgccgggcagagcccctggagccatggccagcccttccggcagctccgaagccactggcaagccccgaggcagggatggccggcccaggagggaggaggacgacgtccctcccgaagagaagaggctacggctgttgctggaggggggaagcgcacagcccgaggactgcgaggacggggaggacgcgctgcggccgggcagggaggagaccggcacctag

SEQ ID NO: 2481 - protein, 246 aa, Homo sapiens
MQVCNCRCLSPGDLQEDGGAYWAQCSVWGAHFDPEVYLDKLHRVCPLAQLMDSETDMVRQIRAIDSDMQTLVYENYDKETIGVQPGWGGEEVQGLARAGLATGKGQRPPGPGQVRAAQSRARRVRAARERPAEGAREPGAARGGARASRMPSSAPRGPNEPALRRPSSAERPLAPGRAPGAMASPSGSSEATGKPRGRDGRPRREEDDVPPEEKRLRLLLEGGSAQPEDCEDGEDALRPGREETGT

SEQ ID NO: 2482 - DNA, 1641 bp, Homo sapiens
gagagtcgcgcccgggagtccgccgcctgcgccaggatggagttcgtgaaatgccttggccaccccgaagagttctacaacctggtgcgcttccggatcgggggcaagcggaaggtgatgcccaagatggaccaggactcgctcagcagcagcctgaaaacttgctacaagtatctcaatcagaccagtcgcagtttcgcagctgttatccaggcgctggatggggaaatgcgcaacgcagtgtgcatattttatctggttctccgagctctggacacactggaagatgacatgaccatcagtgtggaaaagaaggtcccgctgttacacaactttcactctttcctttaccaaccagactggcggttcatggagagcaaggagaaggatcgccaggtgctggaggacttcccaacgatctcccttgagtttagaaatctggctgagaaataccaaacagtgattgccgacatttgccggagaatgggcattgggatggcagagtttttggataagcatgtgacctctgaacaggagtgggacaagtactgccactatgttgctgggctggtcggaattggcctttcccgtcttttctcagcctcagagtttgaagaccccttagttggtgaagatacagaacgtgccaactctatgggcctgtttttgcagaaaacaaacatcatccgtgactatctggaagaccagcaaggaggaagagagttctggcctcaagaggtttggagcaggtatgttaagaagttaggggattttgctaagccggagaatattgacttggccgtgcagtgcctgaatgaacttataaccaatgcactgcaccacatcccagatgtcatcacctacctttcgagactcagaaaccagagtgtgtttaacttctgtgctattccacaggtgatggccattgccactttggctgcctgttataataaccagcaggtgttcaaaggggcagtgaagattcggaaagggcaagcagtgaccctgatgatggatgccaccaatatgccagctgtcaaagccatcatatatcagtatatggaagagatttatcatagaatccccgactcagacccatcttctagcaaaacaaggcagatcatctccaccatccggacgcagaatcttcccaactgtcagctgatttcccgaagccactactcccccatctacctgtcgtttgtcatgcttttggctgccctgagctggcagtacctgaccactctctcccaggtaacagaagactatgttcagactggagaacactgatcccaaatttgtccatagctgaagtccaccataaagtggatttactttttttctttaaggatggatgttgtgttctctttatttttttcctactactttaatccctaaaagaacgctgtgtggctgggacctttaggaaagtgaaatgcaggtgagaagaacctaaacatgaaaggaaagggtgcctcatcccagcaacctgtccttgtgggtgatgatcactgtgctgcttgtggctcatggcagagcattcagtgccacggtttaggtgaagtcgctgcatatgtgactgtcatgagatcctacttagtatgatcctggctagaatgataattaaaagtatttaatttg

SEQ ID NO: 2483 - DNA, 2003 bp, Homo sapiens
tccggcaacgccaaccgctccgctgcgcgcaggctgggctgcaggctctcggctgcagcgctgggctggtgtgcagtggtgcgaccacggctcacggcagcctcagccacccagatgtaagcgatctggttcccacctcagcctcccgagtagtggatctaggatccggcttccaacatgtggcagctctgggcctccctctgctgcctgctggtgttggccaatgcccggagcaggccctctttccatcccctgtcggatgagctggtcaactatgtcaacaaacggaataccacgtggcaggccgggcacaacttctacaacgtggacatgagctacttgaagaggctatgtggtaccttcctgggtgggcccaagccaccccagagagttatgtttaccgaggacctgaagctgcctgcaagcttcgatgcacgggaacaatggccacagtgtcccaccatcaaagagatcagagaccagggctcctgtggctcctgctgggccttcggggctgtggaagccatctctgaccggatctgcatccacaccaatgcgcacgtcagcgtggaggtgtcggcggaggacctgctcacatgctgtggcagcatgtgtggggacggctgtaatggtggctatcctgctgaagcttggaacttctggacaagaaaaggcctggtttctggtggcctctatgaatcccatgtagggtgcagaccgtactccatccctccctgtgagcaccacgtcaacggctcccggcccccatgcacgggggagggagatacccccaagtgtagcaagatctgtgagcctggctacagcccgacctacaaacaggacaagcactacggatacaattcctacagcgtctccaatagcgagaaggacatcatggccgagatctacaaaaacggccccgtggagggagctttctctgtgtattcggacttcctgctctacaagtcaggagtgtaccaacacgtcaccggagagatgatgggtggccatgccatccgcatcctgggctggggagtggagaatggcacaccctactggctggttgccaactcctggaacactgactggggtgacaatggcttctttaaaatactcagaggacaggatcactgtggaatcgaatcagaagtggtggctggaattccacgcaccgatcagtactgggaaaagatctaatctgccgtgggcctgtcgtgccagtcctgggggcgagatcggggtagaaatgcattttattctttaagttcacgtaagatacaagtttcagacagggtctgaaggactggattggccaaacatcagacctgtcttccaaggagaccaagtcctggctacatcccagcctgtggttacagtgcagacaggccatgtgagccaccgctgccagcacagagcgtccttccccctgtagactagtgccgtagggagtacctgctgccccagctgactgtggccccctccgtgatccatccatctccagggagcaagacagagacgcaggaatggaaagcggagttcctaacaggatgaaagttcccccatcagttcccccagtacctccaagcaagtagctttccacatttgtcacagaaatcagaggagagacggtgttgggagccctttggagaacgccagtctcccaggccccctgcatctatcgagtttgcaatgtcacaacctctctgatcttgtgctcagcatgattctttaatagaagttttattttttcgtgcactctgctaatcatgtgggtgagccagtggaacagcgggagacctgtgctagttttacagattgcctccttatgacgcggctcaaaaggaaaccaagtggtcaggagttgtttctgacccactgatctctactaccacaaggaaaatagtttaggagaaaccagcttttactgtttttgaaaaattacagcttcaccctgtcaagttaacaaggaatgcctgtgccaataaaagttttctccaacttga

SEQ ID NO: 2484 - protein, 339 aa, Homo sapiens
MWQLWASLCCLLVLANARSRPSFHPLSDELVNYVNKRNTTWQAGHNFYNVDMSYLKRLCGTFLGGPKPPQRVMFTEDLKLPASFDAREQWPQCPTIKEIRDQGSCGSCWAFGAVEAISDRICIHTNAHVSVEVSAEDLLTCCGSMCGDGCNGGYPAEAWNFWTRKGLVSGGLYESHVGCRPYSIPPCEHHVNGSRPPCTGEGDTPKCSKICEPGYSPTYKQDKHYGYNSYSVSNSEKDIMAEIYKNGPVEGAFSVYSDFLLYKSGVYQHVTGEMMGGHAIRILGWGVENGTPYWLVANSWNTDWGDNGFFKILRGQDHCGIESEVVAGIPRTDQYWEKI

SEQ ID NO: 2485 - DNA, 1026 bp, Homo sapiens
ctgggaagcagagtgtctggatggaacctgagctgggtctctgactcacttctgactttagttttttcaagggggaacatggcaaaggtgttcagtttcatccttgttaccaccgctctgataatgggcagggaaatttcgagattttcaatgatgggtataagctcagtggattttacaaaatcaaacctctccagagcctagcagaattttctgtttattgtgacatgtccgatggaggaggatggactgtaattcagagacgatctgatggcagtgaaaactttaacagaggatggaaagactatgaaaatggctttggaaattttgtccaaaaacatggtgaatattggctgggcaataaaaatcttcacttcttgaccactcaagaagactacactttaaaaatcgaccttgcagattttgaaaaaaatagccgttatgcacaatataagaatttcaaagttggagatgaaaagaatttctacgagttgaatattggggaatattctggaacagctggagattcccttgcggggaattttcatcctgaggtgcagtggtgggctagtcaccaaagaatgaaattcagcacgtgggacagagatcatgacaactatgaagggaactgcgcagaagaagatcagtctggcttgtggtttaacaggtgtcactctgcaaacctgaatggtgtatactacagcggcccctacacggctaaaacagacaatgggattgtctggtacacctggcatgggtggtggtattctctgaaatctgtggttatgaaaattaggccaaatgattttattccaaatgtaatttaattgctgctgttgggctttcgtttctgcaattcagctttgtttaaagtgatttgaaaaatactcattctgaacatatccatgcgcaatcatgataactgttgtgagtagtgcttttcattcttctcacttgcctttgttacttaatgtgctttcagtacagcagatatgcaatattcaccaaataaatgtagactgtgtt

SEQ ID NO: 2486 - protein, 312 aa, Homo sapiens
  unsure 22: unknown amino acid
  unsure 23: unknown amino acid
  unsure 24: unknown amino acid
  unsure 25: unknown amino acid
  unsure 26: unknown amino acid
  unsure 27: unknown amino acid
  unsure 28: unknown amino acid
  unsure 29: unknown amino acid
  unsure 30: unknown amino acid
  unsure 31: unknown amino acid
  unsure 32: unknown amino acid
  unsure 33: unknown amino acid
  unsure 34: unknown amino acid
  unsure 35: unknown amino acid
  unsure 36: unknown amino acid
  unsure 37: unknown amino acid
  unsure 38: unknown amino acid
  unsure 39: unknown amino acid
  unsure 40: unknown amino acid
  unsure 41: unknown amino acid
  unsure 42: unknown amino acid
  unsure 43: unknown amino acid
  unsure 44: unknown amino acid
  unsure 45: unknown amino acid
  unsure 46: unknown amino acid
  unsure 47: unknown amino acid
  unsure 48: unknown amino acid
  unsure 49: unknown amino acid
  unsure 50: unknown amino acid
  unsure 51: unknown amino acid
  unsure 52: unknown amino acid
  unsure 53: unknown amino acid
  unsure 54: unknown amino acid
  unsure 55: unknown amino acid
  unsure 56: unknown amino acid
  unsure 57: unknown amino acid
  unsure 58: unknown amino acid
  unsure 59: unknown amino acid
  unsure 60: unknown amino acid
  unsure 61: unknown amino acid
  unsure 62: unknown amino acid
  unsure 63: unknown amino acid
  unsure 64: unknown amino acid
  unsure 65: unknown amino acid
  unsure 66: unknown amino acid
  unsure 67: unknown amino acid
  unsure 68: unknown amino acid
  unsure 69: unknown amino acid
  unsure 70: unknown amino acid
  unsure 71: unknown amino acid
  unsure 72: unknown amino acid
  unsure 73: unknown amino acid
  unsure 74: unknown amino acid
  unsure 75: unknown amino acid
  unsure 76: unknown amino acid
  unsure 77: unknown amino acid
  unsure 78: unknown amino acid
  unsure 79: unknown amino acid
  unsure 80: unknown amino acid
  unsure 81: unknown amino acid
  unsure 82: unknown amino acid
  unsure 83: unknown amino acid
  unsure 84: unknown amino acid
  unsure 85: unknown amino acid
MAKVFSFILVTTALIMGREISXXXXXXXXXXXXXXXXXXXXXXXXXXXXXXXXXXXXXXXXXXXXXXXXXXXXXXXXXXXXXXXXIFNDGYKLSGFYKIKPLQSLAEFSVYCDMSDGGGWTVIQRRSDGSENFNRGWKDYENGFGNFVQKHGEYWLGNKNLHFLTTQEDYTLKIDLADFEKNSRYAQYKNFKVGDEKNFYELNIGEYSGTAGDSLAGNFHPEVQWWASHQRMKFSTWDRDHDNYEGNCAEEDQSGLWFNRCHSANLNGVYYSGPYTAKTDNGIVWYTWHGWWYSLKSVVMKIRPNDFIPNVI

SEQ ID NO: 2487 - DNA, 2587 bp, Homo sapiens
gggacagaggagacaagatggcgctgcgggcgatgcgggggattgtcaacggggccgcacccgagctacccgtgcccaccggtgggccggcggtgggagctcgggagcaggcgctggcagtcagtcggaactacctctcccagcctcgcctcacatacaagacagtatctggagtcaatggtccactagtgatcttagatcatgttaagtttcccaggtatgctgaaattgtccatttgaccttaccggatggcacaaagagaagtgggcaagttctggaagttagtggttccaaggcagtagttcaggtatttgaagggacttcaggtatagatgctaagaaaacgtcctgtgagtttactggggatattctccgaacaccggtgtctgaggatatgcttggtcgggtattcaatggatcgggaaaacccattgacagaggtcctgttgtactggccgaagacttccttgatatcatgggtcagccaatcaaccctcaatgtcgaatctacccagaggaaatgattcagactggcatttcggccatcgatgggatgaacagtattgctagggggcagaaaattcctatcttctctgctgctgggctaccacacaatgagattgcagctcagatctgtcgccaggctggtttggtaaagaaatccaaagatgtagtagactacagtgaggaaaattttgcaattgtatttgctgctatgggtgtaaacatggaaactgcccggttcttcaaatctgactttgaagaaaatggctcaatggacaatgtctgcctctttttgaacttggctaatgacccaaccattgagcgaattatcactcctcgcctggctctaaccacagctgaatttctggcgtaccaatgtgagaaacatgtattggttattctaacagacatgagttcttatgctgaagcacttcgagaggtttcagcagccagggaagaggtacctggtcgacgaggttttccaggttacatgtatacagatttagccacgatatatgaacgcgctgggcgagtggaagggagaaacggctcgattactcaaatccctattctaaccatgcctaatgatgatatcactcaccccatcccagacttgactggctacattacagaggggcagatctatgtggacagacagctgcacaacagacagatttatccacctatcaatgtgctgccctcactatcacggttaatgaagtctgctattggagaagggatgaccaggaaggatcatgccgatgtatctaaccagctagtatgcgtgctatgctattggaaaggatgtgcaagccatgaaagctgtcgttggagaagaagcccttacctcagatgatcttctctacttggaatttctgcagaagtttgagaggaacttcattgctcagggtccttacgaaaatcgcactgtctttgagactttggacattggctggcagctactccgaatcttccccaaagaaatgctgaagagaatccctcagagcaccctcagcgaattttaccctcgagactctgcaaagcattagctgctgcttctgcattgctccgcgctcttgtgaaatactggttctgttttctttattccttttgcactctcggttcccacctttgtgttggagtttaccatgttaccctgtaattaaaaacaaagaataggtaacatattgtgccagtgttgcaacgttttaaactgctaacagaccttaaaatatccccctacctgggtcctcagtgctatgtttaaagtgctgcagggatggagtggcgttttcttattgctgtatgtattgtacatagtggagtagttagttacctgataacagtcttgttatttgggtctcttagaccttacctctcaactccctcaagagtaccagtctctgaagttataatgctttggtctctacattaggggcaagatccagtctgagagaagtctcctttgagaagggccaagaggctctttcctgagtgtttgctttcggtttgttggtatgcctgtattgctgggctgtgctgctgctcgaagcagatggttttgactgtctttttgctctttcctatataatgaatagatgagtgaaaggagttttctttttctctttagtacttacgtattgggattcctgtgtcttacagctctccctctccaaataatacacagaatcctgcaactttttgcacagctggtatctgtctggtagcagtgagaccccttgtcttggtgatccttactgggtttccaagcagaggagtcacatgattacaattgccagtagagttgttgtttggggtacaagatgagaagaaagaaaaacctacagcctttctacattctgacatgctaacagtggtttaagtttctaaagtgtttaccagatgctgaaggcaaggggagggagcagaagcacttatgtttacggatattttaaactctgttagagagcagcctttgaaaatccccaatttggttctgctttttgacctctctctaccttttcagggtaatctttgtggcacaaacgatagcatttccaagctttagagttttctgaattc

SEQ ID NO: 2488 - DNA, 5077 bp, Homo sapiens
ctggccgggaggctggagcccagcagcagcgcggcggcgccggcgtcgtcccaacttgcaggcgcggagggacccctgacatttcactaaaatgagcgtgctcagcaggaagagatgtgttcctcacgctagaagccaccccgtcacatgtagtggtgtcccgtttaatggattctgacatggattatgaaaggccaaacgtagagaccatcaagtgcgttgtggtgggggacaacgccgtgggtaagaccaggctcatctgtgcccgcgcttgcaatgccaccctcacccagtaccagctgctggccacgcatgtgcccacagtatgggccatcgaccaatatcgtgtgtgccaggaggtgctggaacgctcccgagacgtggtagatgatgtcagcgtctctctgcgcctctgggacacctttggagaccaccacaaagaccgtcgctttgcttatgggagatctgatgtggtggttctgtgcttctccattgccaaccccaattccctccaccatgtcaagaccatgtggtacccagaaatcaagcacttctgcccccgagcacctgtcatcttggtgggctgccagttggacctgcgctacgctgacctggaggctgtcaacagggctaggcgacccttggctaggcccatcaaacctaatgaaatcctgcccccagagaagggtcgggaggtggccaaggagctgggcatcccctactatgagaccagcgtggtggcccagttcggcatcaaggacgtctttgacaacgccatccgagctgcactcatctcccgccgccacctgcagttctggaagtcccacctccgcaatgtgcagcggcctctgctgcaggcacccttcctaccccccaagccaccgcccccgatcatcgtggtgcccgaccctccctccagcagcgaggagtgccccgcccacctcctggaggacccgctctgcgcggacgtcatcctggtgctgcaggagcgggtgcgcatctttgcccacaagatctacctctccacctcctcctccaagttctatgacctgttcctcatggacctgagtgagggggagctggggggcccctcggagccagggggcacccacccagaggaccaccagggccactctgatcaacaccaccaccatcaccaccaccaccatgggcgagacttcctgctccgagcagccagctttgacgtgtgcgagagcgtggatgaggctgggggctccggtcctgctggcctccgtgcttccaccagcgacgggatcttacggggcaacggaacagggtacctaccgggcaggggtcgtgtgctgtcttcctggagccgagcttttgtgagcatccaggaagagatggcagaagatcctctcacctacaaatcccggctgatggtggtggtgaagatggacagttccatccagccggggcccttccgggctgtcctcaagtacctgtacacgggggagctagatgagaacgagcgtgacctcatgcacattgcccacattgctgagctgctcgaggtctttgatctgcgcatgatggtggccaacattctcaacaatgaggccttcatgaaccaggagatcaccaaggccttccacgtccgccggaccaaccgggttaaggagtgcttggcaaaaggcaccttctcagatgtgaccttcatcctggatgatggcaccatcagcgcccacaagcccctgttgatttccagctgtgactggatggctgccatgtttggggggccatttgtggagagctccacccgggaggtggtgtttccctacacaagcaagagctgcatgcgggccgtgctggaatacctctacaccggcatgttcacctccagccccgacctggatgacatgaagctcatcattctagccaaccgcctctgcctgccacacctggttgccctcacagagcagtacacagtgaccgggctgatggaagcgacccagatgatggtggacatcgatggggacgtccttgtgttcctggaactggctcagttccactgtgcgtaccagctggccgactggtgtctccaccacatctgcaccaactacaacaacgtgtgccgcaagttcccccgagacatgaaggccatgtccccagaaaaccaggagtatttcgagaagcatcggtggccacctgtgtggtacctgaaggaggaagatcattaccagcgggcacggaaggagcgtgagaaggaggactacctccacctcaagcggcagcccaaacggcgttggctcttctggaacagtccatcctccccgtcttcctcggcagcctcctcctcatccccatcttcctcctcggctgtggtctgagatgctgccaccctcttctgaccctgctgctgttgtccccatccgccttcacccctctgctcttccgcatcaccccatccaccttacagggaccagggggcccacgtaaccaggacccagagggtggagctcttcttaccagccaccgtggctcagccagagaggagctgagccctgtggagcagaacgggaaccacctgcagaggtccccagacccaaagcaggacgggagacaactgcttggaggagcgaagagccctggcattttatctctgggtttgagagccctagagtcaaagggaaagcctcccagcctccagggcttctctgtgtgtcttggttgctgctctggccagggaggcagccccactcccagcaagcagaagtgatcctcgagggtcctgcccctgttggccatatctttccaccgacggacttgagtgttgcatttgttttgtgggcatttccacacgaagcctactcacaccctcactggagaagtcagggtagaaattgagccttcagagcccaactcaaggcttctacatcctggggtgcagctgcaaaaggccagacgtggaaaggcctgtatcctgccagtgtccctccgtcccagggggctgtgctggcacagacctgagaatggggacacaggtcattcagagctccaggcctggaagcagtgcctcttggtgcaacaagaaacttctccctcaccccctcctttaccctcagatttggagatggtaaccaaaggaagcagctgggacaggtggagaaggaagtaggaatgagtgcacggcgaccccgtgctcctcagggccctcccctgcctctgggtggcactgctttttatagggtggggcaaaattagcaaaaaacaaaaaccaatgacaaccaaactgaaaccgaaacgaaaaatcaacaaacactctgtcctctatccctccaaagaatgaaaatcagaaaaagcccctgcctagctcacatttctataaacagaggcccccatgatgaggaggtgaagatttaggttgcagaatcgactccaatgcctttcaggaaaggactcggcacttctctgactgcggaggccctgaccctgccagctggctccgagggcaacacaggggcctggcctctagagggctggtgattgaggggcccgggctggcggcaaagaggggtttggtctcggggcttaaatggcaccagactcttgcttttgcccatctggagactgcaggctcccttccttaccctcagagagtgcttatggtgggtgtttttgcggggctgcaataggggccaaaagtcagggaaaggggcactgacctgtagtgaaaggccacaggacacagccttattactgctggggtgggataaggggaaggagaagagggagaatggagcaggaggaaaagcagagttggtctagagaggaggagggcggggctggaggaatgtgggggattgaaactagctcccagcccccatggggcagcagctgggccacaattgcccctttccgttttctaaccccgactcagatttcaccacccacactctttttaggtgtaaaagatggagtcccacggaggaggggcagagccaggaggcagtggggctgtgggctcagagctcaggagtcgccttacctgagagagatgttctagctgagagggcctggccctggggtgggctccaggaaaacgctggttaggcctgggattgagctaacctgaaacaaaggtagtaggcaggacctaatgaccagaggttaaatcctcatcaagagagaccaggcggctggaggacaagcggctctaaccctgggggcggccatgttgtccaggcccaggcccctccaggactgtggctgcctcccctccacggcctccagggcggctggctggaaagccacgcgtatgctgccctctacaggctgctcggcctccctgcagctcagcgcagcccagggctccaagtgaggcccagaagcccatgggcagggctggggggacgaagggggaacccggagcacctccacttctagggaagatggacagcgtgggggcacacctgggcctcccggaagctgtggacgaaagggagagcgggtcctccagggcaaggggaacgggaaataggtctcctaggtgcctgaagcgctgagcaacctgggtaccctggtggggatgcagggaaggccggggcagagaaagcgaaggtcgacccagggctgtaggaagccataggagagtgaccacgggattccctgagaaacagggccggccccccaacttcagggacccaccgcccattccccgagagctgtcggaaccagatgcaacccggcagcccagagaactctcctgggaggctgtgggtgagccaggccaacattggtgtccctgtccccagagggaggagcaggcaggagagagaggggaaggaggtatgaatcccagtccccaggaacctagctctttaaactctggggagtcggattcaggaaacacccccaggaggccaagcctgaaaacagaggggagggaggaaggaaggagtcccagcaggagcacagccctggtttcctgtcactcagagctgattcacaggaggaggggaggttggggggcgggagacaaaaaccacacctctttttatataaggtttcatatttaatttggtcatggattcataaatacataagtattttgtac

SEQ ID NO: 2489 - protein, 727 aa, Homo sapiens
MDSDMDYERPNVETIKCVVVGDNAVGKTRLICARACNATLTQYQLLATHVPTVWAIDQYRVCQEVLERSRDVVDDVSVSLRLWDTFGDHHKDRRFAYGRSDVVVLCFSIANPNSLHHVKTMWYPEIKHFCPRAPVILVGCQLDLRYADLEAVNRARRPLARPIKPNEILPPEKGREVAKELGIPYYETSVVAQFGIKDVFDNAIRAALISRRHLQFWKSHLRNVQRPLLQAPFLPPKPPPPIIVVPDPPSSSEECPAHLLEDPLCADVILVLQERVRIFAHKIYLSTSSSKFYDLFLMDLSEGELGGPSEPGGTHPEDHQGHSDQHHHHHHHHHGRDFLLRAASFDVCESVDEAGGSGPAGLRASTSDGILRGNGTGYLPGRGRVLSSWSRAFVSIQEEMAEDPLTYKSRLMVVVKMDSSIQPGPFRAVLKYLYTGELDENERDLMHIAHIAELLEVFDLRMMVANILNNEAFMNQEITKAFHVRRTNRVKECLAKGTFSDVTFILDDGTISAHKPLLISSCDWMAAMFGGPFVESSTREVVFPYTSKSCMRAVLEYLYTGMFTSSPDLDDMKLIILANRLCLPHLVALTEQYTVTGLMEATQMMVDIDGDVLVFLELAQFHCAYQLADWCLHHICTNYNNVCRKFPRDMKAMSPENQEYFEKHRWPPVWYLKEEDHYQRARKEREKEDYLHLKRQPKRRWLFWNSPSSPSSSAASSSSPSSSSAVV

SEQ ID NO: 2490 - DNA, 3713 bp, Homo sapiens
ggtctcagctgagtctgctctgatcacccaacaagacctagctccccagcagagagcggccccacaacaaaagaggtccagcccctcagagggattgtgtccacctggacaccatatctcagaagacggtagagattgcatctcctgcaaatatggacaggactatagcactcactggaatgacctccttttctgcttgcgctgcaccaggtgtgattcaggtgaagtggagctaagtccctgcaccacgaccagaaacacagtgtgtcagtgcgaagaaggcaccttccgggaagaagattctcctgagatgtgccggaagtgccgcacagggtgtcccagagggatggtcaaggtcggtgattgtacaccctggagtgacatcgaatgtgtccacaaagaatcaggtacaaagcacagtggggaagccccagctgtggaggagacggtgacctccagcccagggactcctgcctctccctgttctctctcaggcatcatcataggagtcacagttgcagccgtagtcttgattgtggctgtgtttgtttgcaagtctttactgtggaagaaagtccttccttacctgaaaggcatctgctcaggtggtggtggggaccctgagcgtgtggacagaagctcacaacgacctggggctgaggacaatgtcctcaatgagatcgtgagtatcttgcagcccacccaggtccctgagcaggaaatggaagtccaggagccagcagagccaacaggtgtcaacatgttgtcccccggggagtcagagcatctgctggaaccggcagaagctgaaaggtctcagaggaggaggctgctggttccagcaaatgaaggtgatcccactgagactctgagacagtgcttcgatgactttgcagacttggtgccctttgactcctgggagccgctcatgaggaagttgggcctcatggacaatgagataaaggtggctaaagctgaggcagcgggccacagggacaccttgtacacgatgctgataaagtgggtcaacaaaaccgggcgagatgcctctgtccacaccctgctggatgccttggagacgctgggagagagacttgccaagcagaagattgaggaccacttgttgagctctggaaagttcatgtatctagaaggtaatgcagactctgccatgtcctaagtgtgattctcttcaggaagtcagaccttccctggtttaccttttttctggaaaaagcccaactggactccagtcagtaggaaagtgccacaattgtcacatgaccggtactggaagaaactctcccatccaacatcacccagtggatggaacatcctgtaacttttcactgcacttggcattatttttataagctgaatgtgataataaggacactatggaaatgtctggatcattccgtttgtgcgtactttgagatttggtttgggatgtcattgttttcacagcacttttttatcctaatgtaaatgctttatttatttatttgggctacattgtaagatccatctacacagtcgttgtccgacttcacttgatactatatgatatgaaccttttttgggtggggggtgcggggcagttcactctgtctcccaggctggagtgcaatggtgcaatcttggctcactatagccttgacctctcaggctcaagcgattctcccacctcagccatccaaatagctgggaccacaggtgtgcaccaccacgcccggctaattttttgtattttgtctagatataggggctctctatgttgctcagggtggtctcgaattcctggactcaagcagtctgcccacctcagactcccaaagcggtggaattagaggcgtgagcccccatgcttggccttacctttctacttttataattctgtatgttattattttatgaacatgaagaaactttagtaaatgtacttgtttacatagttatgtgaatagattagataaacataaaaggaggagacatacaatgggggaagaagaagaagtcccctgtaagatgtcactgtctgggttccagccctccctcagatgtactttggcttcaatgattggcaacttctacaggggccagtcttttgaactggacaaccttacaagtatatgagtattatttataggtagttgtttacatatgagtcgggaccaaagagaactggatccacgtgaagtcctgtgtgtggctggtccctacctgggcagtctcatttgcacccatagcccccatctatggacaggctgggacagaggcagatgggttagatcacacataacaatagggtctatgtcatatcccaagtgaacttgagccctgtttgggctcaggagatagaagacaaaatctgtctcccacgtctgccatggcatcaagggggaagagtagatggtgcttgagaatggtgtgaaatggttgccatctcaggagtagatggcccggctcacttctggttatctgtcaccctgagcccatgagctgccttttagggtacagattgcctacttgaggaccttggccgctctgtaagcatctgactcatctcagaaatgtcaattcttaaacactgtggcaacaggacctagaatggctgacgcattaaggttttcttcttgtgtcctgttctattattgttttaagacctcagtaaccatttcagcctctttccagcaaacccttctccatagtatttcagtcatggaaggatcatttatgcaggtagtcattccaggagtttttggtcttttctgtctcaaggcattgtgtgttttgttccgggactggtttgggtgggacaaagttagaattgcctgaagatcacacattcagactgttgtgtctgtggagttttaggagtggggggtgacctttctggtctttgcacttccatcctctcccacttccatctggcatcccacgcgttgtcccctgcacttctggaaggcacagggtgctgctgcctcctggtctttgcctttgctgggccttctgtgcaggacgctcagcctcagggctcagaaggtgccagtccggtcccaggtcccttgtcccttccacagaggccttcctagaagatgcatctagagtgtcagccttatcagtgtttaagatttttcttttatttttaatttttttgagacagaatctcactctctcgcccaggctggagtgcaacggtacgatcttggctcagtgcaacctccgcctcctgggttcaagcgattctcgtgcctcagcctccggagtagctgggattgcaggcacccgccaccacgcctggctaatttttgtatttttagtagagacggggtttcaccatgttggtcaggctggtctcgaactcctgacctcaggtgatccaccttggcctccgaaagtgctgggattacaggcgtgagccaccagccaggccaagctattcttttaaagtaagcttcctgacgacatgaaataattgggggttttgttgtttagttacattaggctttgctatatccccaggccaaatagcatgtgacacaggacagccatagtatagtgtgtcactcgtggttggtgtcctttcatgcttctgccctgtcaaaggtccctatttgaaatgtgttataatacaaacaaggaagcacattgtgtacaaaatacttatgtatttatgaatccatgaccaaattaaatatgaaaccttatat

SEQ ID NO: 2491 - DNA, 2938 bp, Homo sapiens
cggacgcgtgggcaggcagcagccgggcagggatgctcctgcgctcccgggcggcctcgggcccagccacctgctcgccggggaagaggacacgcagaggagcagctggcttgcccggagtcctcccaccttgacccaagcatgcagggcccaccccgcagcctccgcgctgggctcagcctggacgacttcatccctggccacctccagtcccacatagggtcttcctcccgggggacacgggtgcccgtgatccggaatggtggctccaacacccttaatttccagttccacgaccccgcgcccaggactgtgtgcaatgggggctacacaccaagacgagatgcttcccagcacccggaccctgcgtggtatcagacctggccaggccctgggagcaagccctctgcaagcacaaagatccctgcctcccagcacacccagaactggtcagccacgtggaccaaggacagcaagcgtcgggacaagcgctgggtcaagtacgagggaatcgggcccgtggacgagagcggcatgcccattgccccccgatccagcgttgacagacccagagactggtaccggagaatgttccagcagattcaccggaaaatgccagacttgcagctggactggaccttcgaggagccacccagagaccccaggcatctaggagcccagcaaagacctgcccacaggcccggcccggcaacatcttccagtggaagaagctgggaccactctgaagagttacctagaagcaccttcaactacagacctggagcattctccactgtgctgcagccctcaaatcaggtgctcagacgccgggaaaaagtagacaatgtctggacggaagagtcctggaaccagtttctgcaggaactagagactgggcagaggcccaagaaaccgctggtggacgaccctggtgagaagccctcccagcccattgaggtgctgctggagagagagctggccgagctgagcgccgagctggacaaggacctgcgggcaattgagacccgactgccgtcccccaagagctcgccggcgccccgacgggccccggagcagcggcccccggccggcccggcctcagcctggagctccagctacccacatgcaccttacctgggttccgcccggtccctgagtccccacaaaatggctgatggaggaagccccttcctaggtcggagggactttgtctacccttcctcaacccgagaccctagtgcctctaacggagggggcagcccagccaggagggaagagaagaagagaaaggccgccaggctcaagtttgacttccaggcgcagtcccccaaggagctgactctgcagaagggtgacattgtctacatccacaaggaggtggacaagaactggctggagggagagcaccacggccgcctgggcatcttccctgctaattatgtggaggtgctgcccgcagatgagatccctaagcccatcaagcccccgacctaccaggtgctggagtatggagaggctgtggcccagtacaccttcaagggggacctggaggtggagctgtccttccgcaagggagagcacatctgcctgatccgcaaggtgaacgagaactggtacgagggacgcatcacgggcacggggcgccaaggcatattccctgccagctacgtgcaggtgtctcgtgaaccccggctccggctctgtgacgacggcccccagctccccacgtctccccgcctgaccgctgccgcccgctcagcccgtcaccccagctccccctcagccctgcgcagcccagctgaccccaccgacttggggggacagacctccccccgtcgcactggcttctccttccccacccaggagcctagaccccagacccagaatcttggcacccctggtccagctctgtcccactctcgaggtcccagccatcccctggacctggggacctcctctcctaacacctctcagatacactggaccccgtaccgggcgatgtaccagtacaggccccagaacgaagacgagctggagctgcgcgagggggacagggtggatgtcatgcagcagtgtgacgatggctggtttgtgggtgtctcccggaggacccagaaattcggaacgttccctggaaattacgttgccccggtgtgagtggtctccatggcaacttggagccagccaggatggggtggggagcggtggcactcgtgggagggagaggacccccgcccacatcctccttccccaggacctgagctcccagcatctgcagacgacccccgcagcatttccctcggacccccctcgaagccccctggactgattcccacccacgactcacaggcattcctcccacagccctttcatttcctccccaccccactccccaaatacagaggtctgctttgaagcggagaccatttccaggccttattgagaccagaccccaagtcccccacccccatcctgctccagcgtttcctctaacagggaccagctctccgctttgcccccacggggttcctctaaccagaaccagcttcctagcctcgtagagaccaaaggccgcccccgcctgctggggttcctcccagcaccccagcttgctggctgccctctttgccttctggcctccagctgggtgtgggggggcggagcaaggcgggggacagacgcagcaccttcttagcgatctaggcctggcaagagctctggccccaaggcctcctcttcccaggggctgccaagtcctggccctggccctggcatatcaccccgcactgtggggccaggcaccactagcctggctcaaatattccccagggagactgctgtgtgctgcccgcctgcctgctggctctcccccagccccacatcccctctggaagagaatgtaaaataaacctggacacaagggccttcgtggcctcga

SEQ ID NO: 2492 - protein, 671 aa, Homo sapiens
MQGPPRSLRAGLSLDDFIPGHLQSHIGSSSRGTRVPVIRNGGSNTLNFQFHDPAPRTVCNGGYTPRRDASQHPDPAWYQTWPGPGSKPSASTKIPASQHTQNWSATWTKDSKRRDKRWVKYEGIGPVDESGMPIAPRSSVDRPRDWYRRMFQQIHRKMPDLQLDWTFEEPPRDPRHLGAQQRPAHRPGPATSSSGRSWDHSEELPRSTFNYRPGAFSTVLQPSNQVLRRREKVDNVWTEESWNQFLQELETGQRPKKPLVDDPGEKPSQPIEVLLERELAELSAELDKDLRAIETRLPSPKSSPAPRRAPEQRPPAGPASAWSSSYPHAPYLGSARSLSPHKMADGGSPFLGRRDFVYPSSTRDPSASNGGGSPARREEKKRKAARLKFDFQAQSPKELTLQKGDIVYIHKEVDKNWLEGEHHGRLGIFPANYVEVLPADEIPKPIKPPTYQVLEYGEAVAQYTFKGDLEVELSFRKGEHICLIRKVNENWYEGRITGTGRQGIFPASYVQVSREPRLRLCDDGPQLPTSPRLTAAARSARHPSSPSALRSPADPTDLGGQTSPRRTGFSFPTQEPRPQTQNLGTPGPALSHSRGPSHPLDLGTSSPNTSQIHWTPYRAMYQYRPQNEDELELREGDRVDVMQQCDDGWFVGVSRRTQKFGTFPGNYVAPV

SEQ ID NO: 2493 - DNA, 1899 bp, Homo sapiens
acttccgcccggcgcggagaccgaaggctggcggctggtcgcgttgcaggcaacatgtcggaaggaaacgccgccggcgagcccagcacgccgggagggccccgacctctcctgactggggcccgggggctcatcgggcggcggccggcgcctcccctcacccccggccgccttccctccatccgttccagggacctcaccctcgggggagtcaagaagaaaaccttcaccccaaatatcatcagtcggaagatcaaggaagagcccaaggaagaagtaactgtcaagaaggagaagcgtgaaagggacagagaccgacaacgagaggggcatggacgagggcgaggccgtccagaagtgatccagtctcactccatctttgagcagggcccagctgaaatgatgaagaaaaaagggaactgggataagacagtggatgtgtcagacatgggaccttctcatatcatcaacatcaaaaaagagaagagagagacagacgaagaaactaaacagatcttgcgtatgctggagaaggacgatttcctcgatgaccccggcctgaggaacgacactcgaaatatgcctgtgcagctgccgctggctcactcaggatggctttttaaggaagaaaatgacgaaccagatgttaaaccttggctggctggccccaaggaagaggacatggaggtggacatacctgctgtgaaagtgaaagaggagccacgagatgaggaggaagaggccaagatgaaggctcctcccaaagcagccaggaagactccaggcctcccgaaggatgtatctgtggcagagctgctgagggagctgagcctcaccaaggaagaggaactgctgtttctgcagctgccagacaccctccctggccagccacccacccaggacatcaagcctatcaagacagaggtgcagggcgaggacggacaggtggtgctcatcaagcaggagaaagaccgagaagccaaattggcagagaatgcttgtaccctggctgacctgacagagggtcaggttggcaagctactcatccgcaagtctggaagggtgcaactcctcttgggcaaggtgactctggacgtgaccatgggaactgcctgctccttcctgcaggagctggtgtccgtgggccttggagacagtaggacaggggagatgacagtcctgggacacgtgaagcacaaacttgtatgttcccctgattttgaatccctcttggatcacaaacaccggtaaaatgagcaggtggaggaggacggcgcctgtgcccacggctgctgcctgctccagacattttgttcttgaatctgtgagacccagaaggggcccactgagcccactcactccagcctttggcaaccattgttccaggtcccccagggcttcctcccacagcagctgtgaatggcacagtgaccttcctgcagcgtggagatggcacatccttgctgctggggacttggccctgctatttatttttgtatttatgtcttaatctcttccactgatgcatcctccaagggtagatggggagggtctgtgtgaaggggccggcttctcttggtgcctgctgggttgcaggggcaggaagcgtgtggactgcagcttctgctggtgctccccccgtcctcctggaggcagtataggagagagagcaaggattgagtctgagacttaagcactcggtcccagcttgccagttcctggttctgtgtccttggacaaactacctaacctttctgagcctcctatacctcatccgacacaaatggggatgatacctacctccagggttggcgtgaggattcatgggctattatagatgaaaactgcacaaggccagaaccagcaggcactcaataaacgttcatgtcctttttctct

SEQ ID NO: 2494 - protein, 398 aa, Homo sapiens
MSEGNAAGEPSTPGGPRPLLTGARGLIGRRPAPPLTPGRLPSIRSRDLTLGGVKKKTFTPNIISRKIKEEPKEEVTVKKEKRERDRDRQREGHGRGRGRPEVIQSHSIFEQGPAEMMKKKGNWDKTVDVSDMGPSHIINIKKEKRETDEETKQILRMLEKDDFLDDPGLRNDTRNMPVQLPLAHSGWLFKEENDEPDVKPWLAGPKEEDMEVDIPAVKVKEEPRDEEEEAKMKAPPKAARKTPGLPKDVSVAELLRELSLTKEEELLFLQLPDTLPGQPPTQDIKPIKTEVQGEDGQVVLIKQEKDREAKLAENACTLADLTEGQVGKLLIRKSGRVQLLLGKVTLDVTMGTACSFLQELVSVGLGDSRTGEMTVLGHVKHKLVCSPDFESLLDHKHR

SEQ ID NO: 2495 - DNA, 2487 bp, Homo sapiens
gccgcttccctcgccgccgccccgccagcatgcccggcgtggcccgcctgccgctgctgctcgggctgctgctgctcccgcgtcccggccggccgctggacttggccgactacacctatgacctggcggaggaggacgactcggagcccctcaactacaaagacccctgcaaggcggctgcctttcttggggacattgccctggacgaagaggacctgagggccttccaggtacagcaggctgtggatctcagacggcacacagctcgtaagtcctccatcaaagctgcagttccaggaaacacttctacccccagctgccagagcaccaacgggcagcctcagaggggagcctgtgggagatggagaggtagatcccgtagccggcgggcggcgacgtcccgaccagagcgtgtgtggcccgatggggtcatcccctttgtcattgggggaaacttcactggtagccagagggcagtcttccggcaggccatgaggcactgggagaagcacacctgtgtcaccttcctggagcgcactgacgaggacagctatattgtgttcacctatcgaccttgcgggtgctgctcctacgtgggtcgccgcggcgggggcccccaggccatctccatcggcaagaactgtgacaagttcggcattgtggtccacgagctgggccacgtcgtcggcttctggcacgaacacactcggccagaccgggaccgccacgtttccatcgttcgtgagaacatccagccagggcaggagtataacttcctgaagatggagcctcaggaggtggagtccctgggggagacctatgacttcgacagcatcatgcattacgctcggaacacattctccaggggcatcttcctggataccattgtccccaagtatgaggtgaacggggtgaaacctcccattggccaaaggacacggctcagcaagggggacattgcccaagcccgcaagctttacaagtgcccagcctgtggagagaccctgcaagacagcacaggcaacttctcctcccctgaataccccaatggctactctgctcacatgcactgcgtgtggcgcatctctgtcacacccggggagaagatcatcctgaacttcacgtccctggacctgtaccgcagccgcctgtgctggtacgactatgtggaggtccgagatggcttctggaggaaggcgcccctccgaggccgcttctgcgggtccaaactccctgagcctatcgtctccactgacagccgcctctgggttgaattccgcagcagcagcaattgggttggaaagggcttctttgcagtctacgaagccatctgcgggggtgatgtgaaaaaggactatggccacattcaatcgcccaactacccagacgattaccggcccagcaaagtctgcatctggcggatccaggtgtctgagggcttccacgtgggcctcacattccagtcctttgagattgagcgccacgacagctgtgcctacgactatctggaggtgcgcgacgggcacagtgagagcagcaccctcatcgggcgctactgtggctatgagaagcctgatgacatcaagagcacgtccagccgcctctggctcaagttcgtctctgacgggtccattaacaaagcgggctttgccgtcaactttttcaaagaggtggacgagtgctctcggcccaaccgcgggggctgtgagcagcggtgcctcaacaccctgggcagctacaagtgcagctgtgaccccgggtacgagctggccccagacaagcgccgctgtgaggctgcttgtggcggattcctcaccaagctcaacggctccatcaccagcccgggctggcccaaggagtacccccccaacaagaactgcatctggcagctggtggcccccacccagtaccgcatctccctgcagtttgacttctttgagacagagggcaatgatgtgtgcaagtacgacttcgtggaggtgcgcagtggactcacagctgactccaagctgcatggcaagttctgtggttctgagaagcccgaggtcatcacctcccagtacaacaacatgcgcgtggagttcaagtccgacaacaccgtgtccaaaaagggcttcaaggcccacttcttctcagaaaagaggccagctctgcagccccctcggggacgcccccaccagctcaaattccgagtgcagaaaagaaaccggaccccccagtgaggcctgccaggcctcccggaccccttgttactcaggaacctcaccttggacggaatgggatgggggcttcggtgcccaccaaccccccacctccactctgccattccggcccacctccctctggccggacagaactggtgctctcttctccccactgtgcccgtccgcggaccggggacccttccccgtgccctaccccctcccattttgatggtgtctgtgacatttcctgttgtgaagtaaaagagggacccctgcgtcctgc

SEQ ID NO: 2496 - protein, 730 aa, Homo sapiens
MPGVARLPLLLGLLLLPRPGRPLDLADYTYDLAEEDDSEPLNYKDPCKAAAFLGDIALDEEDLRAFQVQQAVDLRRHTARKSSIKAAVPGNTSTPSCQSTNGQPQRGACGRWRGRSRSRRAATSRPERVWPDGVIPFVIGGNFTGSQRAVFRQAMRHWEKHTCVTFLERTDEDSYIVFTYRPCGCCSYVGRRGGGPQAISIGKNCDKFGIVVHELGHVVGFWHEHTRPDRDRHVSIVRENIQPGQEYNFLKMEPQEVESLGETYDFDSIMHYARNTFSRGIFLDTIVPKYEVNGVKPPIGQRTRLSKGDIAQARKLYKCPACGETLQDSTGNFSSPEYPNGYSAHMHCVWRISVTPGEKIILNFTSLDLYRSRLCWYDYVEVRDGFWRKAPLRGRFCGSKLPEPIVSTDSRLWVEFRSSSNWVGKGFFAVYEAICGGDVKKDYGHIQSPNYPDDYRPSKVCIWRIQVSEGFHVGLTFQSFEIERHDSCAYDYLEVRDGHSESSTLIGRYCGYEKPDDIKSTSSRLWLKFVSDGSINKAGFAVNFFKEVDECSRPNRGGCEQRCLNTLGSYKCSCDPGYELAPDKRRCEAACGGFLTKLNGSITSPGWPKEYPPNKNCIWQLVAPTQYRISLQFDFFETEGNDVCKYDFVEVRSGLTADSKLHGKFCGSEKPEVITSQYNNMRVEFKSDNTVSKKGFKAHFFSEKRPALQPPRGRPHQLKFRVQKRNRTPQ

SEQ ID NO: 2497 - DNA, 2853 bp, Homo sapiens
gccgcttccctcgccgccgccccgccagcatgcccggcgtggcccgcctgccgctgctgctcgggctgctgctgctcccgcgtcccggccggccgctggacttggccgactacacctatgacctggcggaggaggacgactcggagcccctcaactacaaagacccctgcaaggcggctgcctttcttggggacattgccctggacgaagaggacctgagggccttccaggtacagcaggctgtggatctcagacggcacacagctcgtaagtcctccatcaaagctgcagttccaggaaacacttctacccccagctgccagagcaccaacgggcagcctcagaggggagcctgtgggagatggagaggtagatcccgtagccggcgggcggcgacgtcccgaccagagcgtgtgtggcccgatggggtcatcccctttgtcattgggggaaacttcactggtagccagagggcagtcttccggcaggccatgaggcactgggagaagcacacctgtgtcaccttcctggagcgcactgacgaggacagctatattgtgttcacctatcgaccttgcgggtgctgctcctacgtgggtcgccgcggcgggggcccccaggccatctccatcggcaagaactgtgacaagttcggcattgtggtccacgagctgggccacgtcgtcggcttctggcacgaacacactcggccagaccgggaccgccacgtttccatcgttcgtgagaacatccagccagggcaggagtataacttcctgaagatggagcctcaggaggtggagtccctgggggagacctatgacttcgacagcatcatgcattacgctcggaacacattctccaggggcatcttcctggataccattgtccccaagtatgaggtgaacggggtgaaacctcccattggccaaaggacacggctcagcaagggggacattgcccaagcccgcaagctttacaagtgcccagcctgtggagagaccctgcaagacagcacaggcaacttctcctcccctgaataccccaatggctactctgctcacatgcactgcgtgtggcgcatctctgtcacacccggggagaagatcatcctgaacttcacgtccctggacctgtaccgcagccgcctgtgctggtacgactatgtggaggtccgagatggcttctggaggaaggcgcccctccgaggccgcttctgcgggtccaaactccctgagcctatcgtctccactgacagccgcctctgggttgaattccgcagcagcagcaattgggttggaaagggcttctttgcagtctacgaagccatctgcgggggtgatgtgaaaaaggactatggccacattcaatcgcccaactacccagacgattaccggcccagcaaagtctgcatctggcggatccaggtgtctgagggcttccacgtgggcctcacattccagtcctttgagattgagcgccacgacagctgtgcctacgactatctggaggtgcgcgacgggcacagtgagagcagcaccctcatcgggcgctactgtggctatgagaagcctgatgacatcaagagcacgtccagccgcctctggctcaagttcgtctctgacgggtccattaacaaagcgggctttgccgtcaactttttcaaagaggtggacgagtgctctcggcccaaccgcgggggctgtgagcagcggtgcctcaacaccctgggcagctacaagtgcagctgtgaccccgggtacgagctggccccagacaagcgccgctgtgaggctgcttgtggcggattcctcaccaagctcaacggctccatcaccagcccgggctggcccaaggagtacccccccaacaagaactgcatctggcagctggtggcccccacccagtaccgcatctccctgcagtttgacttctttgagacagagggcaatgatgtgtgcaagtacgacttcgtggaggtgcgcagtggactcacagctgactccaagctgcatggcaagttctgtggttctgagaagcccgaggtcatcacctcccagtacaacaacatgcgcgtggagttcaagtccgacaacaccgtgtccaaaaagggcttcaaggcccacttcttctcagtcttggagggggcaggggaccgacactcacatctatcaggcctggagttactgctctgcccccatgccctggtcgacactgtgcccgccccaccctcagccctgcacggagacacacacgcccacacgcacacacatgtgcacacacattgccccatcgcacaagaaacctgcagaggacccccactgggggcatcgaggctcagccctcagggcccggggcatctgactctggccccccaggaggggagctatttggacttttgggacacccaccgaggagaccctaagccaagaaggagaagaaagagcctgaagaccttcagtctgacccctgccaccttccggggcatttgggcactgtaggaaaagaggccagctctgcagccccctcggggacgcccccaccagctcaaattccgagtgcagaaaagaaaccggaccccccagtgaggcctgccaggcctcccggaccccttgttactcaggaacctcaccttggacggaatgggatgggggcttcggtgcccaccaaccccccacctccactctgccattccggcccacctccctctggccggacagaactggtgctctcttctccccactgtgcccgtccgcggaccggggacccttccccgtgccctaccccctcccattttgatggtgtctgtgacatttcctgttgtgaagtaaaagagggacccctgcgtcctgc

SEQ ID NO: 2498 - protein, 823 aa, Homo sapiens
MPGVARLPLLLGLLLLPRPGRPLDLADYTYDLAEEDDSEPLNYKDPCKAAAFLGDIALDEEDLRAFQVQQAVDLRRHTARKSSIKAAVPGNTSTPSCQSTNGQPQRGACGRWRGRSRSRRAATSRPERVWPDGVIPFVIGGNFTGSQRAVFRQAMRHWEKHTCVTFLERTDEDSYIVFTYRPCGCCSYVGRRGGGPQAISIGKNCDKFGIVVHELGHVVGFWHEHTRPDRDRHVSIVRENIQPGQEYNFLKMEPQEVESLGETYDFDSIMHYARNTFSRGIFLDTIVPKYEVNGVKPPIGQRTRLSKGDIAQARKLYKCPACGETLQDSTGNFSSPEYPNGYSAHMHCVWRISVTPGEKIILNFTSLDLYRSRLCWYDYVEVRDGFWRKAPLRGRFCGSKLPEPIVSTDSRLWVEFRSSSNWVGKGFFAVYEAICGGDVKKDYGHIQSPNYPDDYRPSKVCIWRIQVSEGFHVGLTFQSFEIERHDSCAYDYLEVRDGHSESSTLIGRYCGYEKPDDIKSTSSRLWLKFVSDGSINKAGFAVNFFKEVDECSRPNRGGCEQRCLNTLGSYKCSCDPGYELAPDKRRCEAACGGFLTKLNGSITSPGWPKEYPPNKNCIWQLVAPTQYRISLQFDFFETEGNDVCKYDFVEVRSGLTADSKLHGKFCGSEKPEVITSQYNNMRVEFKSDNTVSKKGFKAHFFSVLEGAGDRHSHLSGLELLLCPHALVDTVPAPPSALHGDTHAHTHTHVHTHCPIAQETCRGPPLGASRLSPQGPGHLTLAPQEGSYLDFWDTHRGDPKPRRRRKSLKTFSLTPATFRGIWAL

SEQ ID NO: 2499 - DNA, 2695 bp, Homo sapiens
gccagcatgcccggcgtggcccgcctgccgctgctgctcgggctgctgctgctcccgcgtcccggccggccgctggacttggccgactacacctatgacctggcggaggaggacgactcggagcccctcaactacaaagacccctgcaaggcggctgcctttcttggggacattgccctggacgaagaggacctgagggccttccaggtacagcaggctgtggatctcagacggcacacagctcgtaagtcctccatcaaagctgcagttccaggaaacacttctacccccagctgccagagcaccaacgggcagcctcagaggggagcctgtgggagatggagaggtagatcccgtagccggcgggcggcgacgtcccgaccagagcgtgtgtggcccgatggggtcatcccctttgtcattgggggaaacttcactggtagccagagggcagtcttccggcaggccatgaggcactgggagaagcacacctgtgtcaccttcctggagcgcactgacgaggacagctatattgtgttcacctatcgaccttgcgggtgctgctcctacgtgggtcgccgcggcgggggcccccaggccatctccatcggcaagaactgtgacaagttcggcattgtggtccacgagctgggccacgtcgtcggcttctggcacgaacacactcggccagaccgggaccgccacgtttccatcgttcgtgagaacatccagccagggcaggagtataacttcctgaagatggagcctcaggaggtggagtccctgggggagacctatgacttcgacagcatcatgcattacgctcggaacacattctccaggggcatcttcctggataccattgtccccaagtatgaggtgaacggggtgaaacctcccattggccaaaggacacggctcagcaagggggacattgcccaagcccgcaagctttacaagtgcccagcctgtggagagaccctgcaagacagcacaggcaacttctcctcccctgaataccccaatggctactctgctcacatgcactgcgtgtggcgcatctctgtcacacccggggagaagatcatcctgaacttcacgtccctggacctgtaccgcagccgcctgtgctggtacgactatgtggaggtccgagatggcttctggaggaaggcgcccctccgaggccgcttctgcgggtccaaactccctgagcctatcgtctccactgacagccgcctctgggttgaattccgcagcagcagcaattgggttggaaagggcttctttgcagtctacgaagccatctgcgggggtgatgtgaaaaaggactatggccacattcaatcgcccaactacccagacgattaccggcccagcaaagtctgcatctggcggatccaggtgtctgagggcttccacgtgggcctcacattccagtcctttgagattgagcgccacgacagctgtgcctacgactatctggaggtgcgcgacgggcacagtgagagcagcaccctcatcgggcgctactgtggctatgagaagcctgatgacatcaagagcacgtccagccgcctctggctcaagttcgtctctgacgggtccattaacaaagcgggctttgccgtcaactttttcaaagaggtggacgagtgctctcggcccaaccgcgggggctgtgagcagcggtgcctcaacaccctgggcagctacaagtgcagctgtgaccccgggtacgagctggccccagacaagcgccgctgtgaggggtgttatgatctacaggttgggaaacccctgttgtgggacagacactgtttccgcctctccacgcatggtcccgagatgctggggacagcactccgaggctaatggctccagctcactaggccgatcctgctgtgcccccgagctgctccctttcctgcacctcccaggaccgcccctccctgaactgctttccctgagtcccttattcccgctcactccctcttggaggaccttggcctgttcatttgcagagaagatagaaatggccacacttatgaccccttagctcccccactcctccctacaggcccacccctgaggacacccaggccaccctgcctcctcccgtccgccccagagggaccagacacaggtccctgagccttggggagtccacaggctccccatcttctccttactgcatctcagcccacatctcagcccttccccatggcaggggctccccgcagacgatgccaccttccttgtccccgcagctgcttgtggcggattcctcaccaagctcaacggctccatcaccagcccgggctggcccaaggagtacccccccaacaagaactgcatctggcagctggtggcccccacccagtaccgcatctccctgcagtttgacttctttgagacagagggcaatgatgtgtgcaagtacgacttcgtggaggtgcgcagtggactcacagctgactccaagctgcatggcaagttctgtggttctgagaagcccgaggtcatcacctcccagtacaacaacatgcgcgtggagttcaagtccgacaacaccgtgtccaaaaagggcttcaaggcccacttcttctcagaaaagaggccagctctgcagccccctcggggacgcccccaccagctcaaattccgagtgcagaaaagaaaccggaccccccag

SEQ ID NO: 2500 - protein, 622 aa, Homo sapiens
MPGVARLPLLLGLLLLPRPGRPLDLADYTYDLAEEDDSEPLNYKDPCKAAAFLGDIALDEEDLRAFQVQQAVDLRRHTARKSSIKAAVPGNTSTPSCQSTNGQPQRGACGRWRGRSRSRRAATSRPERVWPDGVIPFVIGGNFTGSQRAVFRQAMRHWEKHTCVTFLERTDEDSYIVFTYRPCGCCSYVGRRGGGPQAISIGKNCDKFGIVVHELGHVVGFWHEHTRPDRDRHVSIVRENIQPGQEYNFLKMEPQEVESLGETYDFDSIMHYARNTFSRGIFLDTIVPKYEVNGVKPPIGQRTRLSKGDIAQARKLYKCPACGETLQDSTGNFSSPEYPNGYSAHMHCVWRISVTPGEKIILNFTSLDLYRSRLCWYDYVEVRDGFWRKAPLRGRFCGSKLPEPIVSTDSRLWVEFRSSSNWVGKGFFAVYEAICGGDVKKDYGHIQSPNYPDDYRPSKVCIWRIQVSEGFHVGLTFQSFEIERHDSCAYDYLEVRDGHSESSTLIGRYCGYEKPDDIKSTSSRLWLKFVSDGSINKAGFAVNFFKEVDECSRPNRGGCEQRCLNTLGSYKCSCDPGYELAPDKRRCEGCYDLQVGKPLLWDRHCFRLSTHGPEMLGTALRG

SEQ ID NO: 2501 - DNA, 2463 bp, Homo sapiens
gccagcatgcccggcgtggcccgcctgccgctgctgctcgggctgctgctgctcccgcgtcccggccggccgctggacttggccgactacacctatgacctggcggaggaggacgactcggagcccctcaactacaaagacccctgcaaggcggctgcctttcttggggacattgccctggacgaagaggacctgagggccttccaggtacagcaggctgtggatctcagacggcacacagctcgtaagtcctccatcaaagctgcagttccaggaaacacttctacccccagctgccagagcaccaacgggcagcctcagaggggagcctgtgggagatggagaggtagatcccgtagccggcgggcggcgacgtcccgaccagagcgtgtgtggcccgatggggtcatcccctttgtcattgggggaaacttcactggtagccagagggcagtcttccggcaggccatgaggcactgggagaagcacacctgtgtcaccttcctggagcgcactgacgaggacagctatattgtgttcacctatcgaccttgcgggtgctgctcctacgtgggtcgccgcggcgggggcccccaggccatctccatcggcaagaactgtgacaagttcggcattgtggtccacgagctgggccacgtcgtcggcttctggcacgaacacactcggccagaccgggaccgccacgtttccatcgttcgtgagaacatccagccaggcgttctccactcttcactgctccttctcagctgtggctctagaaatggtgcttccttcccatgttcccttgagtcctccactcaccaggccctctgctggacaggactcttcctcagaccctccccattccccaggctccccttggctgctccccggaccctcagggcaggagtataacttcctgaagatggagcctcaggaggtggagtccctgggggagacctatgacttcgacagcatcatgcattacgctcggaacacattctccaggggcatcttcctggataccattgtccccaagtatgaggtgaacggggtgaaacctcccattggccaaaggacacggctcagcaagggggacattgcccaagcccgcaagctttacaagtgcccagcctgtggagagaccctgcaagacagcacaggcaacttctcctcccctgaataccccaatggctactctgctcacatgcactgcgtgtggcgcatctctgtcacacccggggagaagatcatcctgaacttcacgtccctggacctgtaccgcagccgcctgtgctggtacgactatgtggaggtccgagatggcttctggaggaaggcgcccctccgagggcccaacactggccagggatgacaacctggtatgggagccaggagtcctggcatcattagtcccagatagctgcattactcacttgctgcgagacttcaggccgcttctgcgggtccaaactccctgagcctatcgtctccactgacagccgcctctgggttgaattccgcagcagcagcaattgggttggaaagggcttctttgcagtctacgaagccatctgcgggggtgatgtgaaaaaggactatggccacattcaatcgcccaactacccagacgattaccggcccagcaaagtctgcatctggcggatccaggtgtctgagggcttccacgtgggcctcacattccagtcctttgagattgagcgccacgacagctgtgcctacgactatctggaggtgcgcgacgggcacagtgagagcagcaccctcatcgggcgctactgtggctatgagaagcctgatgacatcaagagcacgtccagccgcctctggctcaagttcgtctctgacgggtccattaacaaagcgggctttgccgtcaactttttcaaagaggtggacgagtgctctcggcccaaccgcgggggctgtgagcagcggtgcctcaacaccctgggcagctacaagtgcagctgtgaccccgggtacgagctggccccagacaagcgccgctgtgaggctgcttgtggcggattcctcaccaagctcaacggctccatcaccagcccgggctggcccaaggagtacccccccaacaagaactgcatctggcagctggtggcccccacccagtaccgcatctccctgcagtttgacttctttgagacagagggcaatgatgtgtgcaagtacgacttcgtggaggtgcgcagtggactcacagctgactccaagctgcatggcaagttctgtggttctgagaagcccgaggtcatcacctcccagtacaacaacatgcgcgtggagttcaagtccgacaacaccgtgtccaaaaagggcttcaaggcccacttcttctcagaaaagaggccagctctgcagccccctcggggacgcccccaccagctcaaattccgagtgcagaaaagaaaccggaccccccag

SEQ ID NO: 2502 - protein, 302 aa, Homo sapiens
MPGVARLPLLLGLLLLPRPGRPLDLADYTYDLAEEDDSEPLNYKDPCKAAAFLGDIALDEEDLRAFQVQQAVDLRRHTARKSSIKAAVPGNTSTPSCQSTNGQPQRGACGRWRGRSRSRRAATSRPERVWPDGVIPFVIGGNFTGSQRAVFRQAMRHWEKHTCVTFLERTDEDSYIVFTYRPCGCCSYVGRRGGGPQAISIGKNCDKFGIVVHELGHVVGFWHEHTRPDRDRHVSIVRENIQPGVLHSSLLLLSCGSRNGASFPCSLESSTHQALCWTGLFLRPSPFPRLPLAAPRTLRAGV

SEQ ID NO: 2503 - DNA, 1731 bp, Homo sapiens
gcaagccggagccctggggttgggcagcactcggttccgtgcaactttcaagtgagttgcgaactccgccctgtaggccggtgctggtggcccggcgcgctggaaccgcggcgacccgctccagcgcgggaccagcagcaagggccgagcgccaggttctccgcggcagaaagggcgggtgggagctgtaactgccccggccgcggggcgcgcccgctcccaagtcggcttcctccccgccggggccgctttgcctcgggtctccccattctccaggtcccctgaactgcacagtcggaggccgtgggcggcgggctctgcctccgccgagggacagccggatcgcccctctgcttcccgcaactgccctgatcaccccccgtcccagcccttgagtgaacgtccttctgagcggcttcctggggtcctccccacgtcccaaaggccggcaagatggtgtcctggatgatctgtcgcctggtggtgctggtgtttgggatgctgtgtccagcttatgcttcctataaggctgtgaagaccaagaacattcgtgaatatgtgcggtggatgatgtactggattgtttttgcactcttcatggcagcagagatcgttacagacatttttatctcctggttccctttctactatgagatcaagatggccttcgtgctgtggctgctctcaccctacaccaagggcgccagcctgctttaccgcaagtttgtccacccgtccctgtcccgccatgagaaggagatcgacgcgtacatcgtgcaggccaaggagcgcagctacgagaccgtgctcagcttcgggaagcggggcctcaacattgccgcctccgctgctgtgcaggctgccaccaagagtcagggggcgctggccggcaggctgcggagcttctccatgcaggacctgcgctccatctctgacgcacctgcccctgcctaccatgaccccctctacctggaggaccaggtgtcccaccggaggccacccattgggtaccgggccgggggcctgcaggacagcgacaccgaggatgagtgttggtcagatactgaggcagtcccccgggcgccagcccggccccgagagaagcccctaatccgcagccagagcctgcgtgtggtcaagaggaagccaccggtgcgggagggcacctcgcgctccctgaaggttcggacgaggaaaaagactgtgccctcagacgtggacagctagggtctgctgcatctgcccccttcttacctcgtgccctgcagggctccagggctatttggagggaccttgggctgcacatctggcctgcctgcaccagctgcctgggccccaccctcctgactcctgctgatggttaagggccgggagcagatgctgccaaggccacatgcagggatgcacccacaatgtaccaaagcaggctgggcccagggttctatttattgccttgctctgccctctcccttccccggttgtgggacaagagccctccctgaacccctgcaaccctccctgaacccctgcaaatgaaaccaaacgtccacctgggtgtgttcattccttcctgtccttcaaagtacttgatagcctttcataaggcctggcacatgtgtcctggttgtgtgtgtgtgtgttggtgagtgaggtcaggtttgcgagtgttttgataaataaatacataaaggggcaaaaaaaaaaaaaaaaaaaaaaaaaaaaaaaaaaaaa

SEQ ID NO: 2504 - protein, 257 aa, Homo sapiens
MVSWMICRLVVLVFGMLCPAYASYKAVKTKNIREYVRWMMYWIVFALFMAAEIVTDIFISWFPFYYEIKMAFVLWLLSPYTKGASLLYRKFVHPSLSRHEKEIDAYIVQAKERSYETVLSFGKRGLNIAASAAVQAATKSQGALAGRLRSFSMQDLRSISDAPAPAYHDPLYLEDQVSHRRPPIGYRAGGLQDSDTEDECWSDTEAVPRAPARPREKPLIRSQSLRVVKRKPPVREGTSRSLKVRTRKKTVPSDVDS

SEQ ID NO: 2505 - DNA, 3346 bp, Homo sapiens
gactgcaatgtgccgatcttagctgctgcctgagaggatgtctggggtgtccgagcccctgagtcgagtaaagttgggcacgttacgccggcctgaaggccctgcagagcccatggtggtggtaccagtagatgtggaaaaggaggacgtgcgtatcctcaaggtctgcttctatagcaacagcttcaatcctgggaaaaacttcaaactggtcaaatgcactgtccagacggagatccgggagatcatcacctccatcctgctgagcgggcggatcgggcccaacatccggttggctgagtgctatgggctgaggctgaagcacatgaagtccgatgagatccactggctgcacccacagatgacggtgggtgaggtgcaggacaagtatgagtgtctgcacgtggaagccgagtggaggtatgaccttcaaatccgctacttgccagaagacttcatggagagcctgaaggaggacaggaccacgctgctctatttttaccaacagctccggaacgactacatgcagcgctacgccagcaaggtcagcgagggcatggccctgcagctgggctgcctggagctcaggcggttcttcaaggatatgccccacaatgcacttgacaagaagtccaacttcgagctcctagaaaaggaagtggggctggacttgtttttcccaaagcagatgcaggagaacttaaagcccaaacagttccggaagatgatccagcagaccttccagcagtacgcctcgctcagggaggaggagtgcgtcatgaagttcttcaacactctcgccggcttcgccaacatcgaccaggagacctaccgctgtgaactcattcaaggatggaacattactgtggacctggtcattggccctaaagggatccgccagctgactagtcaggacgcaaagcccacctgcctggccgagttcaagcagatcaggtccatcaggtgcctcccgctggaggagggccaggcagtacttcagctgggcattgaaggtgccccccaggccttgtccatcaaaacctcatccctagcagaggctgagaacatggctgacctcatagacggctactgccggctgcagggtgagcaccaaggctctctcatcatccatcctaggaaagatggtgagaagcggaacagcctgccccagatccccatgctaaacctggaggcccggcggtcccacctctcagagagctgcagcatagagtcagacatctacgcagagattcccgacgaaaccctgcgaaggcccggaggtccacagtatggcattgcccgtgaagatgtggtcctgaatcgtattcttggggaaggcttttttggggaggtctatgaaggtgtctacacaaatcacaaaggggagaaaatcaatgtagctgtcaagacctgcaagaaagactgcactctggacaacaaggagaagttcatgagcgaggcagtgatcatgaagaacctcgaccacccgcacatcgtgaagctgatcggcatcattgaagaggagcccacctggatcatcatggaattgtatccctatggggagctgggccactacctggagcggaacaagaactccctgaaggtgctcaccctcgtgctgtactcactgcagatatgcaaagccatggcctacctggagagcatcaactgcgtgcacagggacattgctgtccggaacatcctggtggcctcccctgagtgtgtgaagctgggggactttggtctttcccggtacattgaggacgaggactattacaaagcctctgtgactcgtctccccatcaaatggatgtccccagagtccattaacttccgacgcttcacgacagccagtgacgtctggatgttcgccgtgtgcatgtgggagatcctgagctttgggaagcagcccttcttctggctggagaacaaggatgtcatcggggtgctggagaaaggagaccggctgcccaagcctgatctctgtccaccggtcctttataccctcatgacccgctgctgggactacgaccccagtgaccggccccgcttcaccgagctggtgtgcagcctcagtgacgtttatcagatggagaaggacattgccatggagcaagagaggaatgctcgctaccgaacccccaaaatcttggagcccacagccttccaggaacccccacccaagcccagccgacctaagtacagaccccctccgcaaaccaacctcctggctccaaagctgcagttccaggttcctgagggtctgtgtgccagctctcctacgctcaccagccctatggagtatccatctcccgttaactcactgcacaccccacctctccaccggcacaatgtcttcaaacgccacagcatgcgggaggaggacttcatccaacccagcagccgagaagaggcccagcagctgtgggaggctgaaaaggtcaaaatgcggcaaatcctggacaaacagcagaagcagatggtggaggactaccagtggctcaggcaggaggagaagtccctggaccccatggtttatatgaatgataagtccccattgacgccagagaaggaggtcggctacctggagttcacagggcccccacagaagcccccgaggctgggcgcacagtccatccagcccacagctaacctggaccggactgatgacctggtgtacctcaatgtcatggagctggtgcgggccgtgctggagctcaagaatgagctctgtcagctgccccccgagggctacgtggtggtggtgaagaatgtggggctgaccctgcggaagctcatcgggagcgtggatgatctcctgccttccttgccgtcatcttcacggacagagatcgagggcacccagaaactgctcaacaaagacctggcagagctcatcaacaagatgcggctggcacagcagaacgccgtgacctccctaagtgaggagtgcaagaggcagatgctgacggcttcacacaccctggctgtggacgccaagaacctgctcgacgctgtggaccaggccaaggttctggccaatctggcccacccacctgcagagtgacggagggtgggggccacctgcctgcgtcttccgcccctgcctgccatgtacctcccctgccttgctgttggtcatgtgggtcttccagggggaaggccaaggggagtcaccttcccttgccactttgcacgacgccctctccccacccctacccctggctgtactgctcaggctgcagctggacagaggggactctgggctatggacacagggtgacggtgacaaagatggctcagagggggactgctgctgcctggccactgctccctaagccagcct

SEQ ID NO: 2506 - DNA, 1676 bp, Homo sapiens
gaattccgccgctgaccgaggcgtgcaaagactccagaattggaggcatgatgaagactctgctgctgtttgtggggctgctgctgacctgggagagtgggcaggtcctgggggaccagacggtctcagacaatgagctccaggaaatgtccaatcagggaagtaagtacgtcaataaggaaattcaaaatgctgtcaacggggtgaaacagataaagactctcatagaaaaaacaaacgaagagcgcaagacactgctcagcaacctagaagaagccaagaagaagaaagaggatgccctaaatgagaccagggaatcagagacaaagctgaaggagctcccaggagtgtgcaatgagaccatgatggccctctgggaagagtgtaagccctgcctgaaacagacctgcatgaagttctacgcacgcgtctgcagaagtggctcaggcctggttggccgccagcttgaggagttcctgaaccagagctcgcccttctacttctggatgaatggtgaccgcatcgactccctgctggagaacgaccggcagcagacgcacatgctggatgtcatgcaggaccacttcagccgcgcgtccagcatcatagacgagctcttccaggacaggttcttcacccgggagccccaggatacctaccactacctgcccttcagcctgccccaccggaggcctcacttcttctttcccaagtcccgcatcgtccgcagcttgatgcccttctctccgtacgagcccctgaacttccacgccatgttccagcccttccttgagatgatacacgaggctcagcaggccatggacatccacttccacagcccggccttccagcacccgccaacagaattcatacgagaaggcgacgatgaccggactgtgtgccgggagatccgccacaactccacgggctgcctgcggatgaaggaccagtgtgacaagtgccgggagatcttgtctgtggactgttccaccaacaacccctcccaggctaagctgcggcgggagctcgacgaatccctccaggtcgctgagaggttgaccaggaaatacaacgagctgctaaagtcctaccagtggaagatgctcaacacctcctccttgctggagcagctgaacgagcagtttaactgggtgtcccggctggcaaacctcacgcaaggcgaagaccagtactatctgcgggtcaccacggtggcttcccacacttctgactcggacgttccttccggtgtcactgaggtggtcgtgaagctctttgactctgatcccatcactgtgacggtccctgtagaagtctccaggaagaaccctaaatttatggagaccgtggcggagaaagcgctgcaggaataccgcaaaaagcaccgggaggagtgagatgtggatgttgcttttgcaccttacgggggcatcttgagtccagctccccccaagatgagctgcagccccccagagagagctctgcacgtcaccaagtaaccaggccccagcctccaggcccccaactccgcccagcctctccccgctctggatcctgcactctaacactcgactctgctgctcatgggaagaacagaattgctcctgcatgcaactaattcaataaaactgtcttgtgagctgaaaaaaaaaaaaaaaaaaaaaaaaaaggaattc

SEQ ID NO: 2507 - protein, 449 aa, Homo sapiens
MMKTLLLFVGLLLTWESGQVLGDQTVSDNELQEMSNQGSKYVNKEIQNAVNGVKQIKTLIEKTNEERKTLLSNLEEAKKKKEDALNETRESETKLKELPGVCNETMMALWEECKPCLKQTCMKFYARVCRSGSGLVGRQLEEFLNQSSPFYFWMNGDRIDSLLENDRQQTHMLDVMQDHFSRASSIIDELFQDRFFTREPQDTYHYLPFSLPHRRPHFFFPKSRIVRSLMPFSPYEPLNFHAMFQPFLEMIHEAQQAMDIHFHSPAFQHPPTEFIREGDDDRTVCREIRHNSTGCLRMKDQCDKCREILSVDCSTNNPSQAKLRRELDESLQVAERLTRKYNELLKSYQWKMLNTSSLLEQLNEQFNWVSRLANLTQGEDQYYLRVTTVASHTSDSDVPSGVTEVVVKLFDSDPITVTVPVEVSRKNPKFMETVAEKALQEYRKKHREE

SEQ ID NO: 2508 - DNA, 1858 bp, Homo sapiens
atagtgacaagtttggaagaaggtccagctatggaggaagttcatatgggaatagtactaacaatgtcccagcatcttcctctacagctacagcttccacacagacgcagcattcgggaatgtccccgtcacctagcaacagttatgacacttccccacagccttgcactaccaatcaaaatgggagggagaataatgagcgattatctacatccaatggaaagatgtcaccaactcgctaccatgcaaacagcatgggtcagaggtcatacagttttgaagcctcagaagaggacctagatgtagatgataaagtggaagaattaatgaggagggacagcagtgtgataaaagaggaaatcaaagcctttcttgccaatcggaggatttcccaagcagttgttgcacaggtaacaggtatcagtcagagccggatctctcattggctgttgcagcagggatcagacctgagtgaacagaagaaaagagcattttaccgatggtatcaacttgagaagacaaaccctggcgctacactaagtatgagaccagcccccattccaatagaggaccctgaatggagacaaacgcctcccccagtctctgccacatctggtactttccgactgcgacgagggagtcgatttacctggagaaaggagtgcctggctgttatggaaagttacttcaatgagaatcaatacccagatgaagcaaagagggaagaaattgcaaacgcttgcaatgcagttatacagaagccaggcaaaaagctgtcagatctggaaagagttacctccctgaaagtatataattggtttgctaacagaaggaaggagatcaagaggagagccaatattgaagcagcaatcctggagagtcatgggatagatgtgcagagtccaggaggccactcaaacagtgatgatgtcgacgggaatgactactctgagcaggatgacagtacgagccatagtgaccaccaagaccccatctcattagctgtggaaatggcagcagtcaaccacactatcttggcattggcccgacaaggagccaacgaaatcaagacagaggccctggatgatgactgatcagggaggttaaacatgacaagttaacttagtttagacgtagcaccttagcagactttcctcggtccttaacatgtgttcttacagtataacttgcagtttcttgtatgtcaggtagctgttagggtcttgttctgtgaagatggcatggtgccctcagcctttgcatatactctctcagtattaactcccagtaaataataaccaaccaaccaaccaaccaaacttccctctcccagcccccgaggctagaaaatcttgctgctccgtcttagcattccaagagagtgcttccaggtatttagatagccctcagttctcaaatattagactacgtgtaaaatcttgggtacctttagattcttgtaacactagtctgtactcccttttccttccccaagactgataggatgcaagctgaggtcgtggcacaggaatgacagacaccatttggggagtatccacagagtcaaaggaacactagaatccccacctcagcgtgaggataattgatttccagctgcaataagccgtgcctcattatagccacactgtggctagattatacttctttgggtgctgtgctaagaatgtcaatggaaaaagccgatctcagattttgtttgaagttaacatgcctgacacagacatcctttcctctcacaagctgtgtgacttagtagataaaatactgccttctgcctttgggaccatgattaaaaacaaagacaaaaaccaaaagtcattaaaaaaaaaaaaaaaaa

SEQ ID NO: 2509 - protein, 324 aa, Homo sapiens
MSPSPSNSYDTSPQPCTTNQNGRENNERLSTSNGKMSPTRYHANSMGQRSYSFEASEEDLDVDDKVEELMRRDSSVIKEEIKAFLANRRISQAVVAQVTGISQSRISHWLLQQGSDLSEQKKRAFYRWYQLEKTNPGATLSMRPAPIPIEDPEWRQTPPPVSATSGTFRLRRGSRFTWRKECLAVMESYFNENQYPDEAKREEIANACNAVIQKPGKKLSDLERVTSLKVYNWFANRRKEIKRRANIEAAILESHGIDVQSPGGHSNSDDVDGNDYSEQDDSTSHSDHQDPISLAVEMAAVNHTILALARQGANEIKTEALDDD

SEQ ID NO: 2510 - DNA, 2540 bp, Homo sapiens
aggtggcggagattgcaccggaagacgcttcctgggtttgaggagttcagtgactgctattgaaccaccaaaagtccattatgaaactgtattgcctgtcagggcacccaaccttaccatgcaatgtgctcaaattcaaatcaaccaccattatgttggactgcggactggacatgacttctaccctcaatttccttcctttgccacttgttcaaagtcccaggctgtccaatcttcctggctggtccctgaaggatggaaatgctttcttggacaaggagctaaaggagtgctcgggtcatgtatttgtggattctgtgccggaattctgtttaccagagacggagctaatagatctgtctacagtagatgtgattctcatctctaactatcactgtatgatggcgctgccatacatcaccgagcacaccggcttcacaggcacagtgtatgccacggaacccaccgtccagatcggcaggcttctcatggaagagctggtgaatttcattgaaagagtgccaaaggctcagtctgcctccttgtggaagaataaggacattcagaggctgttaccttctcctctcaaggatgcagtggaagtctcaacctggagaagatgctatacaatgcaagaggtgaactctgcccttagtaaaatccagctggtgggatattctcagaaaattgagctttttggtgcggtccaggtgactcctctgagctctggctatgcccttgggagctccaactggatcatccagtctcattacgagaaagtgtcttatgtctctggatcctccttgcttaccacacacccccagcccatggaccaagcttctctcaaaaacagcgatgttcttgttctgacagggcttacccagatccccactgcaaacccagatggaatggtgggagagttctgcagcaacctagctctgacagtccggaatggaggaaacgtgttggttccctgctacccttctggagtgatctatgacctcctggagtgcctatatcagtacatcgactcagccgggctttccagcgcccccctctacttcatctcccctgtggccaacagttcactggagttttcccagatctttgctgagtggctttgtcacaacaaacagagtaaggtgtatcttccagaaccaccttttcctcatgcagagctcattcagaccaataagctgaagcactaccccagcatccacggagacttcagcaacgactttagacagccctgtgtggtgttcaccgggcacccttccctccgcttcggggacgtggtccacttcatggagctctggggaaaatctagtctcaataccgtcatattcacggaaccagacttctcctacctggaagccctggctccttaccagccgctggccatgaaatgcatctactgccccatcgacacccggctgaacttcatccaggtgtcaaagctgcttaaagaagtgcagcccctgcacgtggtgtgtcctgagcagtacactcagccgcccccagcccagtcccacaggatggacctcatgatcgactgccagccccccgccatgtcctatcggcgggctgaggttctcgccctgcccttcaaacgtcggtacgagaagatcgagatcatgccagagctcgcagattcactggtgcccatggagatcaagcctggcatctccttggcaactgtctcggccgtgctgcacaccaaagataacaagcacttgcttcagccccctcctcggcccgcccagcccacgagcgggaagaagagaaagcgggtgagcgatgacgtaccagactgcaaagtcctgaagcctttgttgagcggttccatccctgtggagcagttcgtgcagaccctggagaagcatggcttcagtgatattaaggtggaggacacagccaagggccatatcgtcctgctccaggaggctgagacgctcatccagattgaagaagactcgacccatatcatctgcgacaatgacgagatgctcagagtgcgactgcgggaccttgtcctcaaattcttacagaagttctgagtgggccatctgagctacttccctgaaatcctgcagtccctcactggctgccctcacaagccacctgaggagtggcatgagaggccattaactgtgtctttgtggtgtcctctggcttaaggagtgaagaggtggctcttgagggaaatggtctggacttattcccagcactgtttcaggcaagaactttccctttcaacttcaggctcattttcttctcaactctggctctctcaaggagctggagggtgacagaagtgggacaggagaagttttccaagaggttcatgggaggcggaggtgactggctggctgtcttgcatcagtcccaggcctcggccaggggagccagcctttggtttcgtttacttgcctacagtgctgtacgcaataagatgatgatcccaaaatatggtaaagtgaacccatctgtctgcattttctactctgagcccatttgttaataaacacttatttttatat

SEQ ID NO: 2511 - protein, 658 aa, Homo sapiens
MKLYCLSGHPTLPCNVLKFKSTTIMLDCGLDMTSTLNFLPLPLVQSPRLSNLPGWSLKDGNAFLDKELKECSGHVFVDSVPEFCLPETELIDLSTVDVILISNYHCMMALPYITEHTGFTGTVYATEPTVQIGRLLMEELVNFIERVPKAQSASLWKNKDIQRLLPSPLKDAVEVSTWRRCYTMQEVNSALSKIQLVGYSQKIELFGAVQVTPLSSGYALGSSNWIIQSHYEKVSYVSGSSLLTTHPQPMDQASLKNSDVLVLTGLTQIPTANPDGMVGEFCSNLALTVRNGGNVLVPCYPSGVIYDLLECLYQYIDSAGLSSAPLYFISPVANSSLEFSQIFAEWLCHNKQSKVYLPEPPFPHAELIQTNKLKHYPSIHGDFSNDFRQPCVVFTGHPSLRFGDVVHFMELWGKSSLNTVIFTEPDFSYLEALAPYQPLAMKCIYCPIDTRLNFIQVSKLLKEVQPLHVVCPEQYTQPPPAQSHRMDLMIDCQPPAMSYRRAEVLALPFKRRYEKIEIMPELADSLVPMEIKPGISLATVSAVLHTKDNKHLLQPPPRPAQPTSGKKRKRVSDDVPDCKVLKPLLSGSIPVEQFVQTLEKHGFSDIKVEDTAKGHIVLLQEAETLIQIEEDSTHIICDNDEMLRVRLRDLVLKFLQKF

SEQ ID NO: 2512 - DNA, 2068 bp, Homo sapiens
ctgcacagggagtttgtcttgtgcaaacaatttccaaggcagcgttttcttccctgcctgggagtgcagggctcagcgccttcactttggaactgactcagagacctaaagaagcccacctggccagcgggaaggggggccgccgccgcctcccggttttgggcagccctggccagctccctgtggccttggaggacttccaccgggcaggcgttcccatgatgccaggctaccaggcgcgggggattcctgcaggccggcgctgcttttcttagaaccccctttctagaaaagtacacctggaggttttgcttcaaagagaggagaggcagcagcatggcgagtgtcctgtcccgacgccttggaaagcggtccctcctgggagcccgggtgttgggacccagtgcctcggaggggccctcggctgccccaccctcggagccactgctagaaggggccgctccccagcctttcaccacctctgatgacaccccctgccaggagcagcccaaggaagtccttaaggctcccagcacctcgggccttcagcaggtggcctttcagcctgggcagaaggtttatgtgtggtacgggggtcaagagtgcacaggactggtggagcagcacagctggatggagggtcaggtgaccgtctggctgctggagcagaagctgcaggtctgctgcagggtggaggaggtgtggctggcagagctgcagggcccctgtccccaggcaccacccctggagcccggagcccaggccctggcctacaggcccgtctccaggaacatcgatgtcccaaagaggaagtcggacgcagtggaaatggatgagatgatggcggccatggtgctgacgtccctgtcctgcagccctgttgtacagagtcctcccgggaccgaggccaacttctctgcttcccgtgcggcctgcgacccatggaaggagagtggtgacatctcggacagcggcagcagcactaccagcggtcactggagtgggagcagtggtgtctccaccccctcgcccccccacccccaggccagccccaagtatttgggggatgcttttggttctccccaaactgatcatggctttgagaccgatcctgaccctttcctgctggacgaaccagctccacgaaaaagaaagaactctgtgaaggtgatgtacaagtgcctgtggccaaactgtggcaaagttctgcgctccattgtgggcatcaaacgacacgtcaaagccctccatctgggggacacagtggactctgatcagttcaagcgggaggaggatttctactacacagaggtgcagctgaaggaggaatctgctgctgctgctgctgctgctgccgcaggcaccccagtccctgggactcccacctccgagccagctcccacccccagcatgactggcctgcctctgtctgctcttccaccacctctgcacaaagcccagtcctccggcccagaacatcctggcccggagtcctccctgccctcaggggctctcagcaagtcagctcctgggtccttctggcacattcaggcagatcatgcataccaggctctgccatccttccagatcccagtctcaccacacatctacaccagtgtcagctgggctgctgccccctccgccgcctgctctctctctccggtccggagccggtcgctaagcttcagcgagccccagcagccagcacctgcgatgaaatctcatctgatcgtcacttctccaccccgggcccagagtggtgccaggaaagcccgaggggaggctaagaagtgccgcaaggtgtatggcatcgagcaccgggaccagtggtgcacggcgtgccggtggaagaaggcctgccagcgctttctggactgagctgtgctgcaggttctactctgttcctggccctgccggcagccactgacaagaggccagtgtgtcaccagccctcagcagaaaccgaaagagaaagaacggaaacacggagtttgggctctgttggctaaggtgtaacacttaaagcaattttctcccattgtgcgaacattttattttttaaaaaaaa

SEQ ID NO: 2513 - protein, 513 aa, Homo sapiens
MASVLSRRLGKRSLLGARVLGPSASEGPSAAPPSEPLLEGAAPQPFTTSDDTPCQEQPKEVLKAPSTSGLQQVAFQPGQKVYVWYGGQECTGLVEQHSWMEGQVTVWLLEQKLQVCCRVEEVWLAELQGPCPQAPPLEPGAQALAYRPVSRNIDVPKRKSDAVEMDEMMAAMVLTSLSCSPVVQSPPGTEANFSASRAACDPWKESGDISDSGSSTTSGHWSGSSGVSTPSPPHPQASPKYLGDAFGSPQTDHGFETDPDPFLLDEPAPRKRKNSVKVMYKCLWPNCGKVLRSIVGIKRHVKALHLGDTVDSDQFKREEDFYYTEVQLKEESAAAAAAAAAGTPVPGTPTSEPAPTPSMTGLPLSALPPPLHKAQSSGPEHPGPESSLPSGALSKSAPGSFWHIQADHAYQALPSFQIPVSPHIYTSVSWAAAPSAACSLSPVRSRSLSFSEPQQPAPAMKSHLIVTSPPRAQSGARKARGEAKKCRKVYGIEHRDQWCTACRWKKACQRFLD

SEQ ID NO: 2514 - DNA, 3845 bp, Homo sapiens
atgctccatgctgcaagctgcaaggagagcccaggaggggtgtcctcctggtggaagttgcgcttgttgaagatgatttatataaagaacgaacgagaaaaagaaggaaatcagatcgagaccagcggttccgagcatttccctccatggagcagagtgctcttaaggaatatgaaaaattggaatcacggaccagaagggttttgagcaacacttatcagaaacttattcagtctgtcttcctggatgacagcatccctaatggagtcaagtatctcataaataggcttcttgccttgattgaaaagccgacagtggacccaatctacattgcattatttggaagcactggggctgggaagagctccctgatcaatgccatcatccagcaagcaatgtttctaccagtgtctggagaaagcatatgtacttcctgcattgtacaagtgagctctggctgctgtgtgcagtatgaggccaaaatccaccttctgtctgaccaggagtggagggaggagctgaagaacctgaccaaactcctgcataggacggaggagctgagcagagaagaggcagatgcgtggaacagggatgaggcagtggaggaagccacctggaagctacaaatgatttatggaaatggggcagagagtaagaactatgaggagttactgagggcgaagcccaaaaggaagatccccacctccagagtcatcaccctcaaggcggaagaggcagaagagctgtccatcaagctggacccctacatccgcacacagaggagagattgggatggagaggccgctgagatgcgcatctggcccttgatcaaacatgtggaagtgacacttcccaaatccgacctgatcccagaaggggtcgtgctggtggacatcccaggcacaggcgacttcaacagcaagagggacgagatgtggaaaaagaccattgacaagtgctcagtgatctgggtgatcagcgacatagagcgagtttctggggggcaagcccacgaagaccttctgaatgagagcatcaaagcctgccagcggggcttctgtagggacgtggccctggtggtcaccaagatggacaaactccacttgccagaatacctaaggtcctcaaaagttttagaacttcgggagaagagaaaactgccagctgacttcaaggttctggaagcctcagatctggtgtatacagtcagcgcccaggagtactggcagcaggctctcctcaccgaggaggaaacggaaatccctaagttaagagaatacatcaggaagagcctcttggacaagaagaagaggacagtgaccaagtatgtgactgaagcctttggcctgttgctcctcacagatagtttcaactccacgcaaaacctgccgaatgaacacttgcacatgagtgtcctgcggagatttgcggaagagaaggttgagctgctggagaaggccatcgcacagtgcttcgcctgcatggagcagcctctgcaagaaggggtcaggaccgccaggacttcttaccgctgcatcctcagagcatgcttggtgaggagtaaaggaaaccaaggttttcatcagaccctgaaagctgtttgcctgaaaaatggcatctatgcctccaggactctggcgagaattgatctaaatgaagccctcactcagcccgtctatgaccagatcgaccctgtttttggaagcatttttaggacggggaagcccactggttcagctctgatgcctcacatagatgcttttaagcagtccctgcaggagaaaatgacagaaattgggataagaagtggctggaaatatgatagctgcaaaaaaaatttcctgatccaggagataagtgccatcctcgggggcctggaggaccacatcctcagaaggaagaggaggatctacgagtccctcactgcctctgtccagagtgacctgaagctctgttacgaagaggcagctcagatcacgggcaaaaaagcgtgtgagcggatgaaagatgccatcagaagaggagtggaccggcaggtggctgagggcatgtttgaaagggcccaggaaaggatgcagcaccagtttcagcagctgaaggtactctatgcccacatcctggatcctagaccccgagaggctccgggggaggagaggaagcgagtgcagaagactggaatcgtggagaaggtgaagggcagcatcaccactatgctggcccttgcttcgtcccagggggatggcctctacaaggagcttgcagggctgagctgcaggatgggagacaatgacaaatgggacgtggccccttcctcaggaaggggacagctgttgcagggtgtgatggagaacaaagctatgtacctacacaccgtcagcgactgtgacaccagctccatctgtgaggattcctttgatggcaggagcctgtccaagctgaacctgtgtgaggatggtccatgtcacaaacggcgggcaagcatctgctgtacccagctggggtccctgtcggccctgaagcatgctgtcctggggctctacctgctggtcttcctgattcttgtgggcatcttcatcttagcagcctgctgccacgcgtgcagttcccgagaggacatgacccagggcttgccagcccgtgcacgcatttcaccccttgtatcctgggaggtccctgacagcagagggtcctggtacctgggaacagccagggacagaagctgggacccaggagctgtgcagcaggggcctgagttgtctggggagagcgcttacctgcccactcctgtccccggggatcgggacttcccagagggtgaagtgtccaggccgcgcagctcccctgacgacctgaaggccctgactcgcaatgtgaaccggctgaatgagagcttccgggacttgcagctgcggctgctgcaggctccgctgcaagcggacctgacggagcaggtgtggaaggtgcaggacgcgctgcagaaccagtcagactcgttgctggcgctggcgggcgcagtgcagcggctggagggcgcgctgtgggggctgcaggcgcaggcggtgcagaccgagcaggcggtggccctgctgcgggaccgcacgggccagcagagcgacacggcgcagctggagctctaccagctgcaggtggagagcaacagtagccagctgctgctgaggcgccacgcgggcctgctggacgggctggcgcgcagggtgggcatcctgggcgaggagctggccgacgtgggcggcgtgctgcgcggcctcaaccacagcctgtcctacgacgtggccctccaccgcacgcggctgcaggacctgcgggtgctggtgagcaacgccagcgaggacacgcgccgcctgcgcctggcgcacgtaggcatggagctgcagctgaagcaggagctggccatgctcaacgcggtcaccgaggacctgcgcctcaaggactgggagcactccatcgcactgcggaacatctccctcgcgaaagggccaccgggacccaaaggtgatcagggggatgaaggaaaggaaggcaggcctggcatccctggattgcctggacttcgaggtctgcccggggagagaggtaccccaggattgcccgggcccaagggcgatgatgggaagctgggggccacaggaccaatgggcatgcgtgggttcaaaggtgaccgaggcccaaaaggagagaaaggagagaaaggagacagagctggggatgccagtaaggacattctgctggggccgtgggatatgatcattacacgattactcttggccatgcagtacacatcagacacttcaactgccttctcttcagttgctcatatcagctga

SEQ ID NO: 2515 - DNA, 796 bp, Homo sapiens
cttcctgccgccgcgttcgcacctcgctgctccagcatctagggcatattccaaccttccagcctgcgacctgcagagaaaaaaaaattacttattttcttgccccgtacataccttgaagtgagcaaaaaaattaaattttaaccatgagggaaatcgtgcacatccaggctggtcagcgtggcaaccagatcggtgccaagttctgggaggtgatcagtgatgaacatggcatcgaccccactggcacctaccacggggacagcgacctgcagctggaccgcatctccgtgtactacagtgaagccactgatggcaaatatgttcctcgtgccatactggtggatctagaaccccttcccacgtctccatttctttatgcctggctttgcccctctcaccagccatggaagccagcagtatcgagctctcacagtgccggaactcacccagcaggtcttcgatgccaagagcatgatggctgcctgtgacccccgccacggccgatacctcaccgtggctgctgacttccgtggtcggatgtccatgaaggaggtcgatgagcagatgtttaacgtgcagaacaagaacagcagctactttgtggaatggatccccaacaatatcaagacagctgtctgtgacatcccacctcgtggcctcaagatggcagtcaccttcatcggcagtagcacggccatccaggagctcttcaagcacatctcggagcagttcactgccatgttccgccggaaggccttcctccactggtacacaggcgagggcatggacgaga

SEQ ID NO: 2516 - protein, 110 aa, Homo sapiens
MREIVHIQAGQCGNQIGAKFWEVISDEHGIDPTGTYHGDSDLQLDRISVYYNEATGGKYVPRAILVDLEPGSHVSISLCLALPLSPAVEASSIELSQCRNSPSRSSMPRT

SEQ ID NO: 2517 - DNA, 774 bp, Homo sapiens
gcacctcgctgctccagcatctagggcatattccaaccttccagcctgcgacctgcagagaaaaaaaaattacttattttcttgccccgtacataccttgaagtgagcaaaaaaattaaattttaaccatgagggaaatcgtgcacatccaggctggtcagcgtggcaaccagatcggtgccaagttctgggaggtgatcagtgatgaacatggcatcgaccccactggcacctaccacggggacagcgacctgcagctggaccgcatctccgtgtactacagtgaagccactgatggcaaatatgttcctcgtgccatactggtggatctagaacctgggaccatggactctgttcgctcaggtccttttggccagatctttagaccagacaactttgtatttggtcagtctggggcaggtaacaactgggccaaaggccactacacagagggcgccgagctggttgattctgtcctggatgtggtacggaaggaggcagagagctgtgactgcctgcagggcttccagctccccgccacggccgatacctcaccgtggctgctgacttccgtggtcggatgtccatgaaggaggtcgatgagcagatgtttaacgtgcagaacaagaacagcagctactttgtggaatggatccccaacaatatcaagacagctgtctgtgacatcccacctcgtggcctcaagatggcagtcaccttcatcggcagtagcacggccatccaggagctcttcaagcacatctcggagcagtt

SEQ ID NO: 2518 - protein, 208 aa, Homo sapiens
MREIVHIQAGQCGNQIGAKFWEVISDEHGIDPTGTYHGDSDLQLDRISVYYNEATGGKYVPRAILVDLEPGTMDSVRSGPFGQIFRPDNFVFGQSGAGNNWAKGHYTEGAELVDSVLDVVRKEAESCDCLQGFQLTHSLGGGTGSGMGTLLISKIREEYPDRIMNTFSVVPSPEAESNMNDLVSEYQQYQDATAEEEEDFGEEAEEEA

SEQ ID NO: 2519 - DNA, 669 bp, Homo sapiens
gcacctcgctgctccagcatctagggcatattccaaccttccagcctgcgacctgcagagaaaaaaaaattacttattttcttgccccgtacataccttgaagtgagcaaaaaaattaaattttaaccatgagggaaatcgtgcacatccaggctggtcagcgtggcaaccagatcggtgccaagttctgggaggtgatcagtgatgaacatggcatcgaccccactggcacctaccacggggacagcgacctgcagctggaccgcatctccgtgtactacagtgaagccactgatggcaaatatgttcctcgtgccatactggtggatctagaacctgggaccatggactctgttcgctcaggtccttttggccagatctttagacccgccacggccgatacctcaccgtggctgctgacttccgtggtcggatgtccatgaaggaggtcgatgagcagatgtttaacgtgcagaacaagaacagcagctactttgtggaatggatccccaacaatatcaagacagctgtctgtgacatcccacctcgtggcctcaagatggcagtcaccttcatcggcagtagcacggccatccaggagctcttcaagcacatctcggagcagttcactgccatgttccgccggaaggccttcctccactggtacac

SEQ ID NO: 2520 - protein, 104 aa, Homo sapiens
MREIVHIQAGQCGNQIGAKFWEVISDEHGIDPTGTYHGDSDLQLDRISVYYNEATGGKYVPRAILVDLEPGTMDSVRSGPFGQIFRPATADTSPWLLSSVVGCP

SEQ ID NO: 2521 - DNA, 752 bp, Homo sapiens
ctccagcatctagggcatattccaaccttccagcctgcgacctgcagagaaaaaaaaattacttattttcttgccccgtacataccttgaagtgagcaaaaaaattaaattttaaccatgagggaaatcgtgcacatccaggctggtcagcgtggcaaccagatcggtgccaagttctgggaggtgatcagtgatgaacatgtccatgaaggaggtcgatgagcagatgtttaacgtgcagaacaagaacagcagctactttgtggaatggatccccaacaatatcaagacagctgtctgtgacatcccacctcgtggcctcaagatggcagtcaccttcatcggcagtagcacggccatccaggagctcttcaagcacatctcggagcagttcactgccatgttccgccggaaggccttcctccactggtacacaggcgagggcatggacgagatggagttcaccgaggctgacagcaacatgaacgacctcgtctctgagtatcagcagtaccaggatgccaccgcagaagaggaggaggatttcggtgaggaggccaaagaggaggcctaaggcagagcccccatcacctcaggcttctcagttcccttagccgtcttactcaactgcccgtttcctctccctcagaatttgtgtttgctgcctctatcttgttttttgttttttcttctggggagggtctagaacagtgcctggcacatagtaggcactcaataaatacttgtttgtt

SEQ ID NO: 2522 - protein, 444 aa, Homo sapiens
MREIVHIQAGQRGNQIGAKFWEVISDEHGIDPTGTYHGDSDLQLDRISVYYSEATDGKYVPRAILVDLEPGTMDSVRSGPFGQIFRPDNFVFGQSGAGNNWAKGHYTEGAELVDSVLDVVRKEAESCDCLQGFQLTHSLGGGTGSGMGTLLISKIREEYPDRIMNTFSVVPSPKVSDTVIESYNATLSVHQLVENTDETYCIDNEALYDICFRTLRVTTPTYGDLNHLLRDTMSGVTTCLRFPGQLNADLCKLAVNMVPFPRLHFFMPGFAPLTSHGSQQYRALTVPELTQQVFDAKSMMAACDPRHGRYLTVAADFRGRMSMKEVDEQMFNVQNKNSSYFVEWIPNNIKTAVCDIPPRGLKMAVTFIGSSTAIQELFKHISEQFTAMFRRKAFLHWYTGEGMDEMEFTEADSNMNDLVSEYQQYQDATAEEEEDFGEEAKEEA

SEQ ID NO: 2523 - DNA, 1556 bp, Homo sapiens
ggggacgccgagggcggctgcgacgcgccgagaggccgcggctctcccacctgtcaccctggcccttctctgcttggatggtgtcttcctctcctcagccgagaatgacttcgtccaccggatccaggaggaactggaccgctttctgctgcagaagcagctgtcaaaggttcttcttttccccccactctccagtcgcctccggtacctgatccatagaacagcagagaattttgatctcttgagcagcttctccgttggggagggctggaagaggaggacggtcatctgtcaccaggacatcagggtacccagttcggatggcctctctggcccctgccgcgctcctgcctcctgccccagcaggtaccacggtcctcggcccatctccaaccaaggagcagctgcggttccccgaggtgcccgggctggccggtggtatcgtggacgcaagcctgaccagcctttgtatgtgccccgggtgctgcgcaggcaggaagaatgggggctgacctctacctcggtgctcaagagagaggccccagctggcagggacccagaagagcctggagatgttggtgctggagaccccaactctgatcagggactccctgtgctgatgactcagggaacagaggacctaaagggcccaggacaaaggtgtgagaatgagccactgctggaccctgttggccctgagcctctggggcctgagagtcagtcagggaagggagacatggtggagatggccacacggtttgggtccaccctgcagctagacctggaaaaggggaaggagagtctgttggagaagaggctggtggcagaggaggaagaggacgaagaggaggtggaagaggatggccccagcagctgctcggaggacgattacagtgagctgctgcaggagatcacagacaacctgacgaagaaggagattcagatagagaagatccatttggacacatcctccttcgtggaggagctgcctggagagaaggaccttgcccacgtggtagagatctatgactttgaaccagcgctcaagacggaggacctgctggcaacgttttctgagttccaagagaaggggttcaggattcagtgggtggatgatactcacgcactcggcatctttccctgcctggcctcagctgcggaagccctgacccgggagttctcggtgctcaagatccggcccctcacacagggaaccaagcagtcaaagctcaaagccttgcagaggccaaaactcctgcgtctggtgaaggagaggccacagacaaatgcgactgtggcccggcggctggtggcccgggccctgggactccaacacaaaaagaaagagcggcctgctgtccggggtccgctgccgccctgaggcctggagacccaactggcctggatctgcgtcccgacgtagctggcgcccccaacaccataagccttcacagacgccagagcagccccgcaccaccctcgagcttcaccatggggtgtggtgggctttagtttagtcccagaaatggagaaaaaataaaaactcacgttgttct

SEQ ID NO: 2524 - protein, 253 aa, Homo sapiens
MTQGTEDLKGPGQRCENEPLLDPVGPEPLGPESQSGKGDMVEMATRFGSTLQLDLEKGKESLLEKRLVAEEEEDEEEVEEDGPSSCSEDDYSELLQEITDNLTKKEIQIEKIHLDTSSFVEELPGEKDLAHVVEIYDFEPALKTEDLLATFSEFQEKGFRIQWVDDTHALGIFPCLASAAEALTREFSVLKIRPLTQGTKQSKLKALQRPKLLRLVKERPQTNATVARRLVARALGLQHKKKERPAVRGPLPP

SEQ ID NO: 2525 - DNA, 1305 bp, Homo sapiens
caggtacctgggggtggttaagttggtgacatggctcagaagtttatttctttaaatttttaagttttttttctttttagtcttcagaaaggcaacagtagtcttttaacgtcactgttaaaagtgtaagactcttttactccctgagagtcccctttccctttcttgcgtcctttcctctttattcttttttttttttttttttttactgagacggagtctcactctgtcgcccaggctggagtgcagtggcgcgatctcggctcactgcaaactccgcctcccgggttcaccctttctctttattcttatcccggtcagactcgccccctcctccaagacatctctctgttttattttatttgattttagttctctttgggtgatcgctccttccctcttcaacggatccctccccgcctccatcctcgttctgtgggagagaccagccttctggtgctgcagtcaggaatggagcttgacagcgctctggaagccccatcgcaggaagactctaatttgtccgaggagttgtctcactccgcctttggacaggccttctccaagattttacactgtcttgcccgcccggaggcacgacgaggcaatgtaaaagatgcagttcttaaagacctcggtgatctaatagaagccacagaatttgataggttatttgaggggactggtgcacggctccgcggaatgccggagacactggggcaggtagcaaaagccctggagaagtatgcagccccctccaaggaggaggaaggtggaggtgatgggcactccgaagcggccgagaaagcagcccaagttgggttactgtttcttaaactgttagggaaagttgagactgctaagaattccctggtcggccctgcatggcagacgggcctgcatcacttggcaggacccgtttatatttttgccatcacacacagcttggagcaaccatggaccactccgagatctcgggaagttgctagggaggtgctcacctcactgcttcaagttactgaatgcggttctgtggcaggattcctacatggagaaaatgaagatgagaaagggagactttcggtgatactagggcttctcaaacccgacttgtataaggaatcctggaagaataaccctgccatcaaacatgttttctcatggactctgcaacaggtcactcggccctggctgagccagcatctggaaagggtacttcccgcatcattggtcatttcagatgactatcagactgagaacaaaatcctgggtgtacactgtctccatcacattgtgcttaatgtg

SEQ ID NO: 2526 - DNA, 357 bp, Homo sapiens
atgtccgggggcagcagctgcagccagaccccaagccgggccatccccgccactcgccgggtggtgctcggcgacggcgtgcagctcccgcccggggactacagcacgacccccggcggcaccgtcttcagcaccaccccgggaggtaccaggatcatctatgaccggaaattcctgatggagtgtcggaactcacctgtgaccaaaacacccccaagggatctgcccaccattccgggggtcaccagcccttccagtgatgagccccccatggaagccagccagagccacctgcgcaatagcccagaagataagcgggcgggcggtgaagagtcacagtttgagatggacatttaa

SEQ ID NO: 2527 - DNA, 1955 bp, Homo sapiens
aagtgtcccctcctacttcttgctgcctcacggttgctgttgcagacccaggagtctctgaaggcttccgcggctttggggccggttgtgagatgccaggcagaggccgctgcccggactgcggctccacggagctggtggaagactcgcactattcgcagagccagctggtgtgctccgactgcggctgcgtggtcaccgagggggtccttaccactaccttcagcgacgagggcaatctccgagaggtaacatattcccgaagcacaggggaaaacgaacaagttagtcgcagccagcaacgaggtctccggcgagtgagagacctttgtcgagttctgcagttgccaccaacatttgaggataccgcggttgcctactaccaacaggcatatcggcactctggcatccgagcggccaggctgcaaaagaaggaggtgttggttgggtgctgcgtcttaatcacctgccgacagcataactggcccctaacaatgggggccatctgcacgctgttgtatgcagatttggatgtgttttctagcacttgcatgcagatagtgaagctcctgggactggatgtgccatctctgtgcttggcagaactggtgaagacctattgcagcagcttcaaactgttccaagcttcaccttctgtgccagccaaatacgtggaagacaaagagaagatgctgtctcgaacaatgcagttggtggagctggcaaatgagacgtggctggtgaccgggaggcatcccttgcccgtcatcactgctgcgactttcctggcttggcagtcgctgcagcctgcagatcggctttcatgttcccttgcccgattttgtaaattggcaaatgtggacctgccctacccggcgtcctcccgcctgcaggagctgctggctgtgctgctgcggatggctgagcagctggcctggttacgagttctgagacttgacaaacggtctgtggtgaagcacatcggtgaccttctccagcaccgccagtcactggtccgctctgcctttcgggatgggacagcagaagtggagacccgagagaaggagccaccggggtggggacaggggcaaggagaaggggaggtgggaaataattccttaggtttaccccaggggaagcggccggccagtcctgcccttctcttgccaccctgcatgttgaagtccccgaagcggatctgccctgtaccccctgtctccactgtcactggagatgagaacatttctgatagtgaaatagaacagtatttgcgtacccctcaggaagttagggactttcagagagcccaggctgctagacaggctgccacgagtgtccctaaccctccctgatggatatccactgggagcacttcatcctgttctgacagcttgataacattcctgttataaccaaggatggaagtgtacaccagtccgtaggtattgcttttcttgtttgaaggaaccaagaggggctctgccattagttggaccctgggtcctggagtaaagtcaggagtgcagggatgactataggtaggagagattcccatcccttggtgtgggagagcaagttgcctatgtccatgttctgtgagatggctttcctcatagatggatgggaaaatgtcaggctctttgctgctggtttgaattggacacactgctgcggctcctcctgcaggcctgagggggcttccctctgcttgtggagtggttggcattcccagcagtatcaaccctcagaggagcgggaactggggaattctggccctacgtgcattcacaggcaatgatgggtttgtgtgtatggtgtcatgagatcctctacctcataacaaaaggacagtgggtagactaaggcagtagctcaaagggctttgcaaaattttaatatattaaaacaagaggcatctgctagaaaacattctattgtataaaacccgagttctt

SEQ ID NO: 2528 - protein, 419 aa, Homo sapiens
MPGRGRCPDCGSTELVEDSHYSQSQLVCSDCGCVVTEGVLTTTFSDEGNLREVTYSRSTGENEQVSRSQQRGLRRVRDLCRVLQLPPTFEDTAVAYYQQAYRHSGIRAARLQKKEVLVGCCVLITCRQHNWPLTMGAICTLLYADLDVFSSTYMQIVKLLGLDVPSLCLAELVKTYCSSFKLFQASPSVPAKYVEDKEKMLSRTMQLVELANETWLVTGRHPLPVITAATFLAWQSLQPADRLSCSLARFCKLANVDLPYPASSRLQELLAVLLRMAEQLAWLRVLRLDKRSVVKHIGDLLQHRQSLVRSAFRDGTAEVETREKEPPGWGQGQGEGEVGNNSLGLPQGKRPASPALLLPPCMLKSPKRICPVPPVSTVTGDENISDSEIEQYLRTPQEVRDFQRAQAARQAATSVPNPP

SEQ ID NO: 2529 - DNA, 419 bp, Homo sapiens
ttcattgcgccagtgactaaaaagagaattaaatatgggtgatgttgagaaaggcaagaagatttttattatgaagtgttcccagtgccacactgttgaaaagggaggaaagcacaagattgggccaaatctccatggtcttttcaggtggaagacaggtcaggcccctggatactcttacacagccgccaataagaacaaatgcatcatctggggagaggatacactgatggagtatttggagaatcccaagaagtacatccctggaacaaaaatgatctttgtcagcattaagaagaaggaagaaagggcagacttgatagcttatctcaaaaaagctactaatgagtaataattggccactgccttatttattactacaccagaattcagatcatgaatgactgacagaatatttt

SEQ ID NO: 2530 - DNA, 897 bp, Homo sapiens
gcgaccctcttctttgcgtagagtttttcaggttgctcctggaaaccatgccgaaagtagtgtctcggtcagtagtctgctctgacactcgggaccgggaggaatatgacgacggcgagaagcccctccatgtgtactactgtttgtgcggccaggtggtcctagtgctggactgtcagttagagaaattgcccatgaggccccgggaccggtcccgtgtgattgatgctgccaaacatgcccataagttttgtaacacagaagacgaagagactatgtatctgcggagacctgaaggcattgaactacagtacagaaagaaatgtgcaaagtgtggactgctgctcttctaccaatcccagccgaagaatgctcccgttaccttcattgtggatggagcagtcgtcaagtttggccagggctttgggaaaacgaacatatatactcagaaacaagagcctcctaagaaggtgatgatgaccaaacggaccaaagacatgggcaagttcagttctgtcactgtgtctaccattgatgaagaggaagaggagattgaggctagggaagttgctgactcgtatgcacagaatgccaaagtgattgaaaaacagctggagcgcaaaggcatgagcaagaggccactgcaagagctggctgaatgggaaccccaggaaaagtgaaaatgaaggggacccttgattgacaaccagttcaaataaccaggctttttttctgagccctagactggaggcaagcatttagatcaggagacaaagtaacttcttgattacatagactggttcctatttatatcccagcagaaggctttatgttgtttcccattgattctcctacatgcagtgaggtctttaactgagtccatttgacctgctttct

SEQ ID NO: 2531 - DNA, 3194 bp, Homo sapiens
ggcggcggcaagggcgggagggagcggtcgccgcgggatttggagctgcctagcctcgcggtcgctttggcagcatgtaagcagctgtttgccaagaacccaggtcactgctaagaaagggtgccttcgggagaagagtgtccagaggataccaatgccagatgcatctggagttacactcagcactcgcagtatgagacattgtgtgccagcatctctttccttctggcaaagactgtagctctccaggtaggaggatcctggaagctgtgagcaccaggagccttgccagaggaggatggggccagatatgaactctctaccatgaacatggttctcggcttatgaaggaattttaagtaaaacagttatttaatttccacatattcaagtcaaaagccttctgtgtgaagtgccagtgattacccctccacaggagttatcaggatttttctggcaccaagtttaattcttcttcgtacttctggtagtgacagatctgcaggacagatttatctgttgaatgctcttgggcaggaaaaccatgtaaaacctctggaagcagcatcaggacagcagagcagagcccccgtcctcactgctcacttgcacagaaactccatctggactcggatgcttttactgaagacccatctagcttcaatcatctttagagtccatccattctggagagacctggcgtttgcagttgcctcctgtggccgtgtttttctgtcattctgttcccaggccttctattcaggcggttgaagggtgtggactttggaatggggtttgctgttcttcgggaacttgcttcctttccctggctggtgctgtcaggaaggaccatctgaaggctgcaatttgttcttagggaggcaggtgctggcctggcctggatcttccaccatgttcctgttgctgccttttgatagcctgattgtcaaccttctgggcatctccctgactgtcctcttcaccctccttctcgttttcatcatagtgccagccatttttggagtctcctttggtatccgcaaactctacatgaaaagtctgttaaaaatctttgcgtgggctaccttgagaatggagcgaggagccaaggagaagaaccaccagctttacaagccctacaccaacggaatcattgcaaaggatcccacttcactagaagaagagatcaaagagattcgtcgaagtggtagtagtaaggctctggacaacactccagagttcgagctctctgacattttctacttttgccggaaaggaatggagaccattatggatgatgaggtgacaaagagattctcagcagaagaactggagtcctggaacctgctgagcagaaccaattataacttccagtacatcagccttcggctcacggtcctgtgggggttaggagtgctgattcggtactgctttctgctgccgctcaggatagcactggctttcacagggattagccttctggtggtgggcacaactgtggtgggatacttgccaaatgggaggtttaaggagttcatgagtaaacatgttcacttaatgtgttaccggatctgcgtgcgagcgctgacagccatcatcacctaccatgacagggaaaacagaccaagaaatggtggcatctgtgtggccaatcatacctcaccgatcgatgtgatcatcttggccagcgatggctattatgccatggtgggtcaagtgcacgggggactcatgggtgtgattcagagagccatggtgaaggcctgcccacacgtctggtttgagcgctcggaagtgaaggatcgccacctggtggctaagagactgactgaacatgtgcaagataaaagcaagctgcctatcctcatcttcccagaaggaacctgcatcaataatacatcggtgatgatgttcaaaaagggaagttttgaaattggagccacagtttaccctgttgctatcaagtatgaccctcaatttggcgatgccttctggaacagcagcaaatacgggatggtgacgtacctgctgcgaatgatgaccagctgggccattgtctgcagcgtgtggtacctgcctcccatgactagagaggcagatgaagatgctgtccagtttgcgaatagggtgaaatctgccattgccaggcagggaggacttgtggacctgctgtgggatgggggcctgaagagggagaaggtgaaggacacgttcaaggaggagcagcagaagctgtacagcaagatgatcgtggggaaccacaaggacaggagccgctcctgagcctgcctccagctggctggggccaccgtgcggggtgccaacgggctcagagctggagttgccgccgccgcccccactgctgtgtcctttccagactccagggctccccgggctgctctggatcccaggactccggctttcgccgagccgcagcgggatccctgtgcacccggcgcagcctacccttggtggtctaaacggatgctgctgggtgttgcgacccaggacgagatgccttgtttcttttacaataagtcgttggaggaatgccattaaagtgaactccccacctttgcacgctgtgcgggctgagtggttggggagatgtggccatggtcttgtgctagagatggcggtacaagagtctgttatgcaagcccgtgtgccagggatgtgctgggggcggccacccgctctccaggaaaggcacagctgaggcactgtggctggcttcggcctcaacatcgcccccagccttggagctctgcagacatgataggaaggaaactgtcatctgcaggggctttcagcaaaatgaagggttagatttttatgctgctgctgatggggttactaaagggaggggaagaggccaggtgggccgctgactgggccatggggagaacgtgtgttcgtactccaggctaaccctgaactccccatgtgatgcgcgctttgttgaatgtgtgtctcggtttccccatctgtaatatgagtcggggggaatggtggtgattcctacctcacagggctgttgtggggattaaagtgctgcgggtgagtgaaggacacatcacgttcagtgtttcaagtacaggcccacaaaacggggcacggcaggcctgagctcagagctgctgcactgggctttggatttgttcttgtgagtaaataaaactggctggtgaatg

SEQ ID NO: 2532 - protein, 456 aa, Homo sapiens
MFLLLPFDSLIVNLLGISLTVLFTLLLVFIIVPAIFGVSFGIRKLYMKSLLKIFAWATLRMERGAKEKNHQLYKPYTNGIIAKDPTSLEEEIKEIRRSGSSKALDNTPEFELSDIFYFCRKGMETIMDDEVTKRFSAEELESWNLLSRTNYNFQYISLRLTVLWGLGVLIRYCFLLPLRIALAFTGISLLVVGTTVVGYLPNGRFKEFMSKHVHLMCYRICVRALTAIITYHDRENRPRNGGICVANHTSPIDVIILASDGYYAMVGQVHGGLMGVIQRAMVKACPHVWFERSEVKDRHLVAKRLTEHVQDKSKLPILIFPEGTCINNTSVMMFKKGSFEIGATVYPVAIKYDPQFGDAFWNSSKYGMVTYLLRMMTSWAIVCSVWYLPPMTREADEDAVQFANRVKSAIARQGGLVDLLWDGGLKREKVKDTFKEEQQKLYSKMIVGNHKDRSRS

SEQ ID NO: 2533 - DNA, 2711 bp, Homo sapiens
gaaccctaggttgttggatgatgtcagcttccatccttgtgttcgtttcaaacgctgggaatctgagcgcatcctctccttcatccctcctgatggaaacttccgcctgctgtcttaccatgtcagtgcacagaatctggttgcaatcccagtgtatgtcaaacataacatcagtttccgggacagtagttcccttggacgctttgaaataacggtgggacccaagcagacgatggggaagaccattgagggagtgattgtcaccagccagatgcccaagggggtcctgaacatgagccttactccatcacaggggacacacacattcgacccagtcacaaagatgctgtcttgggatgtaggaaaaataaatccacaaaagctaccaagtttgaaggggaccatgagtcttcaggctggagcttccaaaccagatgaaaaccccacaattaacctgcagtttaagatccagcagctggccatttctggactcaaggtgaatcgtctggatatgtatggagaaaagtacaaaccctttaagggcataaaatacatgaccaaagctgggaagttccaagttcgaacctgaagggagcatttgctgagggaatagtcttgcacattttttcatttcttacttgtctaaaagtaaaaaaaaatatcagcctgtctcctaggtcagtcccctcctggacccacccgctcccttttttccttagccttcagtgccatggaactaatcaagggaggaaaaggtcaccagggagaactggacagaactgaaacacagcaacaccagttctcaaggacaaggtgtgtgatgggggtaggaagcttggtgcttatgtaaccattttaaacgtggtttctataggaaagaccaacatttgtttagcttgcttggctttaattatctaaagccaatgaaagacttctttgttgattttttaagatagaaagattaaaaagaaagaaagatgggaagaaaatgaatgttagtcaaggaaaggccacttaaggatctgctctatgaaggagaagaaagaggaaaaagaagtaaaggagttaggaggagacacttaaatgaaagattggcaagaaaagcagtcggactctaccttaaggagggatgggaaggaaagagttgagttggtttctttctgattcctctactcatgtagaaaacacttgtacttctggaaatggactggagactttttaaatttgagtccactattgacatggaaaccccagtggaatcagattttccctcaaagaccatgatggtatcggactagttttcagacactgcctgttgctgtccatcagcacttggtctcttatcttcagtgagaaggtgacccgccttcttcccatggtggctgcctaaagtgcttcttttctaacccaaaacagttctactcacttccttttacagaattcaccggccattttcctgttacctgatccttctacaggatttttaaaaagtaagagagtttcagagaagccgatcccataatccccagtgcagccagggtttgtgtgtcatcgtactggagtagagggccgactcttcccatgaaggtgagcacagctgtgagtgagtgagctcatatctccatttgtcagtgctggactggtaccagatcgtaaccttcccgttggtcggaaacttttccatctgtcgccctagaaaaagagaaagcttaccatcgagggtgtggttgatccttgaagctgcttggtaaagttatcatttcctcagtcttttcttttgtactcctatcatgtattcattaatatctaccagtcccttttcattctaagacaaaacatttctcctaaatctctgaataaaatcagtgctgtaggaagatggactgtgttgatcatgggtgtaagcaacccagtttaagaaacatggcaactaaagggatacctcaggctttctttcccagtgggtcatttttgtcctagttcagtgtgtctgttactatttaaatatttatacaaaagggtttttgtttatagcttaaggaatgatactgtgctctgcttggtgcatggagaaaaaggaagacccatactctccacaccctagagcttttctctaaatattgtgcaaagtttttgctagttttatcttctgactttgggactagtttttgctgcagagttgtgttgctttgtgattttcctctgggatagtgtactgtacacaaccagatgtgttccacactccgtgactccgcagtttgtcctggagtgacatacacatccaccatggaaagggaagcatctctgcctgtggattctcaagtacttggaagcacctctcctgaggaacctacaggattctaaggtttcctaggtcactgaacaactaatcttggtccctgaatatttctaggtttgtaagtgcagcagttttatttcctctagaactcatcctgtttcaagggaagtacctaagaagatatagagtgtttctagggtaagggacctgcaggtgtaagcatagatgaaataactgtcctgtcacacgtgcagcaggccatggagtgtagcgggcatcgctgccgccattcctgcagcatcaccataagcagtgcagggtgtctccatcgagctgtttggttccatgtgtgtttaacatgtgcagaagtagcttctctgtttaagtttaataaagttgagtttcaccagtc

SEQ ID NO: 2534 - DNA, 2653 bp, Homo sapiens
atggccctgtccactgagcatcctcccgccacacagaaacccgcccagccggggccaccgaccccaccccctgcctggaaacttaaggaggccggagctgtggggagctcagagctgagatcctacaggagtccagggctggagagaaaacctctgcgaggaaagggaaggagcaagccgtgaatttaagggacgctgtgaagcaatcatggatgcaatgaagagagggctctgctgtgtgctgctgctgtgtggagcagtcttcgtttcgcccagccaggaaatccatgcccgattcagaagaggagccagatcttaccaagtgatctgcagagatgaaaaaacgcagatgatataccagcaacatcagtcatggctgcgccctgtgctcagaagcaaccgggtggaatattgctggtgcaacagtggcagggcacagtgccactcagtgcctgtcaaaagttgcagcgagccaaggtgtttcaacgggggcacctgccagcaggccctgtacttctcagatttcgtgtgccagtgccccgaaggatttgctgggaagtgctgtgaaatagataccagggccacgtgctacgaggaccagggcatcagctacaggggcacgtggagcacagcggagagtggcgccgagtgcaccaactggaacagcagcgcgttggcccagaagccctacagcgggcggaggccagacgccatcaggctgggcctggggaaccacaactactgcagaaacccagatcgagactcaaagccctggtgctacgtctttaaggcggggaagtacagctcagagttctgcagcacccctgcctgctctgagggaaacagtgactgctactttgggaatgggtcagcctaccgtggcacgcacagcctcaccgagtcgggtgcctcctgcctcccgtggaattccatgatcctgataggcaaggtttacacagcacagaaccccagtgcccaggcactgggcctgggcaaacataattactgccggaatcctgatggggatgccaagccctggtgccacgtgctgaagaaccgcaggctgacgtgggagtactgtgatgtgccctcctgctccacctgcggcctgagacagtacagccagcctcagtttcgcatcaaaggagggctcttcgccgacatcgcctcccacccctggcaggctgccatctttgccaagcacaggaggtcgcccggagagcggttcctgtgcgggggcatactcatcagctcctgctggattctctctgccgcccactgcttccaggagaggtttccgccccaccacctgacggtgatcttgggcagaacataccgggtggtccctggcgaggaggagcagaaatttgaagtcgaaaaatacattgtccataaggaattcgatgatgacacttacgacaatgacattgcgctgctgcagctgaaatcggattcgtcccgctgtgcccaggagagcagcgtggtccgcactgtgtgccttcccccggcggacctgcagctgccggactggacggagtgtgagctctccggctacggcaagcatgaggccttgtctcctttctattcggagcggctgaaggaggctcatgtcagactgtacccatccagccgctgcacatcacaacatttacttaacagaacagtcaccgacaacatgctgtgtgctggagacactcggagcggcgggccccaggcaaacttgcacgacgcctgccagggcgattcgggaggccccctggtgtgtctgaacgatggccgcatgactttggtgggcatcatcagctggggcctgggctgtggacagaaggatgtcccgggtgtgtacaccaaggttaccaactacctagactggattcgtgacaacatgcgaccgtgaccaggaacacccgactcctcaaaagcaaatgagatcccgcctcttcttcttcagaagacactgcaaaggcgcagtgcttctctacagacttctccagacccaccacaccgcagaagcgggacgagaccctacaggagagggaagagtgcattttcccagatacttcccattttggaagttttcaggacttggtctgatttcaggatactctgtcagatgggaagacatgaatgcacactagcctctccaggaatgcctcctccctgggcagaaagtggccatgccaccctgttttcagctaaagcccaacctcctgacctgtcaccgtgagcagctttggaaacaggaccacaaaaatgaaagcatgtctcaatagtaaaagataacaagatctttcaggaaagacggattgcattagaaatagacagtatatttatagtcacaagagcccagcagggcctcaaagttggggcaggctggctggcccgtcatgttcctcaaaagcacccttgacgtcaagtctccttcccctttccccactccctggctctcagaaggtattccttttgtgtacagtgtgtaaagtgtaaatcctttttctttataaactttagagtagcatgagagaattgtatcatttgaacaactaggcttcagcatatttatagcaatccatgttagtttttactttctgttgccacaaccctgttttatactgtacttaataaattcagatatatttttcacagtttttcc

SEQ ID NO: 2535 - protein, 562 aa, Homo sapiens
MDAMKRGLCCVLLLCGAVFVSPSQEIHARFRRGARSYQVICRDEKTQMIYQQHQSWLRPVLRSNRVEYCWCNSGRAQCHSVPVKSCSEPRCFNGGTCQQALYFSDFVCQCPEGFAGKCCEIDTRATCYEDQGISYRGTWSTAESGAECTNWNSSALAQKPYSGRRPDAIRLGLGNHNYCRNPDRDSKPWCYVFKAGKYSSEFCSTPACSEGNSDCYFGNGSAYRGTHSLTESGASCLPWNSMILIGKVYTAQNPSAQALGLGKHNYCRNPDGDAKPWCHVLKNRRLTWEYCDVPSCSTCGLRQYSQPQFRIKGGLFADIASHPWQAAIFAKHRRSPGERFLCGGILISSCWILSAAHCFQERFPPHHLTVILGRTYRVVPGEEEQKFEVEKYIVHKEFDDDTYDNDIALLQLKSDSSRCAQESSVVRTVCLPPADLQLPDWTECELSGYGKHEALSPFYSERLKEAHVRLYPSSRCTSQHLLNRTVTDNMLCAGDTRSGGPQANLHDACQGDSGGPLVCLNDGRMTLVGIISWGLGCGQKDVPGVYTKVTNYLDWIRDNMRP

SEQ ID NO: 2536 - DNA, 2160 bp, Homo sapiens
atggccctgtccactgagcatcctcccgccacacagaaacccgcccagccggggccaccgaccccaccccctgcctggaaacttaaggaggccggagctgtggggagctcagagctgagatcctacaggagtccagggctggagagaaaacctctgcgaggaaagggaaggagcaagccgtgaatttaagggacgctgtgaagcaatcatggatgcaatgaagagagggctctgctgtgtgctgctgctgtgtggagcagtcttcgtttcgcccagccaggaaatccatgcccgattcagaagaggagccagatcttaccaagtgatctgcagagatgaaaaaacgcagatgatataccagcaacatcagtcatggctgcgccctgtgctcagaagcaaccgggtggaatattgctggtgcaacagtggcagggcacagtgccactcagtgcctgtcaaaagttgcagcgagccaaggtgtttcaacgggggcacctgccagcaggccctgtacttctcagatttcgtgtgccagtgccccgaaggatttgctgggaagtgctgtgaaatagataccagggccacgtgctacgaggaccagggcatcagctacaggggcacgtggagcacagcggagagtggcgccgagtgcaccaactggaacagcagcgcgttggcccagaagccctacagcgggcggaggccagacgccatcaggctgggcctggggaaccacaactactgcagaaacccagatcgagactcaaagccctggtgctacgtctttaaggcggggaagtacagctcagagttctgcagcacccctgcctgctctgagggaaacagtgactgctactttgggaatgggtcagcctaccgtggcacgcacagcctcaccgagtcgggtgcctcctgcctcccgtggaattccatgatcctgataggcaaggtttacacagcacagaaccccagtgcccaggcactgggcctgggcaaacataattactgccggactggacggagtgtgagctctccggctacggcaagcatgaggccttgtctcctttctattcggagcggctgaaggaggctcatgtcagactgtacccatccagccgctgcacatcacaacatttacttaacagaacagtcaccgacaacatgctgtgtgctggagacactcggagcggcgggccccaggcaaacttgcacgacgcctgccagggcgattcgggaggccccctggtgtgtctgaacgatggccgcatgactttggtgggcatcatcagctggggcctgggctgtggacagaaggatgtcccgggtgtgtacaccaaggttaccaactacctagactggattcgtgacaacatgcgaccgtgaccaggaacacccgactcctcaaaagcaaatgagatcccgcctcttcttcttcagaagacactgcaaaggcgcagtgcttctctacagacttctccagacccaccacaccgcagaagcgggacgagaccctacaggagagggaagagtgcattttcccagatacttcccattttggaagttttcaggacttggtctgatttcaggatactctgtcagatgggaagacatgaatgcacactagcctctccaggaatgcctcctccctgggcagaaagtggccatgccaccctgttttcagctaaagcccaacctcctgacctgtcaccgtgagcagctttggaaacaggaccacaaaaatgaaagcatgtctcaatagtaaaagataacaagatctttcaggaaagacggattgcattagaaatagacagtatatttatagtcacaagagcccagcagggcctcaaagttggggcaggctggctggcccgtcatgttcctcaaaagcacccttgacgtcaagtctccttcccctttccccactccctggctctcagaaggtattccttttgtgtacagtgtgtaaagtgtaaatcctttttctttataaactttagagtagcatgagagaattgtatcatttgaacaactaggcttcagcatatttatagcaatccatgttagtttttactttctgttgccacaaccctgttttatactgtacttaataaattcagatatatttttcacagtttttccaaaaaaaaaaaaaaaaaaaaa

SEQ ID NO: 2537 - protein, 291 aa, Homo sapiens
MDAMKRGLCCVLLLCGAVFVSPSQEIHARFRRGARSYQVICRDEKTQMIYQQHQSWLRPVLRSNRVEYCWCNSGRAQCHSVPVKSCSEPRCFNGGTCQQALYFSDFVCQCPEGFAGKCCEIDTRATCYEDQGISYRGTWSTAESGAECTNWNSSALAQKPYSGRRPDAIRLGLGNHNYCRNPDRDSKPWCYVFKAGKYSSEFCSTPACSEGNSDCYFGNGSAYRGTHSLTESGASCLPWNSMILIGKVYTAQNPSAQALGLGKHNYCRTGRSVSSPATASMRPCLLSIRSG

SEQ ID NO: 2538 - DNA, 2534 bp, Homo sapiens
atggccctgtccactgagcatcctcccgccacacagaaacccgcccagccggggccaccgaccccaccccctgcctggaaacttaaggaggccggagctgtggggagctcagagctgagatcctacaggagtccagggctggagagaaaacctctgcgaggaaagggaaggagcaagccgtgaatttaagggacgctgtgaagcaatcatggatgcaatgaagagagggctctgctgtgtgctgctgctgtgtggagcagtcttcgtttcgcccagccaggaaatccatgcccgattcagaagaggagccagatcttaccaaggttgcagcgagccaaggtgtttcaacgggggcacctgccagcaggccctgtacttctcagatttcgtgtgccagtgccccgaaggatttgctgggaagtgctgtgaaatagataccagggccacgtgctacgaggaccagggcatcagctacaggggcacgtggagcacagcggagagtggcgccgagtgcaccaactggaacagcagcgcgttggcccagaagccctacagcgggcggaggccagacgccatcaggctgggcctggggaaccacaactactgcagaaacccagatcgagactcaaagccctggtgctacgtctttaaggcggggaagtacagctcagagttctgcagcacccctgcctgctctgagggaaacagtgactgctactttgggaatgggtcagcctaccgtggcacgcacagcctcaccgagtcgggtgcctcctgcctcccgtggaattccatgatcctgataggcaaggtttacacagcacagaaccccagtgcccaggcactgggcctgggcaaacataattactgccggaatcctgatggggatgccaagccctggtgccacgtgctgaagaaccgcaggctgacgtgggagtactgtgatgtgccctcctgctccacctgcggcctgagacagtacagccagcctcagtttcgcatcaaaggagggctcttcgccgacatcgcctcccacccctggcaggctgccatctttgccaagcacaggaggtcgcccggagagcggttcctgtgcgggggcatactcatcagctcctgctggattctctctgccgcccactgcttccaggagaggtttccgccccaccacctgacggtgatcttgggcagaacataccgggtggtccctggcgaggaggagcagaaatttgaagtcgaaaaatacattgtccataaggaattcgatgatgacacttacgacaatgacattgcgctgctgcagctgaaatcggattcgtcccgctgtgcccaggagagcagcgtggtccgcactgtgtgccttcccccggcggacctgcagctgccggactggacggagtgtgagctctccggctacggcaagcatgaggccttgtctcctttctattcggagcggctgaaggaggctcatgtcagactgtacccatccagccgctgcacatcacaacatttacttaacagaacagtcaccgacaacatgctgtgtgctggagacactcggagcggcgggccccaggcaaacttgcacgacgcctgccagggcgattcgggaggccccctggtgtgtctgaacgatggccgcatgactttggtgggcatcatcagctggggcctgggctgtggacagaaggatgtcccgggtgtgtacaccaaggttaccaactacctagactggattcgtgacaacatgcgaccgtgaccaggaacacccgactcctcaaaagcaaatgagatcccgcctcttcttcttcagaagacactgcaaaggcgcagtgcttctctacagacttctccagacccaccacaccgcagaagcgggacgagaccctacaggagagggaagagtgcattttcccagatacttcccattttggaagttttcaggacttggtctgatttcaggatactctgtcagatgggaagacatgaatgcacactagcctctccaggaatgcctcctccctgggcagaaagtggccatgccaccctgttttcagctaaagcccaacctcctgacctgtcaccgtgagcagctttggaaacaggaccacaaaaatgaaagcatgtctcaatagtaaaagataacaagatctttcaggaaagacggattgcattagaaatagacagtatatttatagtcacaagagcccagcagggcctcaaagttggggcaggctggctggcccgtcatgttcctcaaaagcacccttgacgtcaagtctccttcccctttccccactccctggctctcagaaggtattccttttgtgtacagtgtgtaaagtgtaaatcctttttctttataaactttagagtagcatgagagaattgtatcatttgaacaactaggcttcagcatatttatagcaatccatgttagtttttactttctgttgccacaaccctgttttatactgtacttaataaattcagatatatttttcacagtttttccaaaaaaaaaaaaaaaaaaa

SEQ ID NO: 2539 - protein, 516 aa, Homo sapiens
MDAMKRGLCCVLLLCGAVFVSPSQEIHARFRRGARSYQGCSEPRCFNGGTCQQALYFSDFVCQCPEGFAGKCCEIDTRATCYEDQGISYRGTWSTAESGAECTNWNSSALAQKPYSGRRPDAIRLGLGNHNYCRNPDRDSKPWCYVFKAGKYSSEFCSTPACSEGNSDCYFGNGSAYRGTHSLTESGASCLPWNSMILIGKVYTAQNPSAQALGLGKHNYCRNPDGDAKPWCHVLKNRRLTWEYCDVPSCSTCGLRQYSQPQFRIKGGLFADIASHPWQAAIFAKHRRSPGERFLCGGILISSCWILSAAHCFQERFPPHHLTVILGRTYRVVPGEEEQKFEVEKYIVHKEFDDDTYDNDIALLQLKSDSSRCAQESSVVRTVCLPPADLQLPDWTECELSGYGKHEALSPFYSERLKEAHVRLYPSSRCTSQHLLNRTVTDNMLCAGDTRSGGPQANLHDACQGDSGGPLVCLNDGRMTLVGIISWGLGCGQKDVPGVYTKVTNYLDWIRDNMRP

SEQ ID NO: 2540 - DNA, 684 bp, Homo sapiens
ggaggggcggggcctccgccaccacctcagctgcggaccgaggcgagatggcggccaccgagggggtcggggaggctgcgcaagggggcgagcccgggcagccggcgcaacccccgccccagccgcacccaccgccgccccagcagcagcacaaggaagagatggcggccgaggctggggaagccgtggcgtcccccatggacgacgggtttgtgagcctggactcgccctcctatgtcctgtacagggacagagcagaatgggctgatatagatccggtgccgcagaatgatggccccaatcccgtggtccagatcatttatagtgacaaatgtaagttttttatgattacttccgagctgtcctgcagcgtgatgaaagaagtgaacgagcttttaagctaacccgggatgctattgagttaaatgcagccaattatacagtgtggcatttccggagagttcttttgaagtcacttcagaaggatctacatgaggaaatgaactacatcactgcaataattgaggagcagcccaaaaactatcaagtttggcatcataggcgagtattagtggaatggctaagagatccatctcaggagcttgaatttattgctgatattcttaatcaggatgcaaagaattatcatgcctggcagcatcgacaatgggttattcaggtatt

SEQ ID NO: 2541 - DNA, 1300 bp, Homo sapiens
aacttttaaaaactctcattggagtaagtcttttcaagatgatcctccacaatggaggcagcgttcctacttgtcatcacacagctgaagacattgtttcttaggtgtgaaatcggggacaaaggacaaacagagacacacggcattgttcatgggaggcatcgtcaccctcctgggtgttctgtgggaatttcctgtgtgaggaaaacgtggccacagggttgtgctgtacccacccttccccggcgagatggccctcggcctgtgccgctgcttccaccctcgccactccatggcagcttttggtctgtttccggctctgccctctgccctgaactctcatccggcttgtacctgcctgctggacccctccacctggaggccagcccatgtctcaggcccagccctagcctcttctcctcaaattctaagtgttttctctttaggtttccctggctttgtgaatggatcatgtgtctctaggtataaacctgacatcatctttccacccggcttacctccaccagatctccccagttctgtctccatcttctgcctgcagctgctctgttctcatggtcactgctgcatcactgagtctggacccttgttatcattttcaaactggcctccttccctcgttccccacttcttaaagtcacctgtccattgccaccagattaagctttctccagccagatcacctctctctgagaaacctccattgacatggaaacaccattgtctggcacacatactcacatacccaccttcccgtcttgatccccacacatctttccagcctcccctcccactccactccctgctctctcctccacctccccatcctcttgtctcccctcccctctgaatccagcccagcggggcttctcctgcctccatcacatcacagaagtacctcctgcttctggttttaattagagccttccccgattacattttcctctgaattttttcctatctacatttgatctgtcatgtttaaaccccctacttctaagggaacttctctaatctcttatcctcatccccaaatagtgttttcttcctctgggttcttataatgttggtatcaatctcacagcatttagtgcttcctgcctggtgtgacagttacctgtgtgcatgtgcaatttctaatttcccacgctagactgtgagcttcctaaggcaagaatcatgcctcgttggtttctgtattcctcatggtgccaaacacagtgccttctacattgcaggcgctgaataaacatttttaaagcaaaaaaaaaaaaaaaaa

SEQ ID NO: 2542 - protein, 206 aa, Homo sapiens
MALGLCRCFHPRHSMAAFGLFPALPSALNSHPACTCLLDPSTWRPAHVSGPALASSPQILSVFSLGFPGFVNGSCVSRYKPDIIFPPGLPPPDLPSSVSIFCLQLLCSHGHCCITESGPLLSFSNWPPSLVPHFLKSPVHCHQIKLSPARSPLSEKPPLTWKHHCLAHILTYPPSRLDPHTSFQPPLPLHSLLSPPPPHPLVSPPL

SEQ ID NO: 2543 - DNA, 4292 bp, Homo sapiens
cagagatccagaaagtgagacagataatgactcccaggaaatatttaagttggcaaaagatgtgctgattcaaggattgatcgatgagaaccctggacttcaattaattattcgaaatttctggagccatgaaactaggttaccttcaaataccttggaccggttgctggcactaaattccttatattctcctaagatagaagtgcactttttaagtttagcaacaaattttctgctcgaaatgaccagcatgagcccagattatccaaaccccatgttcgagcatcctctgtcagaatgcgaatttcaggaatataccattgattctgattggcgtttccgaagtactgttctcactccgatgtttgtggagacccaggcctcccagggcactctccagacccgtacccaggaagggtccctctcagctcgctggccagtggcagggcagataagggccacccagcagcagcatgacttcacactgacacagactgcagagggacccaataattgcaaaacagctctttagcagcttgttttctggaattttgaaagagatggataaatttaagacactgtctgaaaaaaacaacatcactcaaaagttgcttcaagacttcaatcgttttcttaataccaccttctctttctttccaccctttgtctcttgtattcaggacattagctgtcagcacgcagccctgctgagcctcgacccagcggctgttagcgctggttgcctggccagcctacagcagcccgtgggcatccgcctgctagaggaggctctgctctgcctgctgcctgctgagctgcctgccaagcgagtccgtgggaaggcccgcctccctcctgatgtcctcagatgggtggagcttgctaagctgtatagatcaattggagaatacgacgtcctccgtgggatttttaccagtgagataggaacaaagcaaatcactcagagtgcattattagcagaagccagaagtgattattctgaagctgctaagcagtatgatgaggctctcaataaacaagactgggtagatggtgagcccacagaagccgagaaggatttttgggaacttgcatcccttgactgttacaaccaccttgctgagtggaaatcacttgaatactgttctacagccagtatagacagtgagaaccccccagacctaaataaaatctggagtgaaccattttatcaggaaacatatctaccttacatgatccgcagcaagctgaatattgatgtcctcttacaccaaagtagactcaccaaattgcagtctgtacaggctttaacagaaattcaggagttcatcagctttataagcaaacaaggcaatttatcatctcaagttccccttaagagacttctgaacacctggacaaacagatatccagatgctaaaatggacccaatgaacatctgggatgacatcatcacaaatcgatgtttctttctcagcaaaatagaggagaagcttacccctcttccagaagataatagtatgaatgtggatcaagatggagaccccagtgacaggatggaagtgcaagagcaggaagaagatatcagctccctgatcaggagttgcaagttttccatgaaaatgaagatgatagacagtgcccggaagcagaacaatttctcacttgctatgaaactactgaaggagctgcataaagagtcaaaaaccagagacgattggctggtgagctgggtgcagagctactgccgcctgagccactgccggagccggtcccagggctgctctgagcaggtgctcactgtgctgaaaacagtctctttgttggatgagaacaacgtgtcaagctacttaagcaaaaatattctggctttccgtgaccagaacattctcttgggtacaacttacaggatcatagcgaatgctctcagcagtgagccagcctgccttgctgaaatcgaggaggacaaggctagaagaatcttagagctttctggatccagttcagaggattcagagaaggtgatcgcgggtctgtaccagagagcattccagcacctctctgaggctgtgcaggcggctgaggaggaggcccagcctccctcctggagctgtgggcctgcagctggggtgattgatgcttacatgacgctggcagatttctgtgaccaacagctgcgcaaggaggaagagaatgcatcagttattgattctgcagaactgcaggcgtatccagcacttgtggtggagaaaatgttgaaagctttaaaattaaattccaatgaagccagattgaagtttcctagattacttcagattatagaacggtatccagaggagactttgagcctcatgacaaaagagatctcttccgttccctgctggcagttcatcagctggatcagccacatggtggccttactggacaaagaccaagccgttgctgttcagcactctgtggaagaaatcactgataactacccgcaggctattgtttatcccttcatcataagcagcgaaagctattccttcaaggatacttctactggtcataagaataaggagtttgtggcaaggattaaaagtaagttggatcaaggaggagtgattcaagattttattaatgccttagatcagctctctaatcctgaactgctctttaaggattggagcaatgatgtaagagctgaactagcaaaaacccctgtaaataaaaaaaacattgaaaaaatgtatgaaagaatgtatgcagccttgggtgacccaaaggctccaggcctgggggcctttagaaggaagtttattcagacttttggaaaagaatttgataaacattttgggaaaggaggttctaaactactgagaatgaagctcagtgacttcaacgacattaccaacatgctacttttaaaaatgaacaaagactcaaagccccctgggaatctgaaagaatgttcaccctggatgagcgacttcaaagtggagttcctgagaaatgagctggagattcccggtcagtatgacggtaggggaaagccattgccagagtaccacgtgcgaatcgccgggtttgatgagcgggtgacagtcatggcgtctctgcgaaggcccaagcgcatcatcatccgtggccatgacgagagggaacaccctttcctggtgaagggtggcgaggacctgcggcaggaccagcgcgtggagcagctcttccaggtcatgaatgggatcctggcccaagactccgcctgcagccagagggccctgcagctgaggacctatagcgttgtgcccatgacctccaggttaggattaattgagtggcttgaaaatactgttaccttgaaggaccttcttttgaacaccatgtcccaagaggagaaggcggcttacctgagtgatcccagggcaccgccgtgtgaatataaagattggctgacaaaaatgtcaggaaaacatgatgttggagcttacatgctaatgtataagggcgctaatcgtactgaaacagtcacgtcttttagaaaacgagaaagtaaagtgcctgctgatctcttaaagcgggccttcgtgaggatgagtacaagccctgaggctttcctggcgctccgctcccacttcgccagctctcacgctctgatatgcatcagccactggatcctcgggattggagacagacatctgaacaactttatggtggccatggagactggcggcgtgatcgggatcgactttgggcatgcgtttggatccgctacacagtttctgccagtccctgagttgatgccttttcggctaactcgccagtttatcaatctgatgttaccaatgaaagaaacgggccttatgtacagcatcatggtacacgcactccgggccttccgctcagaccctggcctgctcaccaacaccatggatgtgtttgtcaaggagccctcctttgattggaaaaattttgaacagaaaatgctgaaaaaaggagggtcatggattcaagaaataaatgttgctgaaaaaaattggtacccccgacagaaaatatgttacgctaagagaaagttagcaggtgccaatccagcagtcattacttgtgatgagctactcctgggtcatgagaaggcccctgccttcaaagactatgtggctgtggcacgaggaagcaaagatcacaacattcgtgcccaagaaccagagagtgggctttcagaagagactcaagtgaagtgcctgatggaccaggcaacagaccccaacatccttggcagaacctgggaaggatgggagccctggatgtga

SEQ ID NO: 2544 - DNA, 3248 bp, Homo sapiens
ggagtccgcgagcgtcgtcggcaagcggccgcctttccacggtaaccgcgcgccggcggggagggcgtggcgcggagccgacgggaacgtccgcgctgcggagcagggcagggaagccgggaggcgggcccggcccgagcttgtccttgtcgcgcaggtactccgagcactatgtcgtccccggcgtcgaccccgagccgccgcggcagccggcgtggaagggccacccccgcccagacgcctcggagtgaggatgccaggtcatctccctctcagagacgtagaggcgaggattccacctccacgggggagttgcagccgatgccaacctcgcctggagtggacctgcagagccctgctgcgcaggacgtgctgttttccagccctccccaaatgcattcttcagctatccctcttgactttgatgttagttcaccactgacatacggcactcccagctctcgggtagagggaaccccaagaagtggtgttaggggcacacctgtgagacagaggcctgacctgggctctgcacagaagggcctgcaagtggatctgcagtctgacggggcagcagcagaagatatagtggcaagtgagcagtctctaggccaaaaacttgtgatctggggaacagatgtaaatgtggcagcatgcaaagaaaactttcagagatttcttcagcgttttattgaccctctggctaaagaagaagaaaatgttggcatagatattactgaacctctatacatgcaacgacttggggagattaatgttattggtgagccatttttaaatgtgaactgtgaacacatcaaatcatttgacaaaaatttgtacagacaactcatctcttacccacaggaagttattccaacttttgacatggctgtcaatgaaatcttctttgaccgttaccctgactcaatcttagaacatcagattcaagtaagaccattcaacgcattgaagactaagaatatgagaaacctgaatccagaagacattgaccagctcatcaccatcagcggcatggtgatcaggacatcccagctgattcccgagatgcaggaggccttcttccagtgccaagtgtgtgcccacacgacccgggtggagatggaccgcggccgcattgcagagcccagtgtgtgcgggcgctgccacaccacccacagcatggcactcatccacaaccgctccctcttctctgacaagcagatgatcaagcttcaggagtctccggaagacatgcctgcagggcagacaccacacacagttatcctgtttgctcacaatgatctcgttgacaaggtccagcctggggacagagtgaatgttacaggcatctatcgagctgtgcctattcgagtcaatccaagagtgagtaatgtgaagtctgtctacaaaacccacattgatgtcattcattatcggaaaacggatgcaaaacgtctgcatggccttgatgaagaagcagaacagaaacttttttcagagaaacgtgtggaattgcttaaggaactttccaggaaaccagacatttatgagaggcttgcttcagccttggctccaagcatttatgaacatgaagatataaagaagggaattttgcttcagctctttggcgggacaaggaaggattttagtcacactggaaggggcaaatttcgggctgagatcaacatcttgctgtgtggcgaccctggtaccagcaagtcccagctgctgcagtacgtgtacaacctcgtccccaggggccagtacacgtctgggaagggctccagtgcagttggcctcactgcgtacgtaatgaaagaccctgagacaaggcagctggtcctgcagacaggtgctcttgtcctgagtgacaacggcatctgctgtatcgatgagttcgacaagatgaatgaaagtacaagatcggtattgcatgaagtcatggaacagcagactctgtccattgcaaaggctgggatcatctgtcagctcaatgcgcgcacctctgtcctggcagcagcaaatcccattgagtctcagtggaatcctaaaaaaacaaccattgaaaacatccagctgcctcatactttattatcaaggtttgatttgatcttcctcttgctggaccctcaggacgaagcctatgacaggcgtctggctcaccacctggtcgcactgtactaccagagcgaggagcaggcagaggaggagctcctggacatggcggtgctaaaggactacattgcctacgcgcacagcaccatcatgccgcggctaagtgaggaagccagccaggctctcatcgaggcttatgtagacatgaggaagattggcagtagccggggaatggtttctgcataccctcgacagctagagtcattaatccgcttagcagaagcccatgctaaagtaagattgtctaacaaagttgaagccattgatgtggaagaggccaaacgcctccatcgggaagctctgaagcagtctgcaactgatccccggactggcatcgtggacatatctattcttactacggggatgagtgccacctctcgtaaacggaaagaagaattagctgaagcattgaaaaagcttattttatctaagggcaaaacaccagctctaaaataccagcaactttttgaagatattcggggacaatctgacatagcaattactaaagatatgtttgaagaagcactgcgtgccctggcagatgatgatttcctgacagtgactgggaagaccgtgcgcttgctctgaagccttgtgagcaaggaaggctccctgcatgtcctgcttgctgcacgccacatgggtgtggtctgcatctcagttggccgccatcagtgtaaatagagcttaaagtcatggtttggctgcataaaaattttctaacttgggttcaatatttgtagtgaagtatctgttttcatttttttcacgttataaataaaaatactatgctggccgggcgcggtggctcacacctgtaatcccagcactttgggaggccaatgtgggtggatcatgaggtcaggagttcaagaccagcctagccaagatggtgaaaccccgtctctagtaaagataacaaaaaattagctgggcttgatggcatgcgcctgtaatcccagctactcgggaggttgaggcaggagaatcgcttaaacccaggcggcagaggttgcagtgagccaagatcgcgccactgcactccagcctcagcaatagagtgagactgtctc

SEQ ID NO: 2545 - protein, 863 aa, Homo sapiens
MSSPASTPSRRGSRRGRATPAQTPRSEDARSSPSQRRRGEDSTSTGELQPMPTSPGVDLQSPAAQDVLFSSPPQMHSSAIPLDFDVSSPLTYGTPSSRVEGTPRSGVRGTPVRQRPDLGSAQKGLQVDLQSDGAAAEDIVASEQSLGQKLVIWGTDVNVAACKENFQRFLQRFIDPLAKEEENVGIDITEPLYMQRLGEINVIGEPFLNVNCEHIKSFDKNLYRQLISYPQEVIPTFDMAVNEIFFDRYPDSILEHQIQVRPFNALKTKNMRNLNPEDIDQLITISGMVIRTSQLIPEMQEAFFQCQVCAHTTRVEMDRGRIAEPSVCGRCHTTHSMALIHNRSLFSDKQMIKLQESPEDMPAGQTPHTVILFAHNDLVDKVQPGDRVNVTGIYRAVPIRVNPRVSNVKSVYKTHIDVIHYRKTDAKRLHGLDEEAEQKLFSEKRVELLKELSRKPDIYERLASALAPSIYEHEDIKKGILLQLFGGTRKDFSHTGRGKFRAEINILLCGDPGTSKSQLLQYVYNLVPRGQYTSGKGSSAVGLTAYVMKDPETRQLVLQTGALVLSDNGICCIDEFDKMNESTRSVLHEVMEQQTLSIAKAGIICQLNARTSVLAAANPIESQWNPKKTTIENIQLPHTLLSRFDLIFLLLDPQDEAYDRRLAHHLVALYYQSEEQAEEELLDMAVLKDYIAYAHSTIMPRLSEEASQALIEAYVDMRKIGSSRGMVSAYPRQLESLIRLAEAHAKVRLSNKVEAIDVEEAKRLHREALKQSATDPRTGIVDISILTTGMSATSRKRKEELAEALKKLILSKGKTPALKYQQLFEDIRGQSDIAITKDMFEEALRALADDDFLTVTGKTVRLL

SEQ ID NO: 2546 - DNA, 1535 bp, Homo sapiens
cgcgtcgggctgcaggagaagatggcggtctccacaggagttaaagttcctcgtaattttcgcttgttggaagaacttgaagaaggacaaaaaggagtaggcgacggtacagttagctggggccttgaagatgatgaagatatgacacttacaaggtggacaggcatgattattgggccaccaaggacaaattatgaaaacagaatatatagcctgaaagtagaatgtggacctaaatacccagaagctcctccgtcagttagatttgtaacaaaaattaatatgaacggaataaataattccagtgggatggtggatgcccggagcataccagtgttagcaaaatggcaaaattcatatagcattaaagttgtacttcaagagctaagacgtctaatgatgtccaaagaaaatatgaagcttccacagccaccagaaggacaaacatacaacaattaattttagtggatctcaaacttgtcttaaatcaacaaccttctactcatgttaatgtcttgattaaatatcacaatgcaaaatacacattaagtaaaagaattccagctggtaaacatgacctggacatttgtaagaatatatttaatatatgtacacccattatgttttcaggtaacaggaggaaaaatgcagcacaattttttttctcttgaaaggcactgtcatttaaacataaacctggagtactcgaaatagaattcaggtttacaagatgaaagcgtgtggagaagtgtcagatggcagtggaagcatgtgtgtttctaaaaagtaaaaatctcaagaaaacagaaatggcatgctttacccatcttacttagtgaaagagagctgcagttgaaattgtttaaaaagtagcaggtacaatgaatattgtcacagatgtgttaatttttgaagcaatgtgggtgctgactactagtagtatcaaaaatatgttcaggattgttttgatacctgtatttataataaaaaatgttggggggagttgatgaattcctgttaaaagctgttcttgtgtgttacatgtaacagacatggtaaatatttgtttacagtctttgtttaacaaaccatgcatttaagtttaagtgaagtcaacaaaaaggaaataggtgtatggatatgtgattttgagattaaagttagtcttaaaatgtaaataaaatgtgaaacgtgtcctcagagactgtgccatttctattatgttgatgtatatgtacagtaccttgccagggaagcaaaaattggaattattgtagcttttcatgtatacacacttttatttaccctattttgtgtacttcttgtgaattataatttgcagactatttcagaaaagaaattatctagtttaatttcttctttggacaaggagtcctaggtattatattttgagtttgatttcaccagaaataataatattaaaaagatctttgcattctggcagttcttttaggattataggttgcaaattatccaaatatatatcccattttttaaagcataaaaaaaaaaaa

SEQ ID NO: 2547 - protein, 145 aa, Homo sapiens
MAVSTGVKVPRNFRLLEELEEGQKGVGDGTVSWGLEDDEDMTLTRWTGMIIGPPRTNYENRIYSLKVECGPKYPEAPPSVRFVTKINMNGINNSSGMVDARSIPVLAKWQNSYSIKVVLQELRRLMMSKENMKLPQPPEGQTYNN

SEQ ID NO: 2548 - DNA, 2223 bp, Homo sapiens
agatgggccatcaactgagaaagaccttgacgaaaagaagaaagaacctgcaattacatcgcagaacagccctgaggcaagagaagaaagtacttccagcggcaatgtaagcaacagaaaggatgagacaaatgctcgagatacttatgtttcatcctttcctcgggcaccaagcacttctgattctgtgcggttgaagtgtagggagatgcttgctgcagctcttcgaacaggggatgactacattgcaattggagctgatgaggaagaattaggatctcaaattgaagaagatatatatcaagaaataaggaatacagacatgaaatacaaaaatagagtacgaagtaggatatcaaatcttaaagatgcaaaaaatccaaatttaaggaaaaatgtcctctgtgggaatattcctcctgacttatttgctagaatgacagcagaggaaatggctagtgatgagctgaaagagatgcggaaaaacttgaccaaagaagccatcagagagcatcagatggccaagactggtgggacccagactgacttgttcacatgtggcaaatgtaaaaagaagaattgcacttacacacaggtacaaacccgtagtgctgatgaaccaatgacaacatttgttgtctgtaatgaatgtggaaatcgatggaagttctgttgagttggaagaattggcaaaatatctggaccattaagaaaacggattttgtaactagctttaaactaggccaagcaactagttttcctgcaaatcaaatttttaaagcaacttgggttagactttgtttttgacctaacatcccttccttaaatgccttctgtagtttcagatcagtagggagaccatataataattttatggtacctgtttcaaaacatattttttctgtttttataagtaagttgatattaattaaactcttggcaatatttcttctttcttaaaggaaaatataccttaactttttttcttttacactgtgaaacatacacagtagaaattctgttactctctgttattaatacataaatgaaaatacatttttttccatattggcatgtagctacaaatattaaaggaggagaaaaggtaatataattttaggtttaccaaatatggtgtgtattcaaataatacttgaccagcttatctaaaatgtacataattttgaggtagcttatgaatttgattttaattattatgttcacaagcttggaatattagatattattttgcatctgtaactaaccgtgatcatcatttcttgtaatttcttgtacatgtatattacttgttcttaatagatttttggaaacaagactttattgagatcagtttggttttcctgttaatttacctgtttgactttataatgtgttttagttttgcagaagaacactgttgtagtttagaaggcttttcataaatcccctcataggcaaagatgaaaacttcccactatttttttcccctcttaggaagacatactggaaagaaaatgtttagcatcttagtgtagtatagctattgtaaacagttcatgactagattttgattcggaaatctatactgaccaaggattaatcttaaggattgtataattcattaaagctgtggtctttccatgtggagactgatagaaaataattttgtcccaagtcttatttgctgactttttctgtcatgagtgagattgttgaacaaactgaatatatgggctatagcaagtagctttacagtacagatcttacaattaagttttgcttttgttaaagtgtgtaccattttttctgtttggagtaagacaaaaattgttttgacataggttccctagggtacacttgctctagcatactttaaaggccactgttgcaaagtctacattttatgctgaatctgcattctgtcaggcacccgtagaaagacctcagtacatgctttgcactctcctttgctccctttttccaatttcttattgcatatcattttgttgtaatacagaaagcagcatttttaaatgtccgtgttaagaattggcccactggtaccaactcacctctattttgtcagttcatagttgaagattttgttttatttcaaaaacaaagtacatttttgaaataatgtttcagaataaaataatctcacttttaagtgatccattttaaaatttgtaattcaataaagttttttttgttgttaaacat

SEQ ID NO: 2549 - protein, 155 aa, Homo sapiens
MLAAALRTGDDYIAIGADEEELGSQIEEDIYQEIRNTDMKYKNRVRSRISNLKDAKNPNLRKNVLCGNIPPDLFARMTAEEMASDELKEMRKNLTKEAIREHQMAKTGGTQTDLFTCGKCKKKNCTYTQVQTRSADEPMTTFVVCNECGNRWKFC

SEQ ID NO: 2550 - DNA, 2578 bp, Homo sapiens
cggcgggcgaggggcagggcagggcggaccctggacgcgcgggcgcgcgcggaaggtagcgcggggccgcgttggcgcgcacgcgcctgagcgtgcgcccggtggggccggccgggactcgccgctcgcacgcccttgggccgcggccgggcgcccgctcttccttccgcttgcgctgtgagctgaggcggtgtatgtgcggcaataacatgtcaaccccgctgcccgccatcgtgcccgccgcccggaaggccaccgctgcggtgattttcctgcatggattgggagatactgggcacggatgggcagaagcctttgcaggtatcagaagttcacatatcaaatatatctgcccgcatgcgcctgttaggcctgttacattaaatatgaacgtggctatgccttcatggtttgatattattgggctttcaccagattcacaggaggatgaatctgggattaaacaggcagcagaaaatataaaagctttgattgatcaagaagtgaagaatggcattccttctaacagaattattttgggagggttttctcagggaggagctttatctttatatactgcccttaccacacagcagaaactggcaggtgtcactgcactcagttgctggcttccacttcgggcttcctttccacagggtcctatcggtggtgctaatagagatatttctattctccagtgccacggggattgtgaccctttggttcccctgatgtttggttctcttacggtggaaaaactaaaaacattggtgaatccagccaatgtgacctttaaaacctatgaaggtatgatgcacagttcgtgtcaacaggaaatgatggatgtcaagcaattcattgataaactcctacctccaattgattgacgtcactaagaggccttgtgtagaagtacaccagcatcattgtagtagagtgtaaaccttttcccatgcccagtcttcaaatttctaatgttttgcagtgttaaaatgttttgcaaatacatgccaataacacagatcaaataatatctcctcatgagaaatttatgatcttttaagtttctatacatgtattcttataagacgacccaggatctactatattagaatagatgaagcaggtagcttcttttttctcaaatgtaattcagcaaaataatacagtactgccaccagattttttattacatcatttgaaaattagcagtatgcttaatgaaaatttgttcaggtataaatgagcagttaagatataaacaatttatgcatgctgtgacttagtctatggatttattccaaaattgcttagtcaccatgcagtgtctgtatttttatatatgtgttcatatatacataatgattataatacataataagaatgaggtggtattacattattcctaataatagggataatgctgtttattgtcaagaaaaagtaaaatcgttctcttcaattaatggcccttttattttgggaccaggcttttattttccctgatattatttctatttaatactcttttctctcaagaaaaaaaaaaaagtttgttttttctttattgtccttcatagcaggccaagtattgcctctctgcaatagacagctactgtcaatacatgctgtaatttgacattctgggtcacagatataaggtatttaaaatctatttatgctttatagagaaaccagacattaaaacttcatgcactacttatttcgaattactgtaccttatccaaatttacacctagctattaggatcttcaacccaggtaacaggaataattctgtggtttcatttttctgtaaacaactgaaagaataattagatcatattctagtatgttctgaaatatctttaagactgatcttaaaaactaacttctaagatgatttcatcttctcatagtatagagtttactttgtacacgtttgaaaccaactactgtagaagatgaggaatctattgtaattttttgctttattttcatctgccagtggacttatttgaaattttcactttagtcaaattattttttgtattagtttttgatgcagacataaaaatagcaatcattttaaattgtcaaaatttccagattactggtaaaaattatttgaaaacaaacttatgggtaataaaggctagtcagaaccctataccataaagtgtagttaccatacagattaatatgtagcaaaaatgtatgcttgatatttctcaactgtgttaatttttctgctgtattccagctgaccaaaacaatattaagaatgcatctttataaatgggtgctaattgataatggaaataatttagtaatggactatacaggatgttaataatgaagccatatgtttatgtctggatttaaaaattttaaacaatcatttactatgtcatttttctttaccttgaagaacataaactgttatttcacttctacaaatcagcaagatattatttatggcaagaaatattccattgaaatattgtgctgtaacatgggaaagtgtaaatgtttttcatggtttctatcaatgtgaaataaaatttaattctgaaaaa

SEQ ID NO: 2551 - protein, 230 aa, Homo sapiens
MCGNNMSTPLPAIVPAARKATAAVIFLHGLGDTGHGWAEAFAGIRSSHIKYICPHAPVRPVTLNMNVAMPSWFDIIGLSPDSQEDESGIKQAAENIKALIDQEVKNGIPSNRIILGGFSQGGALSLYTALTTQQKLAGVTALSCWLPLRASFPQGPIGGANRDISILQCHGDCDPLVPLMFGSLTVEKLKTLVNPANVTFKTYEGMMHSSCQQEMMDVKQFIDKLLPPID

SEQ ID NO: 2552 - DNA, 539 bp, Homo sapiens
ctttctttttgaggaagacgcggtcgtaagggctgaggatttttggtccgcacgctcctgctcctgactcaccgctgttcgctctcgccgaggaacaagtcggtcaggaagcccgcgcgcaacagccatggcttttaaggataccggaaaaacacccgtggagccggaggtggcaattcaccgaattcgaatcaccctaacaagccgcaacgtaaaatccttggaaaaggtgtgtgctgacttgataagaggcgcaaaagaaaagaatctcaaagtgaaaggaccagttcgaatgcctaccaagactttgagaatcactacaagaaaaactccttgtggtgaaggttctaagacgtgggatcgtttccagatgagaattcacaagcgactcattgacttgcacagtccttctgagattgttaagcagattacttccatcagtattgagccaggagttgaggtggaagtcaccattgcagatgcttaagtcaactattttaataaattgatgaccagttgttaaaaaaaaaaaaaaaaaa

SEQ ID NO: 2553 - protein, 119 aa, Homo sapiens [sequence omitted]

SEQ ID NO: 2554 - DNA, 294 bp, Homo sapiens
atgatgaagggaacgtcatcatttggaaagcattgcaataagacgtacacgttatgccaccactgtggctctaaggcctaccaccttcagaagtcgacctatggcaaatgtggctacactgccaagcgcaagagaaagtataactggagtaccaaggctaaaagacgaaataccaccagaactggtcaaatgaggcacctaaaaattgtataccatagattcaggcatggattccgtgaaggaacaacacctaaacccaagagggcagctgttgcagcatccagttcatcttaa

SEQ ID NO: 2555 - protein, 97 aa, Homo sapiens
MMKGTSSFGKHCNKTYTLCHHCGSKAYHLQKSTYGKCGYTAKRKRKYNWSTKAKRRNTTRTGQMRHLKIVYHRFRHGFREGTTPKPKRAAVAASSSS

SEQ ID NO: 2556 - DNA, 714 bp, Homo sapiens
ccctggtgtgattccatcctgtgtggctgttctctggagcagcattcgtttatcttcgtccgccttctctcctacctaagtgcgtgctgcctcccgatggaagatctgatggacgtggacatgagctccctgaggccccagaactatctttttggttgtgaactaaaggctgacaaagattgtcactttaaggtggataatgatgaaaatgagcgccagttgtctttaagaacggtcagtttaggggctggtgcaaaggatgaattgcacattgttgaagcagaggcaatgaattacgaaggcagcccaattaaagtaacactggcaactttgaaaatgtctgtacagccaacggtttcccttgggggctttgaaacaacaccaccagtagtcttaaggttgaagtgtggttcagggccagtgcatattagtggacagcacttagtagctgtggaggaagatgcagagtcagaagatgaagaggaggaggatgatgatgaagatgatgatgatgattttaatgatgaggaagctgaagaaaaagtgccagtgaagcaatctatacaagatactccagccaaaaatgcacaaaagtcaaatcagaatggaaaagactcaaaaccatcaacaccaagatcaaaaggacaagaatctttcaaaaaacaggaaaaaaactcctaaaacaccaaaaggacctagttctgtaaaagacat

SEQ ID NO: 2557 - DNA, 1279 bp, Homo sapiens
gattccatcctgtgtggctgttctctggagcagcattcgtttatcttcgtccgccttctctcctacctaagtgcgtgctgcctcccgatggaagatctgatggacgtggacatgagctccctgaggccccagaactatctttttggttgtgaactaaaggctgacaaagattgtcactttaaggtggataatgatgaaaatgagcgccagttgtctttaagaacggtcagtttaggggctggtgcaaaggatgaattgcacattgttgaagcagaggcaatgaattacgaaggcagcccaattaaagtaacactggcaactttgaaaatgtctgtacagccaacggtttcccttgggggctttgaaacaacaccaccagtagtcttaaggttgaagtgtggttcagggccagtgcatattagtggacagcacttagtagctgtggaggaagatgcagagtcagaagatgaagaggaggaggatgtgaaactcttaagtatatctggaaagcgatctgccctcggaggtagtagcaagcttccacagaaaaaagtaaaacttgctgctgatgaagatgatgatgatgatgaagaagatgatgatgatgaagatgatgatgatgattttaatgatgaggaagctgaagaaaaagtgccagtgaagcaatctatacaagatactccagccaaaaatgcacaaaagtcaaatcagaatggaaaagactcaaaaccatcaacaccaagatcaaaaggacaagaatctttcaaaaaacaggaaaaaaactcctaaaacaccaaaaggacctagttctgtaaaagacattaaagcaaaaatgcaagcaagtatagaaaaaggtggttctcttcccaaagtggaagccaagttcatcaattacgtgaagaattgcttccggatgactgaccaagaggctattcaagatctctggcagtggaggaagtctctttaagaaaatagtttaaacaatttgttaaaaattttccgtcttatttcatttctgtaacagttgatatctggctgtcctttttataatgcagagtgagaactttccctaccgtgtttgataaatgttgtccaggttctattgccaagaatgtgttgtccaaaatgcctgtttagtttttaaagatggaactccaccctttgcttggttttaagtatgtatggaatgttatgataggacacagtagtagcggtggtcagacatggaaatcgtggggagacaaaaatatacctgtgaaataaaactcagtattttaat

SEQ ID NO: 2558 - DNA, 1058 bp, Homo sapiens
ggagcagcattcgtttatcttcgtccgccttctctcctacctaagtgcgtgctgcctcccgatggaagatctgatggacgtggacatgagctccctgaggccccagaactatctttttggttgtgaactaaaggctgacaaagattgtcactttaaggtggataatgatgaaaatgagcgccagttgtctttaagaacggtcagtttaggggctggtgcaaaggatgaattgcacattgttgaagcagaggcaatgaattacgaaggcagcccaattaaagtaacactggcaactttgaaaatgtctgtacagccaacggtttcccttgggggctttgaaacaacaccaccagtagtcttaaggttgaagtgtggttcagggccagtgcatattagtggacagcacttagtagctgtggaggaagatgcagagtcagaagatgaagaggaggaggatgtgaaactcttaagtatatctggaaagcgatctgccctcggaggtagtagcaagcttccacagaaaaaagtaaaacttgctgctgatgaagatgatgatgatgatgaagaagatgatgatgatgaagatgatgatgatgattttaatgatgaggaagctgaagaaaaagtgccagtgaagaaaggacaagaatctttcaaaaaacaggaaaaaaactcctaaaacaccaaaaggacctagttctgtaaaagacattaaagcaaaaatgcaagcaagtatagaaaaaggtggttctcttcccaaagtggaagccaagttcatcaattacgtgaagaattgcttccggatgactgaccaagaggctattcaagatctctggcagtggaggaagtctctttaagaaaatagtttaaacaatttgttaaaaattttccgtcttatttcatttctgtaacagttgatatctggctgtcctttttataatgcagagtgagaactttccctaccgtgtttgataaatgttgtccaggttctattgccaagaatgtgttgtccaaaatgcctgtttagtttttaaagatggaactccaccctttgcttg

SEQ ID NO: 2559 - DNA, 1743 bp, Homo sapiens
gctccttctaggatctccgcctggttcggcccgcctgcctccactcctgcctccaccatgtccatcagggtgatccagaagtcctacaaggtgtccacctctggcccccgggccttcagcagccgctcctacacgagtgggcccggtgcccacatcagctcctcgagcttctcctgagtgggcagcagcagctttcggggtggcctgggaggcggctatagtggggccagcggcatgggaggcatcaccgcagtcatggtcaaccagagcctactgagcccccttgtcctggaggtggaccccaacatccaggctgtgtgcacccaggagaaggagcagatcaagaccctcaacaacaagtttgcctccttcacagacaaggtacggttcctggagcagcagaacaagatgctggagaccaagtggagcctcctgcagcagcagaagatggctcggagcaacatggacaacatgttcgagagctacatcaacaaccttaggcggcagctggagactctgggccaggagaagctgaagctggaggcggagcttggcaacatgcagaggctggtggaggacttcaagaacaagtatgaggatgagatcaataagcatacagagatggagaatgaatttgtcctcatcaagaaggatgtggatgaagcttacatgaacaaggtagagctggagtctcgcctggaagggctgactgacgagatcaacttcctcaggcagctgtacgaaaaggagatccgggagctgcagtcccagatctcggacacatctgtggtgctgtccatggacaacagccgctccctggacatggacagcatcattgctgaggtcaaggcacagtacgaggatattgccaaccaaagacgggctgaggctgagagcatgtaccagatcaagtatgaggagctgcagagtctggctgggaagcacggggatgacctgtggcgcacaaagactgagatctctgagatgaactggaacatcagccagctccaggctgagattgagggcctcaaaggccagagggcttccctggaggccgccattgcagatgccgagcagcgtggagagctggccattaaggatgccaacgccaagttgtccgagctggaggctgccctgcagcgggccaagcaggacatggcacggcagctgcgtgagtaccaggagctgatgaacgtcaagctggccctggacatcgagatcgccacctacaggaagctgctggagggcaaagagagccggctgaagtctgggatgcagaacatgagtattcatacgaagaccaccagcggctatgcaggtggtctgagctcggcctatgggggcctcacaagccccggcctcagctacggcctgggctccagctttggctctggcgcaggctccagctccctcagccgcaccagttcctccagggccgtggttgtgaagaagatcgagacatgtgatgggaagctggtgtccgagtcctctgacatcctgcccaagtgaacagctgtggcagcccctcccagcctacccctcctgcgctgccccagagcctgagaaggaggccactattcagggtagcactgggaacaggagacccacctgaggctcagccctagccctcagcccacctggggagtttactacctggggaccccccttgcccatgcctccagctacaaaacaattcaattgcttttttttggtccaaaataaaacctcagctagctctgccaa

SEQ ID NO: 2560 - DNA, 651 bp, Homo sapiens
gagtgggcagcagcagctttcggggtggcctgggaggcggctatagtggggccagcggcatgggaggcatcaccgcagtcatggtcaaccagagcctactgagcccccttgtcctggaggtggaccccaacatccaggctgtgtgcacccaggagaaggagcagatcaagaccctcaacaacaagtttgcctccttcacagacaaggtacggttcctggagcagcagaacaagatgctggagaccaagtggagcctcctgcagcagcagaagatggctcggagcaacatggacaacatgttcgagagctacatcaacaaccttaggcggcagctggagactctgggccaggagaagctgaagctggaggcggagcttggcaacatgcagaggctggtggagtctgggatgcagaacatgagtattcatacgaagaccaccagcggctatgcaggtggtctgagctcggcctatgggggcctcacaagccccggcctcagctacggcctgggctccagctttggctctggcgcaggctccagctccctcagccgcaccagttcctccagggccgtggttgtgaagaagatcgagacatgtgatgggaagctggtgtccgagtcctctgacatcctgcccaagtgaacagctg

SEQ ID NO: 2561 - DNA, 923 bp, Homo sapiens
ctgggaggcggctatagtggggccagcggcatgggaggcatcaccgcagtcatggtcaaccagagcctactgagcccccttgtcctggaggtggaccccaacatccaggctgtgtgcacccaggagaaggagcagatcaagaccctcaacaacaagtttgcctccttcacagacaaggtacggttcctggagcagcagaacaagatgctggagaccaagtggagcctcctgcagcagcagaagatggctcggagcaacatggacaacatgttcgagagctacatcaacaaccttaggcggcagctggagactctgggccaggagaagctgaagctggaggcggagcttggcaacatgcagaggctggtggaggacttcaagaacaagtatgaggatgagatcaataagcatacagagatggagaatgaatttgtcctcatcaagaaggatgtggatgaagcttacatgaacaaggtagagctggagtctcgcctggaagggctgactgacgagatcaacttcctcaggcagctgtacgaaaaggagatccgggagctgcagtcccagatctcggacacatcattgctgaggtcaaggcacagtacgaggatattgccaaccaaagacgggctgaggctgagagcatgtaccagatcaagtatgaggagctgcagagtctggctgggaagcacggggatgacctgtggcgcacaaagactgagatctctgagatgaactggaacatcagccagctccaggctgagattgagggcctcaaaggccagagggcttccctggaggccgccattgcagatgccgagcagcgtggagagctggccattaaggatgccaacgccaagttgtccgagctggaggctgccctgcagcgggccaagcaggacatggcacggcagctgcgtgag

SEQ ID NO: 2562 - DNA, 437 bp, Homo sapiens
tctccggtccgtgcctccaagatgacaaagaaaagaaggaacaatggtcgtgccaaaaagggccgcggccacgtgcagcctattcgctgcactaactgtgcccgatgcatgcccaaggacaaggccattaagaaattcgtcattcgaaacatagtggaggccgcagcagtcagggacatttctgaagcgagcatctttgatgcctatttgcttcccaagctgtatgtgaagctacattactgtgtgagttgtgcaattcacagcaaagtagtcaggaatcgatctcgtgaagcctgcaaggaccgaacacccccaccccaatttagacctgcgggtgctgccccacgtcccccaccaaagcccatgtaaggagctgagttcttaaagactgaagacaggctattctctggagaaaaattaaatggaaactgtactta

SEQ ID NO: 2563 - DNA, 2159 bp, Homo sapiens
aggcgggggcggtgccatgacgcgcctcgggggcggtcctcgggcgcgcaccgctctcttacactcgggcctcagaagtccgtgccagtgaccggaggcggcggcggcgagcggttccttgtgggctagaagaatcctgcaaaaatgtctctctatccatctctcgaagacttgaaggtagacaaagtaattcaggctcaaactgctttttctgcaaaccctgccaatccagcaattttgtcagaagcttctgctcctatccctcacgatggaaatctctatcccagactgtatccagagctctctcaatacatggggctgagtttaaatgaagaagaaatacgtgcaaatgtggccgtggtttctggtgcaccacttcaggggcagttggtagcaagaccttccagtataaactatatggtggctcctgtaactggtaatgatgttggaattcgtagagcagaaattaagcaagggattcgtgaagtcattttgtgtaaggatcaagatggaaaaattggactcaggcttaaatcaatagataatggtatatttgttcagctagtccaggctaattctccagcctcattggttggtctgagatttggggaccaagtacttcagatcaatggtgaaaactgtgcaggatggagctctgataaagcgcacaaggtgctcaaacaggcttttggagagaagattaccatgaccattcgtgacaggccctttgaacggacgattaccatgcataaggatagcactggacatgttggttttatctttaaaaatggaaaaataacatccatagtgaaagatagctctgcagccagaaatggtcttctcacggaacataacatctgtgaaatcaatggacagaatgtcattggattgaaggactctcaaattgcagacatactgtcaacatctgggactgtagttactattacaatcatgcctgcttttatctttgaacatattattaagcggatggcaccaagcattatgaaaagcctaatggaccacaccattcctgaggtttaaaattcacggcaccatggaaatgtagctgaacgtctccagtttccttctttggcaacttctgtattatgcacgtgaagccttcccggagccagcgagcatatgctgcatgaggacctttctatcttacattatggctgggaatcttactctttcatctgataccttgttcagatttcaaaatagttgtagccttatcctggttttacagatgtgaaactttcaagagatttactgactttcctagaatagtttctctactggaaacctgatgcttttataagccattgtgattaggatgactgttacaggcttagctttgtgtgaaaaccagtcacctttctcctaggtaatgagtagtgctgttcatattactttagttctatagcatacttgcatctttaacatgctatcatagtacatttagaatgattgcctttgattttttttttaaattctgtgtgtgtgtgtgtaaaatgccaattaagaacactggtttcattccatgtaagcattaaacagtgtatgtaggtttcaagagattgtgatgattcttaaattttaactaccttcacttaatatgcttgaactgtcgccttaactatgttaagcatctagactaaaagccaaaatataattattgctgcctttctaaaaacccaaaatgtagttctctattaacctgaaatgtacactagcccagaacagtttaatggtacttactgagctatagcatagctgcttagttgtttttgagattttttagtcaacacataatggaaacttctttcttctaaaagttgccagtgccacttttaagaagtgaatcactatatgtgatgtaaaagttattacactaaacaggataaacttttgactccccttttgttcatttgtggattaagtggtataatacttaattttggcatttgactcttaagattatgtaacctagctactttgggatggtcttagaatatttttctgataacttgttccttttcctgactcctccttgcaaacaaaatgatagttgacactttatcctgatttttttcttctttttggtttatgtctattctaattaaatatgtataaataaagttacattttagtctgtc

SEQ ID NO: 2564 - DNA, 1828 bp, Homo sapiens
tgctgcctacagcgtctgctccacccctgctgcccgctggagccctagtggctccctcgcttggcaacaacacaagtctcatggccgcagcagctgcagctgcagcagtggcagcagcaggcggacctccagtcctcactgcccagaccaaccccttcctcagcctgtcgggagcagacggcagtggcggtggccccaaaggagggaccgctgacaaaggagcctcagccaaccaggaaaaaggctaaatccacccttacccctcctgaccccccaagtggagggaacagatcctggcctgaggggtcctagcctggagcaggcgcctgcgcccagaccctggagagccttgacccagagcctgtgctgaggtccagggagtgtggagagctcctggtgtcaaggactgagactgagaggggagccccctccatctggcccccttccctttctgtactgtccgctttgtgaggctcagaggaaggacagtctgcaagcccacctaggaggtccatccccagcaaatgttttggaggtccccccagagagcacagtgggccatggaagaagtagggggttggttggacctgtcacatgaaatggatcagcacttgaatggggagaagtggagggagaggccctgggcctgtccctgcggggaaatcttttatggaagaagggctggacccactttacctgcagtttcttcccagctcaggcagatggcagaagggaccccttggactttttctcgccatccctccccccagcgcaggggcacaagctgagcttgtaaaagcccacagatgttgggggctggagaaggggcaggagagcatcacactcagccccagcctcctcaacctcttggggccctgtgatggggaggagacggcaggtgcggggaggctccggccttccttggtgccccgccctttgtttgcactattggacttaggagtgccgagggtggggagatggagctgcctgactcagtgtgtgagtgtgtgtgcgtgcatgtgtgtgtgtgtgtgtgtgtatgtgtctgtctgcctgtctctctcctcctggacccagggcagccaagggcagggataggtgcagtggtcagatgaagcagtgccagagaggggacctcccagctcttatttgcaccctccccacctcaccaactttggtccctctctgggggcatgaatggttaacaaacaccagagcagtactccaatattggagagtcactgggggcacagggctttgaatcagggtagtatcctgccttccctcccctgaccccacatggtctcagggcccccttagggccccctaccccactgatagcttcctccttctctggcacaaggggagccccagggcttgggggagggcgtaaggtggggggaaatgccacagcttttagcaaaagcctccctcccagaattagccagcttgcctcctgcaccccacccccaccaaccaggggagccactaagctgactaacaactgtcccctcacccaccagctatttccccagtgtagagtgggcaattctcaccttcaaagagtccccacctgcccaggcctttggcacagaggctgagtggacagtcaggagagaggcgagaggcaaggcgaagccgatgtccctgtttcagttgcactggggttggagcccagggtaggggtttccagcttccccaggctccggccttgtcagtctctttgcatgtgtggatttttctgtgtgtttctgtttgggtttttgttgttgggtattttttttttttttaataaagaaaagaagatgtgtatatttttggcaacgac

SEQ ID NO: 2565 - DNA, 1277 bp, Homo sapiens
caagagtctaggtaagagtttgttcccgtggtgcggagggtcaaggcccacacccggaaacctagcgaggtaaagttgcgtcttggttgtagagacgacaacttctccgcttcctcggcgatggcggcgtccgggagcggtatggcccagaaaacctgggaactggccaacaacatgcaggaagctcagagtatcgatgaaatctacaaatacgacaagaaacagcagcaagaaatcctggcggcgaaccttgggactaaggatcaccattactttaagtactgcaaaatctcagcattggctcttctgaagatggtgatgcatgccagatcgggaggcaatttggaagtgatgggtctgatgctaggaaaggtggatggtgaaaccatgatcattatggacagttttgctttgcctgtggagggcactgaaacccgagtaaatgctcaggctgctgcatatgaatacatggctgcatacatagaaaatgcaaaacaggttggccgccttgaaaatgcaatcgggtggtatcatagccaccctggctatggctgctggctttctgggattgatgttagtactcagatgctcaatcagcagttccaggaaccatttgtagcagtggtgattgatccaacaagaacaatatccgcagggaaagtgaatcttggcgcctttaggacatacccaaagggctacaaacctcctgatgaaggaccttctgagtaccagactattccacttaataaaatagaagattttggtgtacactgcaaacaatattatgccttagaagtctcatatttcaaatcctctttggatcgcaaattgcttgagctgttgtggaataaatactgggtgaatacgttgagttcttctagcttgcttactaatgcagactataccactggtcaggtctttgatttgtctgaaaagttagagcagtcagaagcccagctgggacgagggagtttcatgttgggtttagaaacgcatgaccgaaaatcagaagacaaacttgccaaagctacaagagacagctgtaaaactaccatagaagctatccatggattgatgtctcaggttattaaggataaactgtttaatcaaattaacatctcttaaacagtctctgagaagtactttacctgaaagacagtatgagaaaaatattcaagtaacactttaaaaccagttacccaaaatctgattagaagtataaggtgctctgaagtgtcctaaatattaatatcctgtaataaagctctttaaaatga

SEQ ID NO: 2566 - protein, 334 aa, Homo sapiens
MAASGSGMAQKTWELANNMQEAQSIDEIYKYDKKQQQEILAANLGTKDHHYFKYCKISALALLKMVMHARSGGNLEVMGLMLGKVDGETMIIMDSFALPVEGTETRVNAQAAAYEYMAAYIENAKQVGRLENAIGWYHSHPGYGCWLSGIDVSTQMLNQQFQEPFVAVVIDPTRTISAGKVNLGAFRTYPKGYKPPDEGPSEYQTIPLNKIEDFGVHCKQYYALEVSYFKSSLDRKLLELLWNKYWVNTLSSSSLLTNADYTTGQVFDLSEKLEQSEAQLGRGSFMLGLETHDRKSEDKLAKATRDSCKTTIEAIHGLMSQVIKDKLFNQINIS

SEQ ID NO: 2567 - DNA, 2722 bp, Homo sapiens
ggcacgagggggaggcggcggcgagtcggtgagcagctgggaagagcagaaccggggcggagcacctgcaggcgcgggcggcggccccaccatggcgattcgcaagaaaagcaccaagagccccccagtgctgagccacgaattcgtcctgcagaatcacgcggacatcgtctcctgtgtggcgatggtcttcctgctggggctcatgtttgagataacggcaaaagcttctatcatttttgttactcttcagtacaatgtcaccctcccagcaacagaagaacaagctactgaatcagtgtccctttattactatggcatcaaagatttggctactgttttcttctacatgctagtggcgataattattcatgccgtaattcaagagtatatgttggataaaattaacaggcgaatgcacttctccaaaacaaaacacagcaagtttaatgaatctggtcagcttagtgcgttctacctttttgcctgtgtttggggcacattcattctcatctctgaaaactacatctcagacccaactatcttatggagggcttatccccataacctgatgacatttcaaatgaagtttttctacatatcacagctggcttactggcttcatgcttttcctgaactctacttccagaaaaccaaaaaagaagatattcctcgtcagcttgtctacattggtctttacctcttccacattgctggagcttaccttttgaacttgaatcatctaggacttgttcttctggtgctacattattttgttgaatttcttttccacatttcccgcctgttttattttagcaatgaaaagtatcagaaaggattttctctgtgggcagttctttttgttttgggaagacttctgactttaattctttcagtactgactgttggttttggccttgcaagagcagaaaatcagaagctggatttcagtactggaaacttcaatgtgttagctgttagaatcgctgttctggcatccatttgcgttactcaggcatttatgatgtggaagttcattaattttcagcttcgaaggtggagggaacattctgcttttcaggcaccagctgtgaagaagaaaccaacagtaactaaaggcagatcttctaaaaaaggaacagaaaatggtgtgaatggaacattaacttcaaatgtagcagactctccccggaataaaaaagagaaatcttcataatgaattataaactaattgattaatgtccccaaagaaatctgctttctactatatctttcagcattagagatttttctgttcttgaaaatacagtctgtgctctttgatttttgctattgtacggtttcatgcatttttttaaagggcatttgaggggaggattattgctatgaatgaaaaaaatattttagcttagactaagctacctgccttcaaaatagtttagggaccaccaccatattttattttgtttttatttttgaacatttttctaatgatttggagagaaaactatttacaaaaattccacatatcagtgatacaatttcttgctgtcaccaattttttataatagcagagtggcctgttctaagaaggccatattttttaagttatctttcagggtaacatggaaatactataaagttggatgtcaaactttaatatgttttcagtgttctctaattttttggaatttttgtagactttacacctggaaaaaaagatttgtaaaatcaccggaacaattgtgtgctttattttataggtagtggttattagtattacatccccattttaaaaacaaaaacataataatggttacaacacgtggagttttactaacatacatattaaatcaaagtatattcttaaaagtacttgtgaagtaaaatctttcttgtgcattttcaatacttgtaaactggaaatcagaaaatatttactatgaacaggaaaatctgacatatagccctttttgatatgtttattaataatgattcttaatggggctcataataagtttaatatgcacagcatcttagaaaagtttaacctgcaaacacttttaaaacataatgcctacttgatttatatctataaaaagactgacaggtaattatatttggaaaacatttaatgcactaactttaaagaaattgaaaattcaggtggataaatagtcttacaaaagacaatgtgctttatgttatacctatagctttggtcccatctttaattgagaaacatttatctgtataaaacatatttttggataaatatatatatatatatttgtatcgctacagaaaggctctaaaaagcatttgaggaaaatatttggttcccttttctataatcatcctttaagattcttatagctacatttggtttattcatcatatttacagtatatatattgttcttttcagtgttcacatcttgttccccatttctcacttgtgtcaccagctgtttgtgccatttttagtgtaaaagttgcagacctattagatctgcagtttaagttgccatgctgctaggaaattgtcctttttctttctagctgttaacctacttcctggaaaaagtagtagctctctgtagcattatggagtttcagtggaaccaaatttttgccattaaaaactggcattatactgaactatacattgagaaatcaatcaaaataaaaatttttactttcacaaaaaaaaaaaaaaaaaa

SEQ ID NO: 2568 - protein, 374 aa, Homo sapiens
MAIRKKSTKSPPVLSHEFVLQNHADIVSCVAMVFLLGLMFEITAKASIIFVTLQYNVTLPATEEQATESVSLYYYGIKDLATVFFYMLVAIIIHAVIQEYMLDKINRRMHFSKTKHSKFNESGQLSAFYLFACVWGTFILISENYISDPTILWRAYPHNLMTFQMKFFYISQLAYWLHAFPELYFQKTKKEDIPRQLVYIGLYLFHIAGAYLLNLNHLGLVLLVLHYFVEFLFHISRLFYFSNEKYQKGFSLWAVLFVLGRLLTLILSVLTVGFGLARAENQKLDFSTGNFNVLAVRIAVLASICVTQAFMMWKFINFQLRRWREHSAFQAPAVKKKPTVTKGRSSKKGTENGVNGTLTSNVADSPRNKKEKSS

SEQ ID NO: 2569 - DNA, 838 bp, Homo sapiens
cctctttttccggctggaaccatggagggtgtagaagagaagaagaaggaggttcctgctgtgccagaaacccttaagaaaaagcgaaggaatttcgcagagctgaagatcaagcgcctgagaaagaagtttgcccaaaagatgcttcgaaaggcaaggaggaagcttatctatgaaaaagcaaagcactatcacaaggaatataggcagatgtacagaactgaaattcgaatggcgaggatggcaagaaaagctggcaacttctatgtacctgcagaacccaaattggcgtttgtcatcagaatcagaggtatcaatggagtgagcccaaaggttcgaaaggtgttgcagcttcttcgccttcgtcaaatcttcaatggaacctttgtgaagctcaacaaggcttcgattaacatgctgaggattgtagagccatatattgcatgggggtaccccaatctgaagtcagtaaatgaactaatctacaagcgtggttatggcaaaatcaataagaagcgaattgctttgacagataacgctttgattgctcgatctcttggtaaatacggcatcatctgcatggaggatttgattcatgagatctatactgttggaaaacgcttcaaagaggcaaataacttcctgtggcccttcaaattgtcttctccacgaggtggaatgaagaaaaagaccacccattttgtagaaggtggagatgctggcaacagggaggaccagatcaacaggcttattagaagaatgaactaaggtgtctaccatgattatttttctaagctggttggttaataaacagtacctgctctcaaattgaaaaaaa

SEQ ID NO: 2570 - protein, 248 aa, Homo sapiens
MEGVEEKKKEVPAVPETLKKKRRNFAELKIKRLRKKFAQKMLRKARRKLIYEKAKHYHKEYRQMYRTEIRMARMARKAGNFYVPAEPKLAFVIRIRGINGVSPKVRKVLQLLRLRQIFNGTFVKLNKASINMLRIVEPYIAWGYPNLKSVNELIYKRGYGKINKKRIALTDNALIARSLGKYGIICMEDLIHEIYTVGKRFKEANNFLWPFKLSSPRGGMKKKTTHFVEGGDAGNREDQINRLIRRMN

SEQ ID NO: 2571 - DNA, 1218 bp, Homo sapiens
ctcgcgccagcagtttttggctttcaccccccatcagtgaccaaagacttgaccactcaaagtccagctccccagaacactgctcgacatggaaaccagtgtgattgaaggtggattaaatatcactctcaccatccgactacttatgcatggaaaggaagttggcagtatcatcggaaagaaaggagaatcagttaagaagatgcgcgaggagagtggtgcacctatcaacatctcagaagggaattgtcctgagagaattatcacttttgctggacctgctaatgccgtcttcaaaggctttgctatgatcattgacaaactggaagaggacataagcagctctatgaccagtagcacagctgccagtagacccccagtcaccctgaggctggtggtccctgctagtcagtgtggctctctcattggaaaaggtggttgcaagatcaaggaaatacgagagagtacaggggctcaggtctagatggcaggggatatgctacccaactcaactgagcaggccatcactattgctggcatcccacaatccatcattgagtgtgtcaaacagatctgtgtggtcatgttggagtcccccccgaagggcgtgaccatcccgtaccagctcaagccttccagctctccggtcatctttgcaggcggtcaggcctatacccttcaaggacagtttgccattccacagccagatttgaccatgctgcaccagttggcaatgcaacagtctcattttcccatgacgcatggcaacactggattcagtgcaggtttggatacatctgctcagactacttctcatgaacttaccattccaaacgatttgattggctgcataatcgggcgtcaaggcgccaaaataaatgagatccgtcagatgtctggggcacagatcaaaattgcgaacccagtggaaggatctactgataggcaggttaccatcactggatctgctgccagcattagcctggctcaatatctaatcaatgtcaggctttcctcggagacgggtggcatggggagcagctagaacaatgcagatttatccacaatccctttctgctgttcaccaccacccatgatccatctgtgtagtttctgaacagtcagcgatttcaggttttaaatagtttgtaaattttcagtttctacacactttatcatccactcgtgattttttacttaaagtgttttaattccttt

SEQ ID NO: 2572 - DNA, 864 bp, Homo sapiens
cccggccggccgcccatagccagccgtccgtcacctcttcaccgccccctcagaccgccccaaggtccccccgccgccgctccagcgccgccgctgcagccgcctctctttagtcgccgccatggcgaccccgtccacctcgcaggagcgccaggactacaaccaggactcagaggccgccatcaaccgccacatcaacctggagctctgcgcctcctacttttacctgtccatgtcttatactttgaccgcgatgatgtggctttgaagaactttgccaaatactttctttaccaatctcatgaggagagggaacatgctgagaaactgatgaagctgcagaaccaacgaggtggccgaatcttccttcaggatatcaagaaaccagactgtgatgactgggagagcgggctgaatgcgatggagtgtgcattatatttggaaaaaaatgtgaatcagtcactactggaactgtacaaactggccactgacaaaaatgacccccatttgtgtgacttcattgagacacattacctgaatgagcaggtgaaagccatcaaagaattgagtgaccacgtgaccaacttgcgcaagatgggagcgcccgaatctggctcggcagaatatctcttcgacaagcacaccctgggagacagtgataatgaaagctaagtctcaggctaatttccccatagccgtggggtgccttccttggtcaccaaggcagtgcgtgcacgttagggtttcctttaccttttctataagttgtaccaaaacatccacttaagttctttgatttgtaccattccttcaaataaagaaatttggtaccaaaataattaataaataaaaaattaaaaaaaa

SEQ ID NO: 2573 - protein, 113 aa, Homo sapiens
MKLQNQRGGRIFLQDIKKPDCDDWESGLNAMECALYLEKNVNQSLLELYKLATDKNDPHLCDFIETHYLNEQVKAIKELSDHVTNLRKMGAPESGSAEYLFDKHTLGDSDNES

SEQ ID NO: 2574 - DNA, 631 bp, Homo sapiens
ccgccgctgcagccgcctctctttagtcgccgccatggcgaccccgtccacctcgcaggagcgccaggactacaaccaggactcagaggccgccatcaaccgccacatcaacctggagctctgcgcctcctacttttacctgtccatgtcttatactttgaccgcgatgatgtggctttgaagaactttgccaaatactttctttaccaatctcatgaggagagggaacatgctgagaaactgatgaagctgcagaaccaacgaggtggccgaatcttccttcaggatatcaagaaaccagactgtgatgactgggagagcgggctgaatgcgatggagtgtgcattatatttggaaaaaaatgtgaatcagtcactactggaactgtacaaactggccactgacatgaaagccatcaaagaattgagtgaccacgtgaccaacttgcgcaagatgggagcgcccgaatctggctcggcagaatatctcttcgacaagcacaccctgggagacagtgataatgaaagctaagtctcaggctaatttccccatagccgtggggtgccttccttggtcaccaaggcagtgcgtgcacgttagggtttcctttaccttttctataagttgtacc

SEQ ID NO: 2575 - DNA, 662 bp, Homo sapiens
accgccgacgcagacccctctctgcacgccagcccgcccgcacccaccatggccacagttcagcagctggaaggaagatggcgcctggtggacagcaaaggctttgatgaatacatgaaggagctaggagtgggaatagctttgcgaaaaatgggcgcaatggccaagccagattgtatcatcacttgtgatggtaaaaacctcaccataaaaactgagagcactttgaaaacaacacagttttcttgtaccctgggagagaagtttgaagaaaccacagctgatggcagaaaaactcagactgtctgcaactttacagatggtgcattggttcagcatcaggagtgggatgggaaggaaagcacaataacaagaaaattgaaagatgggaaattagtggtggagtgtgtcatgaacaatgtcacctgtactcggatctatgaaaaagtagaataaaaattccatcatcactttggacaggagttaattaagagaatgaccaagctcagttcaatgagcaaatctccatactgtttctttcttttttttttcattactgtgttcaattatctttatcataaacattttacatgcagctatttcaaagtgtgttggattaattaggatcatccctttggttaataaataaatgtgtttgtgct

SEQ ID NO: 2576 - protein, 135 aa, Homo sapiens
MATVQQLEGRWRLVDSKGFDEYMKELGVGIALRKMGAMAKPDCIITCDGKNLTIKTESTLKTTQFSCTLGEKFEETTADGRKTQTVCNFTDGALVQHQEWDGKESTITRKLKDGKLVVECVMNNVTCTRIYEKVE

SEQ ID NO: 2577 - DNA, 1023 bp, Homo sapiens
gctacctacagaggggtccatacggcgttgttctggattcccgtcgtaacttaaagggaaactttcacaatgtccggagcccttgatgtcctgcaaatgaaggaggaggatgtccttaagttccttgcagcaggaacccacttaggtggcaccaatcttgacttccagatggaacagtacatctataaaaggaaaagtgatggtatctacatcataaatctgaagaggacctgggagaagcttctgctggcagctcgtgccattgttgccattgaaaaccctgctgatgtcagtgttatatcatccaggaatactggccagagggctgtgctgaagtttgctgctgccactggagccactccaattgctggctgcttcactcctggaactttcactaaccagatccaggcagccttccaggagccacgacttcttgtggttactgaccccagggctgaccaccagcctttcacggaggcatcttatgttaacctacctaccattgctctgtgtaacacagattctcctctgcgctatgtgcacattgccatcccatgcaacaacaagggagctcactcagtgggtttgatgtggtggatgctggcttgggaagttctgtgcatgcgtggcaccatttcccgtgaacacccgtgggaggtcatgcctgatttctgcttctacagagatcctgaagagattgaaaaagaagagcagcctgctgctgaaaaggctgtgaccaaggaggaatttcagggtgaaaggactgctccagctcctgagttcactgctactcagcctgaggttgcagactggtctgaaggtgtgcaggtgccctctgtgcctattcagcagttccctactgaagactgcagcgctcagcctgccacggaagactggtctgcagctcccactgcccaggccactgaatgggtaggagcaaccactgaatggtcttaagctgttcttgcataggctcttaagcaatatggaaaaatggtggatggaaaataaacatcagtttct

SEQ ID NO: 2578 - protein, 295 aa, Homo sapiens
MSGALDVLQMKEEDVLKFLAAGTHLGGTNLDFQMEQYIYKRKSDGIYIINLKRTWEKLLLAARAIVAIENPADVSVISSRNTGQRAVLKFAAATGATPIAGCFTPGTFTNQIQAAFQEPRLLVVTDPRADHQPFTEASYVNLPTIALCNTDSPLRYVHIAIPCNNKGAHSVGLMWWMLAWEVLCMRGTISREHPWEVMPDFCFYRDPEEIEKEEQPAAEKAVTKEEFQGERTAPAPEFTATQPEVADWSEGVQVPSVPIQQFPTEDCSAQPATEDWSAAPTAQATEWVGATTEWS

SEQ ID NO: 2579 - DNA, 1468 bp, Homo sapiens
tggatgcagctatgaatgcaaggccacacaaggtggatggaagagttgtggaaccaaagagagccgtctcaagagaagattctcaaagaccaggtgcccacttaactgtgaaaaagatatttgttggtggcattaaagaagacactgaagaacatcacctaagagattattttgaacagtatggaaaaattgaagtgattgaaatcatgagtgaccgaggcagtggcaagaaaaggggctttgcctttgtaacctttgacgaccatgactccgtggataagattgtcattcagaaataccatactgtgaatggccacaactgtgaagttacaaaagccctgtcaaagcaagagatggctagtgcttcatccagccaaagaggtcgaagtggttctggaaactttggtggtggtcgtggaggtggtttcagtgggaacgacaactttggtcatggaggaaacttcagtggtcatggtggctttggtggcagccatggtggtggtggatatggtggcaatggggatggctataatggatttggtaatgatggaagcaattttggaggtggtggaagctacaaggattttggcaattacaacaatcagtcttcaaattttggacccatgaagggaggaaattttggaggcagaagctctggcccccatggtggtggaggccagtactttgcaaaaccacgaaaccaaggtggctatggcggttccagcagcagcagtagctatggcagtggcagaagattttaattaggaaacaaagctcagcaggagaggagagccagagaagtaacagggaagctacaggttacaacagatttgtgaactcagccaagcacagtggtggcagggcctagctgctacaaagaagacatgttttagacaaatactcatgtgtatgggcaaaaaactcgaggactgtatttgtgactaattgtataacaggttattttagtttctgttctgtggaaagtgtaaagcattccaacaaagggttttaatgtagatttttttttgcacccatgctgttgattgctaaatgtaatagtctgatcgtgacactgaataaatgtctttttttttaatgtgctgtgtaaagttagtctactctgaagccatcttggtaaatttccccaacagtgtgaagttagaattccttcagggtgatgccaggttctatttggaatttatatacaacctgcttgggtgaagaagccattgtcttcggaaaccttggtgtagttgaactgatagttactgttgtgacctgaagttcaccattaaaagggattatccaagcaaaatcatggaattattggttataaaagtgattgttggtacatcctatgcaatatatctaaattgaataatggtaccagataaaattatagatgggaatgaagcttgtgtatcatccattatcgtatgtaatcaataaacgatttaattctcttgaa

SEQ ID NO: 2580 - protein, 249 aa, Homo sapiens
MNARPHKVDGRVVEPKRAVSREDSQRPGAHLTVKKIFVGGIKEDTEEHHLRDYFEQYGKIEVIEIMSDRGSGKKRGFAFVTFDDHDSVDKIVIQKYHTVNGHNCEVTKALSKQEMASASSSQRGRSGSGNFGGGRGGGFSGNDNFGHGGNFSGHGGFGGSHGGGGYGGNGDGYNGFGNDGSNFGGGGSYKDFGNYNNQSSNFGPMKGGNFGGRSSGPHGGGGQYFAKPRNQGGYGGSSSSSSYGSGRRF

SEQ ID NO: 2581 - DNA, 598 bp, Homo sapiens
aaagatatttgttggtggcattaaagaagacactgaagaacatcacctaagagattattttgaacagtatggaaaaattgaagtgattgaaatcatgagtgaccgaggcagtggcaagaaaaggggctttgcctttgtaacctttgacgaccatgactccgtggataagattgtcattcagaaataccatactgtgaatggccacaactgtgaagttacaaaagccctgtcaaagcaagagatggctagtgcttcatccagccaaagaggtcgaagtggttctggaaactttggtggtggtcgtggaggtggtttcagtgggaacgacaactttggtcatggaggaaacttcagtggtcatggtggctttggtggcagccatggtggtggtggatatggtggcaatggggatggctataatggatttggtaatgatggaagcaattttggaggtggtggaagctacaaggattttggcaattacaacaatcagtcttcaaattttggacccatgaagggaggaaattttggaggcagaagctctggcccccatggtggtggaggccagtactttgcaaagcagaagattttaattagg

SEQ ID NO: 2582 - DNA, 672 bp, Homo sapiens
tggatgcagctatgaatgcaaggccacacaaggtggatggaagagttgtggaaccaaagagagccgtctcaagagaagattctcaaagaccaggtgcccacttaactgtgaaaaagatatttgttggtggcattaaagaagacactgaagaacatcacctaagagattattttgaacagtatggaaaaattgaagtgattgaaatcatgagtgaccgaggcagtggcaagaaaaggggctttgcctttgtaacctttgacgaccatgactccgtggataagattgtcattcagaaataccatactgtgaatggccacaactgtgaagttacaaaagccctgtcaaagcaagagatggctagtgcttcatccagccaaagaggtcgaagtggttctggaaactttggtggtggtcgtggaggtggtttcagtgggaacgacaactttggtcatggaggaaacttcagtggtcatggtggggatggctataatggatttggtaatgatggaagcaattttggaggtggtggaagctacaaggattttggcaattacaacaatcagtcttcaaattttggacccatgaagggaggaaattttggaggcagaagctctggcccccatggtggtggaggccagtactttgcaaaaccacgaaaccaaggtggctatg

SEQ ID NO: 2583 - DNA, 943 bp, Homo sapiens
ggtagcagccatttaactgatgtctttttgtatgattgttcatcacttaataaaggatgaattcagttaatggagaatcatcctcatttgcaccaactgataatgcgtctgtcacgggtactccagtagtgtctgaagaaaatgccttgtctccaaattgcactagtactactgttgaagatcctccagttcaagaaatactgacttcctcagaaaacaatgaatgtattccttctaccagtgcagaattggaatctgaagctagaagtatattagagcctgacacctctaattctagaagtagttctgcttttgaagcagccaaatcaagacagccagatgggtgtatggatcctgtacggcagcagtctgggaatgccaacacagaaaccttgccatcagggtgggaacaaagaaaagatcctcatggtagaacctattatgtggatcataatactcgaactaccacatgggagagaccacaacctttacctccaggttgggaaagaagagttgatgatcgtagaagagtttattatgtggatcataacaccagaacaacaacgtggcagcggcctaccatggaatctgtccgaaattttgaacagtggcaatctcagcggaaccaattgcagggagctatgcaacagtttaaccaacgatacctctattcggcttcaatgttagctgcagaaaatgacccttatggacctttgccaccaggctgggaaaaaagagtggattcaacagacagggtttactttgtgaatcataacacaaaaacaacccagtgggaagatccaagaactcaaggcttacagaatgaagaacccctgccagaaggctgggaaattagatatactcgtgaaggtgtaaggtactttgttgatcataacacaagaacaacaacattcaaagatcctcgcaatgggaagtcatctgt

SEQ ID NO: 2584 - DNA, 2737 bp, Homo sapiens
agagtccgcgccctgcgtccgcgaccaggaggatcggaccttcgccttcgctgtcgccgccgccgccgcccgcggccgtcggggctattagtgaaagatggtggatcgcttggcaaacagtgaagcaaatactagacgtataagtatagtggaaaactgttttggagcagctggtcaacctttaactatacctggacgagttcttattggagaaggagtattgactaagttgtgcaggaaaaagcccaaagcaaggcagtttttcttgtttaatgatattcttgtatatggcaatattgtcatccagaagaaaaaatataacaaacaacatattattcccctggaaaatgtcactattgattccatcaaagatgagggagacttaaggaatggatggctaatcaagacaccaactaaatcttttgcagtttatgctgccactgctacggagaaatcagaatggatgaatcatataaataaatgtgttactgatttactctccaaaagtgggaagacacccagtaatgaacatgctgctgtctgggttcctgactctgaggcaactgtatgtatgcgttgtcagaaagcaaaattcacacctgttaatcgtcgccaccattgccgcaaatgtggttttgttgtctgtgggccctgctctgaaaagagatttcttcttcccagccagtcctctaagcctgtgcggatttgtgacttctgctatgacctgctttctgctggggacatggccacatgccagcctgctagatcagactcttacagccagtcattgaagtctcctttaaatgatatgtctgatgatgatgacgatgatgatagcagtgactaaggacacatttgggagtatttaatcaggtgtggctatctgagaaatcaactttgggggaaatgtaagattctgagctctctctctgttttgttctagccatgaatttgcctgagaaacttgtaacctatgtgcctcaatatattccatagaaagtaggtccccctgccttctcccactcctcacactcttctacagggataggcttttgcaaatatatcagataaattttttgtttcttgtttatttttaggttattttcttggaaggttgggaaaagatgtttgttttaacaggtcatgtactacgttgttgttttcatttctgttataagtaaaactaaaagcacagaatggtgggaaaggggctataatgtggttcattaataatgttagcagcttttttctaaccatcctgtctaatggttaagacaccagtaacaaaaacacatgatttggaaatactttggctttttcatatacctagtggtgccttatcataatagcactgttacatgaaataagcccctaccttcttactttctggtttgttgaaaaaatacactggtgctctttgaagtgataaaatgagtgtttatgaatgggtgtaattaggaaatacttctcatctgacagctacaaataactaagtttggaggtattttcactctatatgaataaatatttttccataaaatagttgtgattatatttttgttttatataggtcccaaattataattgtcaaatatatattttaaattaataaaagttgtcattcttaggaatttggtttgaaatttatcagttatacagaattgtcatactgcattagcttctacctttagtaagacatattttttaggtataaattcttatgctttaacattatttctggattgaaaatcttataaaacccttgaaaataaacagtctcttttttacaaagcctgtgttagagcacagatttacctaggcttgaagatttggaagaaataatatgtaagaatggcctcaaggcagaccactttaagtttggctagacttcatatcgtggaagtattgtctatttcagtgtgaaactatcttgaatttgcaaatatagtgttatattttataaagttttgtaaaatcccaaacaatatttctatttttgtaaaacaattgtatgtataatctgtatttgaaatcattttgcaatctatggaaatagagtagcaattgctatttctaaattgtgaactttaagtcaatctagatttattttgagaagtaattgttcactctttacttttgaggcagccattaggttgaaagtatatatttatcatataaaacttgatgcgttttgcactactctttccatttatatgctgcaaacaactacagtctttgaaatatggaaaatcagcagtctaaagtttgttttaaattctaaatttaaaaaatcttcaaatctgaatataccgcaaatgtcatgagaagtttgattcagtaacttgtgatggaggattctttggtatcttactgtttggttaaggcactaattttacttacctattagattttgaaagtatctgagatatacaaatctccctgtaggaaatgtgaaagaaaagcacaacaaaactagggttttttgttcatttgcttgcttttatgattttttttggtttgttttaatatcaggtggatttttgtttctaagcaatatatacataaaatcaaccaacatatctgaaaaggatcatgaaacctgagaaatgctaatggagatttgctggtacataggaatctagcaaattcaggaaccaaggggaaatgttgtgagataacatttacattgtcaacctttattgactttgtttttacaataaaaaatattttacaactt

SEQ ID NO: 2585 - protein, 249 aa, Homo sapiens
MVDRLANSEANTRRISIVENCFGAAGQPLTIPGRVLIGEGVLTKLCRKKPKARQFFLFNDILVYGNIVIQKKKYNKQHIIPLENVTIDSIKDEGDLRNGWLIKTPTKSFAVYAATATEKSEWMNHINKCVTDLLSKSGKTPSNEHAAVWVPDSEATVCMRCQKAKFTPVNRRHHCRKCGFVVCGPCSEKRFLLPSQSSKPVRICDFCYDLLSAGDMATCQPARSDSYSQSLKSPLNDMSDDDDDDDSSD

SEQ ID NO: 2586 - DNA, 1873 bp, Homo sapiens
ggcgggctccaggcgaggcggtcgacgctcctgaaaacttgcgcgcgcgctcgcgccactgcgcccggagcgatgaagatggtcgcgccctggacgcggttctactccaacagctgctgcttgtgctgccatgtccgcaccggcaccatcctgctcggcgtctggtatctgatcatcaatgctgtggtactgttgattttattgagtgccctggctgatccggatcagtataacttttcaagttctgaactgggaggtgactttgagttcatggatgatgccaacatgtgcattgccattgcgatttctcttctcatgatcctgatatgtgctatggctacttacggagcgtacaagcaacgcgcagcctggatcatcccattcttctgttaccagatctttgactttgccctgaacatgttggttgcaatcactgtgcttatttatccaaactccattcaggaatacatacggcaactgcctcctaattttccctacagagatgatgtcatgtcagtgaatcctacctgtttggtccttattattcttctgtttattagcattatcttgacttttaagggttacttgattagctgtgtttggaactgctaccgatacatcaatggtaggaactcctctgatgtcctggtttatgttaccagcaatgacactacggtgctgctacccccgtatgatgatgccactgtgaatggtgctgccaaggagccaccgccaccttacgtgtctgcctaagccttcaagtgggcggagctgagggcagcagcttgactttgcagacatctgagcaatagttctgttatttcacttttgccatgagcctctctgagcttgtttgttgctgaaatgctactttttaaaatttagatgttagattgaaaactgtagttttcaacatatgctttgctggaacactgtgatagattaactgtagaattcttcctgtacgattggggatataatgggcttcactaaccttccctaggcattgaaacttcccccaaatctgatggacctagaagtctgcttttgtacctgctgggccccaaagttgggcatttttctctctgttccctctcttttgaaaatgtaaaataaaaccaaaaatagacaactttttcttcagccattccagcatagagaacaaaaccttatggaaacaggaatgtcaattgtgtaatcattgttctaattaggtaaatagaagtccttatgtatgtgttacaagaatttcccccacaacatcctttatgactgaagttcaatgacagtttgtgtttggtggtaaaggattttctccatggcctgaattaagaccattagaaagcaccaggccgtgggagcagtgaccatctgctgactgttcttgtggatcttgtgtccagggacatggggtgacatgcctcgtatgtgttagagggtggaatggatgtgtttggcgctgcatgggatctggtgcccctcttctcctggattcacatccccacccagggcccgcttttactaagtgttctgccctagattggttcaaggaggtcatccaactgactttatcaagtggaattgggatatatttgatatacttctgcctaacaacatggaaaagggttttcttttccctgcaagctacatcctactgctttgaacttccaagtatgtctagtcaccttttaaaatgtaaacattttcagaaaaatgaggattgccttccttgtatgcgctttttaccttgactacctgaattgcaagggatttttatatattcatatgttacaaagtcagcaactctcctgttggttcattattgaatgtgctgtaaattaagttgtttgcaattaaaacaaggtttgcccac

SEQ ID NO: 2587 - protein, 226 aa, Homo sapiens
MKMVAPWTRFYSNSCCLCCHVRTGTILLGVWYLIINAVVLLILLSALADPDQYNFSSSELGGDFEFMDDANMCIAIAISLLMILICAMATYGAYKQRAAWIIPFFCYQIFDFALNMLVAITVLIYPNSIQEYIRQLPPNFPYRDDVMSVNPTCLVLIILLFISIILTFKGYLISCVWNCYRYINGRNSSDVLVYVTSNDTTVLLPPYDDATVNGAAKEPPPPYVSA

SEQ ID NO: 2588 - DNA, 524 bp, Rattus norvegicus
cctttctcgttccccggccatcttagcggctgctgttggttgggggccgtcccgctcctaaggcaggaagatggtggccgcaaagaagacgaaaaagtcgctggagtcgatcaactctaggctccaactcgttatgaaaagtgggaagtacgtcctggggtacaagcagactctgaagatgatcagacaaggcaaagcgaaattggtcattctcgctaacaactgcccagctttgaggaaatctgaaatagagtactatgctatgttggctaaaactggtgtccatcactacagtggcaataatattgaactgggcacagcatgcggaaaatactacagagtgtgcacactggctatcattgatccaggtgactctgacatcattagaagcatgccagaacagactggtgaaaagtaaaccttttcacctacaaaatttcacctgcaaaccttaaacctgcaaaattttcctttaataaaatttgcttgttttaaaaacattgtaaaaaaaaaaaaaaaaaaaa

SEQ ID NO: 2589 - protein, 115 aa, Rattus norvegicus [sequence omitted]

SEQ ID NO: 2590 - DNA, 2834 bp, Homo sapiens
gcccactcccaccgccagctggaaccctggggactacgacgtccctcaaaccttgcttctaggagataaaaagaacatccagtcatggataaaaatgagctggttcagaaggccaaactggccgagcaggctgagcgatatgatgacatggcagcctgcatgaagtctgtaactgagcaaggagctgaattatccaatgaggagaggaatcttctctcagttgcttataaaaatgttgtaggagcccgtaggtcatcttggagggtcgtctcaagtattgaacaaaagacggaaggtgctgagaaaaaacagcagatggctcgagaatacagagagaaaattgagacggagctaagagatatctgcaatgatgtactgtctcttttggaaaagttcttgatccccaatgcttcacaagcagagagcaaagtcttctatttgaaaatgaaaggagattactaccgttacttggctgaggttgccgctggtgatgacaagaaagggattgtcgatcagtcacaacaagcataccaagaagcttttgaaatcagcaaaaaggaaatgcaaccaacacatcctatcagactgggtctggcccttaacttctctgtgttctattatgagattctgaactccccagagaaagcctgctctcttgcaaagacagcttttgatgaagccattgctgaacttgatacattaagtgaagagtcatacaaagacagcacgctaataatgcaattactgagagacaacttgacattgtggacatcggatacccaaggagacgaagctgaagcaggagaaggaggggaaaattaaccggccttccaacttttgtctgcctcattctaaaatttacacagtagaccatttgtcatccatgctgtcccacaaatagttttttgtttacgatttatgacaggtttatgttacttctatttgaatttctatatttcccatgtggtttttatgtttaatattaggggagtagagccagttaacatttagggagttatctgttttcatcttgaggtggccaatatggggatgtggaatttttatacaagttataagtgtttggcatagtacttttggtacattgtggcttcaaaagggccagtgtaaaactgcttccatgtctaagcaaagaaaactgcctacatactggtttgtcctggcggggaataaaagggatcattggttccagtcacaggtgtagtaattgtgggtactttaaggtttggagcacttacaaggctgtggtagaatcataccccatggataccacatattaaaccatgtatatctgtggaatactcaatgtgtacacctttgactacagctgcagaagtgttcctttagacaaagttgtgacccattttactctggataagggcagaaacggttcacattccattatttgtaaagttacctgctgttagctttcattatttttgctacactcattttatttgtatttaaatgttttaggcaacctaagaacaaatgtaaaagtaaagatgcaggaaaaatgaattgcttggtattcattacttcatgtatatcaagcacagcagtaaaacaaaaacccatgtatttaacttttttttaggatttttgcttttgtgattttttttttttttttttgatacttgcctaacatgcatgtgctgtaaaaatagttaacagggaaataacttgagatgatggctagctttgtttaatgtcttatgaaattttcatgaacaatccaagcataattgttaagaacacgtgtattaaattcatgtaagtggaataaaagttttatgaatggacttttcaactactttctctacagcttttcatgtaaattagtcttggttctgaaacttctctaaaggaaattgtacattttttgaaatttattccttattccctcttggcagctaatgggctcttaccaagtttaaacacaaaatttatcataacaaaaatactactaatataactactgtttccatgtcccatgatcccctctcttcctccccaccctgaaaaaaatgagttcctattttttctgggagagggggggattgattagaaaaaaatgtagtgtgttccatttaaaattttggcatatggcattttctaacttaggaagccacaatgttcttggcccatcatgacattgggtagcattaactgtaagttttgtgcttccaaatcactttttggtttttaagaatttcttgatactcttatagcctgccttcaattttgatcctttattctttctatttgtcaggtgcacaagattaccttcctgttttagccttctgtcttgtcaccaaccattcttacttggtggccatgtacttggaaaaaggccgcatgatctttctggctccactcagtgtctaaggcaccctgcttcctttgcttgcatcccacagactatttccctcatcctatttactgcagcaaatctctccttagttgatgagactgtgtttatctccctttaaaaccctacctatcctgaatggtctgtcattgtctgcctttaaaatccttcctctttcttcctcctctattctctaaataatgatggggctaagttatacccaaagctcactttacaaaatatttcctcagtactttgcagaaaacaccaaacaaaaatgccattttaaaaaaggtgtattttttcttttagaatgtaagctcctcaagagcagggacaatgttttctgtatgttctattgtgcctagtacactgtaaatgctcaataaatattgatgatgggaggcagtgagtcttgatgataagggtgagaaactgaaatccc

SEQ ID NO: 2591 - protein, 245 aa, Homo sapiens
MDKNELVQKAKLAEQAERYDDMAACMKSVTEQGAELSNEERNLLSVAYKNVVGARRSSWRVVSSIEQKTEGAEKKQQMAREYREKIETELRDICNDVLSLLEKFLIPNASQAESKVFYLKMKGDYYRYLAEVAAGDDKKGIVDQSQQAYQEAFEISKKEMQPTHPIRLGLALNFSVFYYEILNSPEKACSLAKTAFDEAIAELDTLSEESYKDSTLIMQLLRDNLTLWTSDTQGDEAEAGEGGEN

SEQ ID NO: 2592 - DNA, 436 bp, Homo sapiens
tctccggtccgtgcctccaagatgacaaagaaaagaaggaacaatggtcgtgccaaaaagggccgcggccacgtgcagcctattcgctgcactaactgtgcccgatgcgtgcccaaggacaaggccattaagaaattcgtcattcgaaacatagtggaggccgcagcagtcagggacatttctgaagtgagcgtcttcgatgcctatgtgcttcccaagctgtatgtgaagctacattactgtgtgagttgtgcaattcacagcaaagtagtcaggaatcgatctcgtgaagcccgcaaggaccgaacacccccaccccgatttagacctgcgggtgctgccccacgtcccccaccaaagcccatgtgaggagctgagttcttaaagactgaagacaggctgttctctggagaaaaataaaatggaaattgtactt

SEQ ID NO: 2593 - DNA, 2848 bp, Homo sapiens
ccttctccccggcggttagtgctgagagtgcggagtgtgtgctccgggctcggaacacacatttattattaaaaaatccaaaaaaaatctaaaaaaatcttttaaaaaaccccaaaaaaatttacaaaaaatccgcgtctcccccgccggagacttttattttttttcttcctcttttataaaataacccggtgaagcagccgagaccgacccgcccgcccgcggccccgcagcagctccaagaaggaaccaagagaccgaggccttcccgctgcccggacccgacaccgccaccctcgctccccgccggcagccggcagccagcggcagtggatcgaccccgttctgcggccgttgagtagttttcaattccggttgatttttgtccctctgcgcttgctccccgctcccctccccccggctccggcccccagccccggcactcgctctcctcctctcacggaaaggtcgcggcctgtgccctgcgggcagccgtgccgagatgaaccccagtgcccccagctaccccatggcctcgctctacgtgggggacctccaccccgacgtgaccgaggcgatgctctacgagaagttcagcccggccgggcccatcctctccatccgggtctgcagggacatgatcacccgccgctccttgggctacgcgtatgtgaacttccagcagccggcggacgcggagcgtgctttggacaccatgaattttgatgttataaagggcaagccagtacgcatcatgtggtctcagcgtgatccatcacttcgcaaaagtggagtaggcaacatattcattaaaaatctggacaaatccattgataataaagcactgtatgatacattttctgcttttggtaacatcctttcatgtaaggtggtttgtgatgaaaatggttccaagggctacggatttgtacactttgagacgcaggaagcagctgaaagagctattgaaaaaatgaatggaatgctcctaaatgatcgcaaagtatttgttggacgatttaagtctcgtaaagaacgagaagctgaacttggagctagggcaaaagaattcaccaatgtttacatcaagaattttggagaagacatggatgatgagcgccttaaggatctctttgggcctgccttaagtgtgaaagtaatgactgatgaaagtggaaaatccaaaggatttggatttgtaagctttgaaaggcatgaagatgcacagaaagctgtggatgagatgaacggaaaggagctcaatggaaaacaaatttatgttggtcgagctcagaaaaaggtggaacggcagacggaacttaagcgcaaatttgaacagatgaaacaagataggatcaccagataccagggtgttaatctttatgtgaaaaatcttgatgatggtattgatgatgaacgtctccggaaagagttttctccatttggtacaatcactagtgcaaaggttatgatggagggtggtcgcagcaaagggtttggttttgtatgtttctcctccccagaagaagccactaaagcagttacagaaatgaacggtagaattgtggccacaaagccattgtatgtagctttagctcagcgcaaagaagagcgccaggctcacctcactaaccagtatatgcagagaatggcaagtgtacgagctgttcccaaccctgtaatcaacccctaccagccagcacctccttcaggttacttcatggcagctatcccacagactcagaaccgtgctgcatactatcctcctagccaagttgctcaactaagaccaagtcctcgctggactgctcagggtgccagacctcatccattccaaaatatgcccggtgctatccgcccagctgctcctagaccaccatttagtactatgagaccagcttcttcacaggttccacgagtcatgtcaacacagcgtgttgctaacacatcaacacagacaatgggtccacgtcctgcagctgcagccgctgcagctactcctgctgtccgcaccgttccacagtataaatatgctgcaggagttcgcaatcctcagcaacatcttaatgcacagccacaagttacaatgcaacagcctgctgttcatgtacaaggtcaggaacctttgactgcttccatgttggcatctgcccctcctcaagagcaaaagcaaatgttgggtgaacggctgtttcctcttattcaagccatgcaccctactcttgctggtaaaatcactggcatgttgttggagattgataattcagaacttcttcatatgctcgagtctccagagtcactccgttctaaggttgatgaagctgtagctgtactacaagcccaccaagctaaagaggctgcccagaaagcagttaacagtgccaccggtgttccaactgtttaaaattgatcagggaccatgaaaagaaacttgtgcttcaccgaagaaaaatatctaaacatcgaaaaacttaaatattatggaaaaaaaacattgcaaaatataaaataaataaaaaaaggaaaggaaactttgaaccttatgtaccgagcaaatgccaggtctagcaaacataatgctagtcctagattacttattgatttaaaaacaaaaaaacacaaaaaatagtaaaatataaaaacaaattaatgttttatagaccctgggaaaaagaattttcagcaaagtacaaaaatttaaagcattcctttctttaattttgtaattctttactgtggaatagctcagaatgtcagttctgttttaagtaacagaattgataactgagcaaggaaacgtaatttggattataaaattcttgctttaataaaaattccttaaacagtg

SEQ ID NO: 2594 - protein, 633 aa, Homo sapiens
MNPSAPSYPMASLYVGDLHPDVTEAMLYEKFSPAGPILSIRVCRDMITRRSLGYAYVNFQQPADAERALDTMNFDVIKGKPVRIMWSQRDPSLRKSGVGNIFIKNLDKSIDNKALYDTFSAFGNILSCKVVCDENGSKGYGFVHFETQEAAERAIEKMNGMLLNDRKVFVGRFKSRKEREAELGARAKEFTNVYIKNFGEDMDDERLKDLFGPALSVKVMTDESGKSKGFGFVSFERHEDAQKAVDEMNGKELNGKQIYVGRAQKKVERQTELKRKFEQMKQDRITRYQGVNLYVKNLDDGIDDERLRKEFSPFGTITSAKVMMEGGRSKGFGFVCFSSPEEATKAVTEMNGRIVATKPLYVALAQRKEERQAHLTNQYMQRMASVRAVPNPVINPYQPAPPSGYFMAAIPQTQNRAAYYPPSQVAQLRPSPRWTAQGARPHPFQNMPGAIRPAAPRPPFSTMRPASSQVPRVMSTQRVANTSTQTMGPRPAAAAAAATPAVRTVPQYKYAAGVRNPQQHLNAQPQVTMQQPAVHVQGQEPLTASMLASAPPQEQKQMLGERLFPLIQAMHPTLAGKITGMLLEIDNSELLHMLESPESLRSKVDEAVAVLQAHQAKEAAQKAVNSATGVPTV

SEQ ID NO: 2595 - DNA, 1343 bp, Homo sapiens
gccattgccttgagtgagtgtgccgctctccagcccgtttgaacgctccccgcagccaccgccacccattggaatggccaacaggggacctgcattatggcctgagccaggaggtgcagcagaagattgagaaacagtatgatgcagatctggagcagatcctgatccagtggatcaccacccagtgccgaaaggatgtgggccggtcccagcctggacgcgagaacttccagaactggctcaaggatggcacggtgttatgtgagctcattaatgcactgtaccccaaggggcaggtcccagtaaagaagatccaggcctccaccatggccttcaagcagatggagaagatctctcagttcctgcaagcagctgagcgctatggcattaacaccactgacatcttccaaactgtggacctctgggaaggaaagaacatggcctgtgtgcagcggacgctgaggaatctgggtgggttggcagtagcctgggatgatgggctcttctctggggatcccaactggttccctaagaaatccaaggagaatcctcggaacttctcggataaccagctgcaagagggcaagaacgtgatcgggctacagatggggggcatctcaggcaggcatgactggctactggatgccacaccagatcctttgatcccaccccaggccttgcccctgccctcccacgagtggttaatatacatgtagatatatattttagcagtgacattcccagagagccccagagctcttaagctcccttctgtcagggtgaggggttcagcctgtcctatcacctctgaggtgcctgttggcagcctctcccccgtgcttactaatacattcccctccccatacccatcaaaactggaccaactggcctcttcttttcccctgggatcaaaatttaggggcctcagtccctcaccgccatgccctggcctgttctgtctctcctttttccccctggcctgttctgtctctgagctctgtgccctccgttcattccatggctgggagtcagtgatgctgcctctgccttctgatgctggactggccttgcttctacaagtatgcttctcccacagctgtggctgcaggaacttaatttatagggaggagcctgtggcagctgctgccccagccacagctgcactgactgtgctcaccacacatctggggcagccttccctggcagaggccctcatggcttctcattttccattcccttcactgtggctaaggggtggggtgaggggacggagagggagggctgcctaccatggtctggggcttgaggaagatgagtttgtcgatttaaagaatttgtcattt

SEQ ID NO: 2596 - DNA, 1510 bp, Homo sapiens
ggactcccttttctttggcaagatggcggagtacgacttgactactcgcatcgcgcactttttggatcggcatctagtctttccgcttcttgaatttctctctgtaaaggagatatataatgaaaaggaattattacaaggtaaattggaccttcttagtgataccaacatggtagactttgctatggatgtatacaaaaacctttattctgatgatattcctcatgctttgagagagaaaagaaccacagtggttgcacaactgaaacagcttcaggcagaaacagaaccaattgtgaagatgtttgaagatccagaaactacaaggcaaatgcagtcaaccagggatggtaggatgctctttgactacctggcggacaagcatggttttaggcaggaatatttagatacactctacagatatgcaaaattccagtacgaatgtgggaattactcaggagcagcagaatatctttatttttttagagtgctggttccagcaacagatagaaatgctttaagttcactctggggaaagctggcctctgaaatcttaatgcagaattgggatgcagccatggaagaccttacacggttaaaagagaccatagataataattctgtgagttctccacttcagtctcttcagcagagaacatggctcattcactggtctctgtttgttttcttcaatcaccccaaaggtcgcgataatattattgacctcttcctttatcagccacaatatcttaatgcaattcagacaatgtgtccacacattcttcgctatttgactacagcagtcataacaaacaaggatgttcgaaaacgtcggcaggttctaaaagatctagttaaagttattcaacaggagtcttacacatataaagacccaattacagaatttgttgaatgtttatatgttaactttgactttgatggggctcagaaaaagctgagggaatgtgaatcagtgcttgtgaatgacttcttcttggtggcttgtcttgaggatttcattgaaaatgcccgtctcttcatatttgagactttctgtcgcatccaccagtgtatcagcattaacatgttggcagataaattgaacatgactccagaagaagctgaaaggtggattgtaaatttgattagaaatgcaagactggatgccaagattgattctaaattaggtcatgtggttatgggtaacaatgcagtctcaccctatcagcaagtgattgaaaagaccaaaagcctttcctttagaagccagatgttggccatgaatattgagaagaaacttaatcagaatagcaggtcagaggctcctaactgggcaactcaagattctggcttctactgaagaaccataaagaaaagatgaaaaaaaaaactatcaaagaaagatgaaataataaaactattatataaagggtgacttacattttggaaacaacatattacgtataaattttgaagaattggaataaaattgattcattttaaaaaaaaa

SEQ ID NO: 2597 - protein, 445 aa, Homo sapiens
MAEYDLTTRIAHFLDRHLVFPLLEFLSVKEIYNEKELLQGKLDLLSDTNMVDFAMDVYKNLYSDDIPHALREKRTTVVAQLKQLQAETEPIVKMFEDPETTRQMQSTRDGRMLFDYLADKHGFRQEYLDTLYRYAKFQYECGNYSGAAEYLYFFRVLVPATDRNALSSLWGKLASEILMQNWDAAMEDLTRLKETIDNNSVSSPLQSLQQRTWLIHWSLFVFFNHPKGRDNIIDLFLYQPQYLNAIQTMCPHILRYLTTAVITNKDVRKRRQVLKDLVKVIQQESYTYKDPITEFVECLYVNFDFDGAQKKLRECESVLVNDFFLVACLEDFIENARLFIFETFCRIHQCISINMLADKLNMTPEEAERWIVNLIRNARLDAKIDSKLGHVVMGNNAVSPYQQVIEKTKSLSFRSQMLAMNIEKKLNQNSRSEAPNWATQDSGFY

SEQ ID NO: 2598 - DNA, 1280 bp, Homo sapiens
gaaagatggcgtcccgcaaggaaggtaccggctctactgccacctcttccagctccaccgccggcgcagcagggaaaggcaaaggcaaaggcggctcgggagattcagccgtgaagcaagtgcagatagatggccttgtggtattaaagataatcaaacattatcaagaagaaggacaaggaactgaagttgttcaaggagtgcttttgggtctggttgtagaagatcggcttgaaattaccaactgctttcctttccctcagcacacagaggatgatgctgactttgatgaagtccaatatcagatggaaatgatgcggagccttcgccatgtaaacattgatcatcttcacgtgggctggtatcagtccacatactatggctcattcgttacccgggcactcctggactctcagtttagttaccagcatgccattgaagaatctgtcgttctcatttatgatcccataaaaactgcccaaggatctctctcactaaaggcatacagactgactcctaaactgatggaagtttgtaaagaaaaggatttttcccctgaagcattgaaaaaagcaaatatcacctttgagtacatgtttgaagaagtgccgattgtaattaaaaattcacatctgatcaatgtcctaatgtgggaacttgaaaagaagtcagctgttgcagataaacatgaattgctcagccttgccagcagcaatcatttggggaagaatctacagttgctgatggacagagtggatgaaatgagccaagatatagttaaatacaacacatacatgaggaatactagtaaacaacagcagcagaaacatcagtatcagcagcgtcgccagcaggagaatatgcagcgccagagccgaggagaacccccgctccctgaggaggacctgtccaaactcttcaaaccaccacagccgcctgccaggatggactcgctgctcattgcaggccagataaacacttactgccagaacatcaaggagttcactgcccaaaacttaggcaagctcttcatggcccaggctcttcaagaatacaacaactaagaaaaggaagtttccagaaaagaagttaacatgaactcttgaagtcacaccagggcaactcttggaagaaatatatttgcatattgaaaagcacagaggatttctttagtgtcattgccgattttggctataacagtgtctttctagccataataaaataaaaaaaaaaaaaaaaaaaaaaaaaaaaaaaaaaaaaaaaaaaaaaaaaaaaaaaaa

SEQ ID NO: 2599 - protein, 352 aa, Homo sapiens
MASRKEGTGSTATSSSSTAGAAGKGKGKGGSGDSAVKQVQIDGLVVLKIIKHYQEEGQGTEVVQGVLLGLVVEDRLEITNCFPFPQHTEDDADFDEVQYQMEMMRSLRHVNIDHLHVGWYQSTYYGSFVTRALLDSQFSYQHAIEESVVLIYDPIKTAQGSLSLKAYRLTPKLMEVCKEKDFSPEALKKANITFEYMFEEVPIVIKNSHLINVLMWELEKKSAVADKHELLSLASSNHLGKNLQLLMDRVDEMSQDIVKYNTYMRNTSKQQQQKHQYQQRRQQENMQRQSRGEPPLPEEDLSKLFKPPQPPARMDSLLIAGQINTYCQNIKEFTAQNLGKLFMAQALQEYNN

SEQ ID NO: 2600 - DNA, 3647 bp, Homo sapiens
agtgaatcggaaaggaggcgccggctgtggcggcggcgggagctgctcggaagctacacctcgcaagggctcccccctttccccaccccctcccccgacccttttcccctccccgggccacccagcccgcccaactcccagcggagagcaaggttttcttctgttttcatagccagccagaacaatgttctacgcacattttgttctcagtaaaagagggcctctggccaaaatttggctagcggcccattgggataagaagctaaccaaagcccatgtgttcgagtgtaatttagagagcagcgtggagagtatcatctcaccaaaggtgaaaatggcattacggacatcaggacatctcttactgggagtagttcgaatctatcacaggaaagccaaataccttcttgcagactgtaatgaagcattcattaagataaagatggcttttcggccaggtgtggttgacctgcctgaggaaaatcgggaagcagcttataatgccattactttacctgaagaatttcatgactttgatcagccactgcctgacttagatgacatcgatgtggcccagcagttcagcttgaatcagagtagagtggaagagataaccatgagagaagaagttgggaacatcagtattttacaagaaaatgattttggtgattttggaatggatgatcgtgagataatgagagaaggcagtgcttttgaggatgacgacatgttagtaagcactactacttctaacctcctattagagtctgaacagagcaccagcaatctgaatgagaaaattaaccatttagaatatgaagatcaatataaggatgataattttggagaaggaaatgatggtggaatattagatgacaaacttattagtaataatgatggcggtatctttgatgatccccctgccctctctgaggcaggggtgatgttgccagagcagcctgcacatgacgatatggatgaggatgataatgtatcaatgggtgggcctgatagtcctgattcagtggatcccgttgaaccaatgccaaccatgactgatcaaacaacacttgttccaaatgaggaagaagcatttgcattggagcctattgatataactgttaaagaaacaaaagccaagaggaagaggaagctaattgttgacagtgtcaaagagttggatagcaagacaattagagcccaacttagtgattattcagatattgttactactttggatctggcaccgcccaccaagaaattgatgatgtggaaagagacaggaggagtagaaaaactgttttctttacctgctcagcctttgtggaataacagactactgaagctctttacacgctgtcttacaccgcttgtaccagaagaccttagaaaaaggaggaaaggaggagaggcagataatttggatgaattcctcaaagaatttgaaaatccagaggttcctagagaggaccagcaacagcagcatcagcagcgtgatgttatcgatgagcccattattgaagagccaagccgcctccaggagtcagtgatggaggccagcagaacaaacatagatgagtcagctatgcctccaccaccacctcagggagttaagcgaaaagctggacaaattgacccagagcctgtgatgcctcctcagcaggtagagcagatggaaataccacctgtagagcttcccccagaagaacctccaaatatctgtcagctaataccagagttagaacttctgccagaaaaagagaaggagaaagagaaggaaaaagaagatgatgaagaggaagaggatgaagatgcatcagggggcgatcaagatcaggaagaaagaagatggaacaaaaggactcagcagatgcttcatggtcttcagcgtgctcttgctaaaactggagctgaatctatcagtttgcttgagttatgtcgaaatacgaacagaaaacaagctgccgcaaagttctacagcttcttggttcttaaaaagcagcaagctattgagctgacacaggaagaaccgtacagtgacatcatcgcaacacctggaccaaggttccatattatataaggagctagaagcattatagctagtgtttgattcactagtgcttacaaattgcccccatgtgtaggggacacagaaccctttgagaaaacttagatttttgtctgtacaaagtctttgcctttttccttcttcatttttttccagtacattaaatttgtcaatttcatctttgagggaaactgattagatgggttgtgtttgtgttctgatggagaaaacagcaccccaaggactcagaagatgattttaacagttcagaacagatgtgtgcaatattggtgcatgtaataatgttgagtggcagtcaaaagtcatgatttttatcttagttcttcattactgcattgaaaaggaaaacctgtctgagaaaatgcctgacagtttaatttaaaactatggtgtaagtctttgacaagaaaaaaaaacaaacaaacacttctttccatcagtaacactggcaatcttcctgttaaccactctccttagggatggtatctgaaacaacaatggtcaccctcttgagattcgttttaagtgtaattccataatgagcagaggtgtacgcgaaattgtgttatgactgatagccttcagctacaaaaagataggactgacctggtttaaagtgttctattttgtaaatcattccatttgagtctttctgatgaacttggctatactgaaatctgttattttagtgaggctccaaaatgagcaaagctaggcctgattagagtagagtgactattaaaaaacataactttctaggagctataaatcaaagttttaaaaagatgtttggatatatttgagtattccgatcatgaaaacagaaattgccctgcctactacaaggacagactgatgggaaattatgcacctggtcaacttagcttttaagcagacgatgctgtaaaaactaacggcttctctgatatttattgtaagttttagtactgatctccttttccagtgctgcacactcctggtttggaactttaatagcgttgcaacgaaatcctatatccagtttcctgtaatttaattgaagaaaaatacatccaaataaagactttattattaacagaccagatagcatcagaaatcatgtgactgttatgattatcagaatatgtcttaactttttagggcaaagttaacactgaaagttctagcttaagtgttgaaacttttgtgggaaaaaaaaatcacttttgaaactcagacttcagtgtatacccaataatttaaaattatgtgaaatgttttaaatttgtgaactcgtaattactgttttaatgattcagtttcttcagagtggtaattgtataaaattgctattgcagctttatattcaatatgatgtgcctgtaaaccaaggagttttccccgtttgtaaaaagacattgtagataattgaatgtttgattttagaaaggtcattagtttcttgttacacattttgttagtctggtttttgttgcttatcgggtttaatattgttcttgaaaatagttgatgctatgttatgtataacttttctaataaaagttgtgttataagctgt

SEQ ID NO: 2601 - protein, 631 aa, Homo sapiens
MFYAHFVLSKRGPLAKIWLAAHWDKKLTKAHVFECNLESSVESIISPKVKMALRTSGHLLLGVVRIYHRKAKYLLADCNEAFIKIKMAFRPGVVDLPEENREAAYNAITLPEEFHDFDQPLPDLDDIDVAQQFSLNQSRVEEITMREEVGNISILQENDFGDFGMDDREIMREGSAFEDDDMLVSTTTSNLLLESEQSTSNLNEKINHLEYEDQYKDDNFGEGNDGGILDDKLISNNDGGIFDDPPALSEAGVMLPEQPAHDDMDEDDNVSMGGPDSPDSVDPVEPMPTMTDQTTLVPNEEEAFALEPIDITVKETKAKRKRKLIVDSVKELDSKTIRAQLSDYSDIVTTLDLAPPTKKLMMWKETGGVEKLFSLPAQPLWNNRLLKLFTRCLTPLVPEDLRKRRKGGEADNLDEFLKEFENPEVPREDQQQQHQQRDVIDEPIIEEPSRLQESVMEASRTNIDESAMPPPPPQGVKRKAGQIDPEPVMPPQQVEQMEIPPVELPPEEPPNICQLIPELELLPEKEKEKEKEKEDDEEEEDEDASGGDQDQEERRWNKRTQQMLHGLQRALAKTGAESISLLELCRNTNRKQAAAKFYSFLVLKKQQAIELTQEEPYSDIIATPGPRFHII

SEQ ID NO: 2602 - DNA, 2808 bp, Homo sapiens
ggcggcggcggcaggagcccgggaggcggaggcgggaggcggcggcggcgcgcggagacgcagcagcggcagcggcagcatgtcggccggcggagcgtcagtcccgccgcccccgaaccccgccgtgtccttcccgccgccccgggtcaccctgcccgccggccccgacatcctgcggacctactcgggcgccttcgtctgcctggagattctgttcgggggtcttgtctggattttggttgcctcctccaatgttcctctacctctactacaaggatgggtcatgtttgtgtccgtgacagcgtttttcttttcgctcctctttctgggcatgttcctctctggcatggtggctcaaattgatgctaactggaacttcctggattttgcctaccattttacagtatttgtcttctattttggagcctttttattggaagcagcagccacatccctgcatgatttgcattgcaatacaaccataaccgggcagccactcctgagtgataaccagtataacataaacgtagcagcctcaatttttgcctttatgacgacagcttgttatggttgcagtttgggtctggctttacgaagatggcgaccgtaacactccttagaaactggcagtcgtatgttagtttcacttgtctactttatatgtctgatcaatttggataccattttgtccagatgcaaaaacattccaaaagtaatgtgtttagtagagagagactctaagctcaagttctggtttatttcatggatggaatgttaattttattatgatattaaagaaatggccttttattttacatctctcccctttttccctttccccctttattttcctccttttctttctgaaagtttccttttatgtccataaaatacaaatatattgttcataaaaaattagtatcccttttgtttggttgctgagtcacctgaaccttaattttaattggtaattacagcccctaaaaaaaacacatttcaaataggcttcccactaaactctatattttagtgtaaaccaggaattggcacactttttttagaatgggccagatggtaaatatttatgcttcacggtccatacagtctctgtcacaactattcagttctgctagtatagcgtgaaagcagctatacacaatacagaaatgaatgagtgtggttatgttctaataaaacttatttataaaaacaaggggaggctgggtttagcctgtgggccatagtttgtcaaccactggtgtaaaaccttagttatatatgatctgcattttcttgaactgatcattgaaaacttataaacctaacagaaaagccacataatatttagtgtcattatgcaataatcacattgcctttgtgttaatagtcaaatacttacctttggagaatacttacctttggaggaatgtataaaatttctcaggcagagtcctggatataggaaaaagtaatttatgaagtaaacttcagttgcttaatcaaactaatgatagtctaacaactgagcaagatcctcatctgagagtgcttaaaatgggatccccagagaccattaaccaatactggaactggtatctagctactgatgtcttactttgagtttatttatgcttcagaatacagttgtttgccctgtgcatgaatatacccatatttgtgtgtggatatgtgaagcttttccaaatagagctctcagaagaattaagtttttacttctaattattttgcattactttgagttaaatttgaatagagtattaaatataaagttgtagattcttatgtgtttttgtattagcccagacatctgtaatgtttttgcactggtgacagacaaaatctgttttaaaatcatatccagcacaaaaactatttctggctgaatagcacagaaaagtattttaacctacctgtagagatcctcgtcatggaaaggtgccaaactgttttgaatggaaggacaagtaagagtgaggccacagttcccaccacacgagggcttttgtattgttctactttttcagccctttactttctggctgaagcatccccttggagtgccatgtataagttgggctattagagttcatggaacatagaacaaccatgaatgagtggcatgatccgtgcttaatgatcaagtgttacttatctaataatcctctagaaagaaccctgttagatcttggtttgtgataaaaatataaagacagaagacatgaggaaaaacaaaaggtttgaggaaatcaggcatatgactttatacttaacatcagatcttttctataatatcctactactttggttttcctagctccataccacacacctaaacctgtattatgaattacatattacaaagtcataaatgtgccatatggatatacagtacattctagttggaatcgtttactctgctagaatttaggtgtgagattttttgtttcccaggtatagcaggcttatgtttggtggcattaaattggtttctttaaaatgctttggtggcacttttgtaaacagattgcttctagattgttacaaaccaagcctaagacacatctgtgaatacttagatttgtagcttaatcacattctagacttgtgagttgaatgacaaagcagttgaacaaaaattatggcatttaagaatttaacatgtcttagctgtaaaaatgagaaagtgttggttggttttaaaatctggtaactccatgatgaaaagaaatttattttatacgtgttatgtctctaataaagtattcatttgataaaaaaaaaaaaaaa

SEQ ID NO: 2603 - protein, 176 aa, Homo sapiens
MSAGGASVPPPPNPAVSFPPPRVTLPAGPDILRTYSGAFVCLEILFGGLVWILVASSNVPLPLLQGWVMFVSVTAFFFSLLFLGMFLSGMVAQIDANWNFLDFAYHFTVFVFYFGAFLLEAAATSLHDLHCNTTITGQPLLSDNQYNINVAASIFAFMTTACYGCSLGLALRRWRP

SEQ ID NO: 2604 - DNA, 2172 bp, Homo sapiens
ggcgcgctttcaaacgctcaggtttcctaccttccggctgcttgggaacttctttcttgcccgccaagcccgcagccacccgggcgcggcgggactcctagacccggcgctgcgatgaagaggacccgcgacgaggtggatgcgacgctgcagatcgccaagctgaatgcggccgagctgctgccggcggtgcactgcctgggcttcggccctggggccagcggcgctgcagccggcgacttctgcctgctggagctggagcccacgctgtgccagcagctggaggatggacacagtcttgtgattcgtggtgataaagacgagcaagctgtgctgtgcagtaaagacaaaacatacgacttgaagatagcagacacttccaatatgttgcttttcattcctggttgtaaaactccggaccagttgaagaaggaagattcacactgtaacattattcacactgagatctttggtttttctaataattattgggaattaagaagacgtagacccaagttaaagaagctaaagaaacttttgatggaaaatccatatgaaggacctgacagtcaaaaagagaaggattcaaatagctcaaaatatacaactgaagatttgcttgatcaaattcaggcaagtgaggaagaaataatgacccaattacaagttctaaatgcctgtaagattggaggttattggaggattcttgaatttgattatgagatgaaacttctgaatcatgtaactcagcttgtggattctgaatcatggtcttttggtaaagttcctttgaacacatgccttcaggaactcggaccattggagccagaggaaatgatagaacactgtcttaaatgttatgggaagaaatatgtagatgaagagcagcagcacgaatgctacttcagaatgcggtgaaattcaatctcgctgagtttcaagaagtgtggcagcagagtgttcctgaaggaatggtaactagtcttgatcagcttaagggtttagcgctggtggatagacactcgagaccagaaatcatatttttgctgaaagtagatgatttacctgaggataatcaggaacgttttaatagccttttctctctaagggagaagtggacagaagaagatattgctccatatattcaagatttgtgtggagagaagcaaaccataggtgcattactcactaaatattctcattcttcgatgcaaaatggtgttaaagtttataattcgagaagacccatttcttaaaagaacaacggtcttttcttcaggactcaagttgctttataaagttgctggatagaagaaaaataacttgtacttttatttctgacttttagaaacctagtcttctaaggcatttttctcctcatcttaagcattttgaaactactgttatttcttaaatgttataggatgtagctttaaaattatatttgtactatgtacacagtgtaaacaaggacaaaagaattctttcctatattatgtctgaggtctctatgatttatttaaagtttggctttttatatttaaaatgtcatttctttacttaggatttgatgttctaatcattaatacacttaagttttccagagaactaaatagtaatagtttcatagaagagaactatttattcacttaaatatcatttctcaagtgagtgagttcccctctacttttagccttccacccaaactggaagcctctaggtgctatcaattatttatatccatcgtttacatccatgaaattggctgaataattactcctctgcctggcgtagacatgcgctttgggaaaaaaacgagtttataatcctataatgaagaatactggcacaggcaatgctcactcgaaaacttcaagtaatttctagttggttttggaatgcttgataaagttcctttacagctttattttcctgatttgttttggtttagatcaaagttcaaattaattttaacttagctaatgaactcatcaccaggacagttggagggggtaggccgaggttaaatggtccacgtttcaaaaatgttaatggctaatccataattaaagaaggtttaactgttactgaagtttacaagttttattgtcatgaacatgaaatacaaacacgatggcttcgaaatgtctttcaataaatgtttctgcattt

SEQ ID NO: 2605 - DNA, 2277 bp, Homo sapiens
acgccctatacaacttggcttcacatacttttacactaactttatatgatttttaaaaactggtctgatcggacttctcgtcctgggacactgtttactggagtctggccggctctccgtgctcctcttggtacctcattttggggagaaccttaaacccactcgagcagataatctccgccttgaccggtgccaccaaagaagccttggaaccatgtggacttttctgggcattgccactttcacctatttttataagaagttcggggacttcatcactttggccaacagggaggtcctgttgtgcgtgctggtgttcctctcgctgggcctggtgctctcctaccgctgtcgccaccgaaacgggggtctcctcgggcgccagcagagcggctcccagttcgccctcttctcggatattctctcaggcctgcctttcattggcttcttctgggccaaatccccccctgaatcagaaaataaggagcagctcgaggccaggaggcgcagaaaaggaaccaatatttcagaaacaagcttaataggaacagctgcctgtacatcaacatcttctcagaatgacccagaagttatcatcgtgggagctggcgtgcttggctctgctttggcagctgtgctttccagagatggaagaaaggtgacagtcattgagagagacttaaaagagcctgacagaatagttggagaattcctgcagccgggtggttatcatgttctcaaagaccttggtcttggagatacagtggaaggtcttgatgcccaggttgtaaatggttacatgattcatgatcaggaaagcaaatcagaggttcagattccttaccctctgtcagaaaacaatcaagtgcagagtggaagagctttccatcacggaagattcatcatgagtctccggaaagcagctatggcagagcccaatgcaaagtttattgaaggtgttgtgttacagttattagaggaagatgatgttgtgatggggagttcagtacaaggataaagagactggagatatcaaggaactccatgctccactgactgttgttgcagatgggcttttctccaagttcaggaaaagcctggtctccaataaagtttctgtatcatctcattttgttggctttcttatgaagaatgcaccacagtttaaagcaaatcatgctgaacttattttagctaacccgagtccagttctcatctaccagatttcatccagtgaaactcgagtacttgttgacattagaggagaaatgccaaggaatttaagagaatacatggttgaaaaaatttacccacaaatacctgatcacctgaaagaaccattcttagaagccactgacaattctcatctgaggtccatgccagcaagcttccttcctccttcatcagtgaagaaacgaggtgttcttcttttgggagacgcatataatatgaggcatccacttactggtggaggaatgactgttgcttttaaagatataaaactatggagaaaactgctaaagggtatccctgacctttatgatgatgcagctattttcgaggccaaaaaatcattttactgggcaagaaaaacatctcattcctttgtcgtgaatatccttgctcaggctctttatgaattattttctgccacagatgattccctgcatcaactaagaaaagcctgttttctttatttcaaacttggtggcgaatgtgttgcgggtcctgttgggctgctttctgtattgtctcctaaccctctagttttaattggacacttctttgctgttgcaatctatgccgtgtatttttgctttaagtcagaaccttggattacaaaacctcgagcccttctcagtagtggtgctgtattgtacaaagcgtgttctgtaatatttcctctaatttactcagaaatgaagtatatggttcattaagcttaaaggggaaccatttgtgaatgaatatttggaacttaccaagtcctaagagacttttggaagaggatatatatagcatagtaccataccacttataaagtggaaactcttggaccaagatttggattaatttgtttttgaagttttttgtatataaatatgtaaatacatgctttaatttgcaatttaaaatgaaggggttaaataagttagacatttaaaagaaatgattgttaccataaattagtgctaatgctgaggagaactacagtttttcttttgaatttagtatttgagatgagttgttgggacatgcaaataaaatgaagaatga

SEQ ID NO: 2606 - DNA, 740 bp, Homo sapiens
ggcagagccccgctcagtcacccgcagcaggcgtgcagtttcccggctctccgcgcggccggggaaggtcagcgccgtaatggcgttcttggcgtcgggaccctacctgacccatcagcaaaaggtgttgcggctttataagcgggcgctacgccacctcgagtcgtggtgcgtccagagagacaaataccgatactttgcttgtttgatgagagcccggtttgaagaacataagaatgaaaaggatatggcgaaggccacccagctgctgaaggaggccgaggaagaattctggtaccgtcagcatccacagccatacatcttccctgactctcctgggggcacctcctatgagagatacgattgctacaaggtcccagaatggtgcttagatgactggcatccttctgagaaggcaatgtatcctgattactttgccaagagagaacagtggaagaaactgcggagggaaagctgggaacgagaggttaagcagctgcaggaggaaacgccacctggtggtcctttaactgaagctttgccccctgcccgaaaggaaggtgatttgcccccactgtggtggtatattgtgaccagaccccgggagcggcccatgtagaaagagagagacctcatctttcatgcttgcaagtgaaatatgttacagaacatgcacttgccctaataaaaaatcagtgaaatggaaaaaaaaaaaaaaaaaaaaaaaaaaaaaaaaaaaa

SEQ ID NO: 2607 - protein, 179 aa, Homo sapiens
MAFLASGPYLTHQQKVLRLYKRALRHLESWCVQRDKYRYFACLMRARFEEHKNEKDMAKATQLLKEAEEEFWYRQHPQPYIFPDSPGGTSYERYDCYKVPEWCLDDWHPSEKAMYPDYFAKREQWKKLRRESWEREVKQLQEETPPGGPLTEALPPARKEGDLPPLWWYIVTRPRERPM

SEQ ID NO: 2608 - DNA, 2118 bp, Homo sapiens
ctgctcgcggccgccaccgccgggccccggccgtccctggctcccctcctgcctcgagaagggcagggcttctcagaggcttggcgggaaaaagaacggagggagggatcgcgctgagtataaaagccggttttcggggctttatctaactcgctgtagtaattccagcgagaggcagagggagcgagcgggcggccggctagggtggaagagccgggcgagcagagctgcgctgcgggcgtcctgggaagggagatccggagcgaatagggggcttcgcctctggcccagccctcccgctgatcccccagccagcggtccgcaacccttgccgcatccacgaaactttgcccatagcagcgggcgggcactttgcactggaacttacaacacccgagcaaggacgcgactctcccgacgcggggaggctattctgcccatttggggacacttccccgccgctgccaggacccgcttctctgaaaggctctccttgcagctgcttagacgctggatttttttcgggtagtggaaaaccagcagcctcccgcgacgatgcccctcaacgttagcttcaccaacaggaactatgacctcgactacgactcggtgcagccgtatttctactgcgacgaggaggagaacttctaccagcagcagcagcagagcgagctgcagcccccggcgcccagcgaggatatctggaagaaattcgagctgctgcccaccccgcccctgtcccctagccgccgctccgggctctgctcgccctcctacgttgcggtcacacccttctcccttcggggagacaacgacggcggtggcgggagcttctccacggccgaccagctggagatggtgaccgagctgctgggaggagacatggtgaaccagagtttcatctgcgacccggacgacgagaccttcatcaaaaacatcatcatccaggactgtatgtggagcggcttctcggccgccgccaagctcgtctcagagaagctggcctcctaccaggctgcgcgcaaagacagcggcagcccgaaccccgcccgcggccacagcgtctgctccacctccagcttgtacctgcaggatctgagcgccgccgcctcagagtgcatcgacccctcggtggtcttcccctaccctctcaacgacagcagctcgcccaagtcctgcgcctcgcaagactccagcgccttctctccgtcctcggattctctgctctcctcgacggagtcctccccgcagggcagccccgagcccctggtgctccatgaggagacaccgcccaccaccagcagcgactctgaggaggaacaagaagatgaggaagaaatcgatgttgtttctgtggaaaagaggcaggctcctggcaaaaggtcagagtctggatcaccttctgctggaggccacagcaaacctcctcacagcccactggtcctcaagaggtgccacgtctccacacatcagcacaactacgcagcgcctccctccactcggaaggactatcctgctgccaagagggtcaagttggacagtgtcagagtcctgagacagatcagcaacaaccgaaaatgcaccagccccaggtcctcggacaccgaggagaatgtcaagaggcgaacacacaacgtcttggagcgccagaggaggaacgagctaaaacggagcttttttgccctgcgtgaccagatcccggagttggaaaacaatgaaaaggcccccaaggtagttatccttaaaaaagccacagcatacatcctgtccgtccaagcagaggagcaaaagctcatttctgaagaggacttgttgcggaaacgacgagaacagttgaaacacaaacttgaacagctacggaactcttgtgcgtaaggaaaagtaaggaaaacgattccttctaacagaaatgtcctgagcaatcacctatgaacttgtttcaaatgcatgatcaaatgcaacctcacaaccttggctgagtcttgagactgaaagatttagccataatgtaaactgcctcaaattggactttgggcataaaagaacttttttatgcttaccatcttttttttttctttaacagatttgtatttaagaattgtttttaaaaaattttaa

SEQ ID NO: 2609 - DNA, 1782 bp, Homo sapiens
ggtaattcatttgcacacctgttagcaagaaacagaagttgaaggactggaacaagtgaactaggaaagagggaacgccaatccaaggatagaaggacaaggacagaatcaccagcactggctgaaggtaccttaacatggggaatcttcttaaagttttgacatgcacagaccttgagcaggggccaaattttttccttgattttgaaaatgcccagcctacagagtctgagaaggaaatttataatcaggtgaatgtagtattaaaagatgcagaaggcatcttggaggacttgcagtcatacagaggagctggccacgaaatacgagaggcaatccagcatccagcagatgagaagttgcaagagaaggcatggggtgcagttgttccactagtaggcaaattaaagaaattttacgaattttctcagaggttagaagcagcattaagaggtcttctgggagccttaacaagtaccccatattctcccacccagcatctagagcgagagcaggctcttgctaaacagtttgcagaaattcttcatttcacactccggtttgatgaactcaagatgacaaatcctgccatacagaatgatttcagctattatagaagaacattgagtcgtatgaggattaacaatgtaccggcagaaggagaaaatgaagtaaataatgaattggcaaatcgaatgtctttgttttatgctgaggcaactccaatgctgaaaaccttgagtgatgccacaacaaaatttgtatcagagaataaaaatttaccaatagaaaataccacagattgtttaagcacaatggctagtgtatgcagagtcatgctggaaacaccggaatacagaagcagatttacaaatgaagagacagtgtcattctgcttgagggtaatggtgggtgtcataatactctatgaccacgtacatccagtgggagcatttgctaaaacttccaaaattgatatgaaaggttgtatcaaagttcttaaggaccaacctcctaatagtgtggaaggtcttctaaatgctctcaggtacacaacaaaacatttgaatgatgagactacctccaagcaaattaaatccatgctgcaataacaattctggaataagcacctgctgtagacagaagacagtattctgcaatgactgagaatgcagttttttagtgattgcaattactatctcatttattcttgcttttatttctttcctctgttcctcttccctcttttttaatcatgttcttaagacttcttttctgtgccaaaatcagtaaagttacactctgaagggatatcatcctttcaaacgggccatctaaggcagctaattatgcattgcattggggtctctactgagaaaaattctgtgacttgaactaaatatttttaaatgtggattttttttgaaactaatatttaatattgcttctcctgcatggcaaaactgcctattctgctatttaaaaaccctcaatgactttattttctactgccgcctttttcatgtgcaaccaaaatgaaaatgtttaaattaactgtgttgtacaaatggtacccaacacaaactttttttaaattagtaatacttttgtttaaagttttaagtttgcattttgactttttttgtaaggatgtatgttgtgtgtttaacctttattaactaacgttaaaagctgtgatgtgtgcgtagaatattacgtatgcatgttcatgtctaaagaatggctgttgatgataaaataaaaatcagctttcatttttct

SEQ ID NO: 2610 - protein, 324 aa, Homo sapiens
MGNLLKVLTCTDLEQGPNFFLDFENAQPTESEKEIYNQVNVVLKDAEGILEDLQSYRGAGHEIREAIQHPADEKLQEKAWGAVVPLVGKLKKFYEFSQRLEAALRGLLGALTSTPYSPTQHLEREQALAKQFAEILHFTLRFDELKMTNPAIQNDFSYYRRTLSRMRINNVPAEGENEVNNELANRMSLFYAEATPMLKTLSDATTKFVSENKNLPIENTTDCLSTMASVCRVMLETPEYRSRFTNEETVSFCLRVMVGVIILYDHVHPVGAFAKTSKIDMKGCIKVLKDQPPNSVEGLLNALRYTTKHLNDETTSKQIKSMLQ

SEQ ID NO: 2611 - DNA, 605 bp, Homo sapiens
ctaatttcctagattagacgttggtagggaggccgataagtcaaagtggcaagtgtcagtgtcacaccaaagggagcgaccagaacagagtaaagcccataaaccgagtaaaaacaaacaacaccacagtccctcaaagctgtaggccacgtagtatgagggaaacagcaccaccgctggggcagtgtgtcatcagaagagcattaggaagaggtccgtatcttgcagtttatgttgaagtttctggtaaagatggtcagaagcgggaacctgacacttcaaagtggaagcttcagttacctgggcgcccaaggggaggtgttctccccagtgatgccgggcaaatgaaccaacagctggatcatacttctcatttgacatgctttttgggggacctacgtggggttcagcactgcgccgggccacagatttgcagggccaatgaggatgtggtccctgccccggagcctgatgctctaagtgctgagggtggagggcttcccggaggaggtgttctctgaggagagtgcatgtggctgggtgtgagctctgagcacagaagtcacttggggatcatagcagttttgtttgtgagggacagtgtg

SEQ ID NO: 2612 - DNA, 1150 bp, Homo sapiens
gctccgggccagccgcggtccagagcgcgcgaggttcggggagctcggccaggctgctggtacctgcgtccgcccggcgagcaggacaggctgctttggtttgtgacctccaggcaggacggccatcctctccagaatgaagatcttcttgccagtgctgctggctgcccttctgggtgtggagcgagccagctcgctgatgtgcttctcctgcttgaaccagaagagcaatctgtactgcctgaagccgaccatctgctccgaccaggacaactactgcgtgactgtgtctgctagtgccggcattgggaatctcgtgacatttggccacagcctgagcaagacctgttccccggcctgccccatcccagaaggcgtcaatgttggtgtggcttccatgggcatcagctgctgccagagctttctgtgcaatttcagtgcggccgatggcgggctgcgggcaagcgtcaccctgctgggtgccgggctgctgctgagcctgctgccggccctgctgcggtttggcccctgaccgcccagaccctgtcccccgatcccccagctcaggaaggaaagcccagccctttctggatcccacagtgtatgggagcccctgactcctcacgtgcctgatctgtgcccttggtcccaggtcaggcccaccccctgcacctccacctgccccagcccctgcctctgccccaagtggggccagctgccctcacttctggggtggatgatgtgaccttccttgggggaccgcggaagggacgagggttccctggagtcttacggtccaacatcaggaccaagtcccatggacatgctgacagggtccccagggagaccgtgtcagtagggatgtgtgcctggctgtgtacgtgggtgtgcagtgcacgtgagagcacgtggcggcttctgggggccatgtttggggagggaggtgtgccagcagcctggagagcctcagtccctgtagccccctgccctggcacagctgcatgcacttcaagggcagcctttgggggttggggtttctgccacttccgggtctaggccctgccccaaatccagccagtcctgccccagcccacccccacattggagccctcctgctgctttggtgcctcaaataaatacagatgtcccc

SEQ ID NO: 2613 - DNA, 2279 bp, Homo sapiens
tgttgagaggctggcctgcggtgatgtggccaaagaggaagagctgggctggggtgagtgttggtcacatggttgaaactaggtggggaggggagtggtccaggggagagtccaggcccagctctgctgggacttgccatgggggtcacgactcatctgcagggaaggtctgggctttatctctgagcacctctgtgtgctgctcaccctgaagtgggggtgggcctgtgcctggcctgtcccctcatcctgggagctcccaatgcccatctgcaaggctgtggacccctcaggagtggcctggagcctggctcccattgccacatggtggctgtgtgtgtggagagggttgatagtggagtggtcaggcccaggctgccctgggggatgaagtgccatcctctgggtgccctggagaaagaagagaactcagtgagccctgtctggtactttcctggaggagggctcccatgctggccctccacccctctgtcccctgtcaccctgaggcctctggatttcctctctgcccttcccaacctgccaacttcacgggtttctggctgggttctggggatggcccctaggggagacgggccaggcacaagcggggctgtgtcaaggtgggtatgcaggggtagcacaagtgtgcagagcctggggaggcatgggcaaagcatggcaggcggcggggcaggggatcttggaaggtcacgggctggggagcagtgtgggcagcggcccagaggtgggaaggccgtagcttagctgggtgtcccctttctgtcctctgcaggtggagccccctgagctgcccgctgatctgcagcactggatctcctacaacgaggccagcagccagctgctccgcatggagagtgggctcagtgatgtcaccaaggaccagtgaccgccaccttcacaccgtctgccctggccaccatcctgggcctgggggctgcccacagatgggcagtctcagccatactctgttccagctggagtagcctcctgaccagcctggcccaccctgctccacccactgggcccccccagttattgatacccctctgtgctgggctccacgctaggcagaaggaggagtggcattggcatcctgacccagctctgccctcaaggtggggatggatgggcaaaggagagtcctgcctggccctacgatgaggccactcatgtgggcctaggtaggggaggatggtgcctggagcagagggacccacaagtgcctcccgagcctagatcctggctcggaccactgcaagggccgaggcagggccagaccagagcatcctgggtacaggcctgggctctccagggcctgggcctgattcaggtgcagtgggcactcctgaagggtcagagcggcatctgccaggcagcccctctggcttccgctgaggtggttgcaggcctggggcagagcctgggtggtcagaggccggggctagaggcagatggaagggaggcatttgctgacagaggacggggcacccgggctccccactgcagtcggccttgcctcctcctcctcctctacctccagtcaggctggacgggagggtagccttgtggctgagaggggtcagactaggtggcacaggggctcctggaaagacagcaggcttcctgctgggcgttcccttgttggagggaatagagtgggggtgggactctgcaggggtgtccttgtccactcgcacccctcgccgcccaccagggccatgctctgtgacttgggctgatccccaccctttctgggcctacagcaccacaggccgctgtacccccttagagctgcccctctctggcctggccggcaggcgtcttcttaactcctttgtcctctatattcagcatgttccttgtcagctgctgggccggccctgccttgcgctagcagagcctctcctggcagcttctcaggtctccctaatggagacaccagcctgaggctccagctgatgccctcagctcccagagagggggtgccccatctagctgggtgcaggggtcactgcttgtcagctcagggccctgtgcccgcttgcctgttcccctacatctgtgcctgcacatccagaactgcctccttgccgctgcctccaggaagcccaccttgagccagagtcaagggctgcagcactgcccgatagaacacgcccgccctcactgctgttcttgccttacagccaccatgggaaagctgcaacctttctgttttatttaaagaaagcccaacattaaagggttttcattgc

SEQ ID NO: 2614 - DNA, 2208 bp, Homo sapiens
gggcaccgtaaccagcgccgcggacaccggcaccggcgccacggactccgcaggaccccgcgcccgccgccgccgctatgctggggctgctggtggcgttgctggccctggggctcgctgtctttgcgctgctggacgtctggtacctggtgcgccttccgtgcgccgtgctgcgcgcgcgcctgctgcagccgcgcgtccgtgacctgctagctgagcagcgcttcccgggccgcgtgctgccctcggacttggacctgctgttgcacatgaacaacgcgcgctacctgcgcgaggccgactttgcgcgcgtcgcgcacctgacccgctgcggggtgctcggggcgctgagggagttgcgggcgcacacggtgctggcggcctcgtgcgcgcgccaccgccgctcgctgcgcctgctggagcccttcgaggtgcgcacccgcctgctgggctgggacgaccgcgcgttctacctggaggcgcgctttgtcagcctgcgggacggtttcgtgtgcgcgctgctgcgcttccggcagcacctgctgggcacctcacccgagcgcgtcgtgcagcacctgtgccagcgcagggtggagccccctgagctgcccgctgatctgcagcactggatctcctacaacgaggccagcagccagctgctccgcatggagagtgggctcagtgatgtcaccaaggaccagtgaccgccaccttcacaccgtctgccctggccaccatcctgggcctgggggctgcccacagatgggcagtctcagccatactctgttccagctggagtagcctcctgaccagcctggcccaccctgctccacccactgggcccccccagttattgatacccctctgtgctgggctccacgctaggcagaaggaggagtggcattggcatcctgacccagctctgccctcaaggtggggatggatgggcaaaggagagtcctgcctggccctacgatgaggccactcatgtgggcctaggtaggggaggatggtgcctggagcagagggacccacaagtgcctcccgagcctagatcctggctcggaccactgcaagggccgaggcagggccagaccagagcatcctgggtacaggcctgggctctccagggcctgggcctgattcaggtgcagtgggcactcctgaagggtcagagcggcatctgccaggcagcccctctggcttccgctgaggtggttgcaggcctggggcagagcctgggtggtcagaggccggggctagaggcagatggaagggaggcatttgctgacagaggacggggcacccgggctccccactgcagtcggccttgcctcctcctcctcctctacctccagtcaggctggacgggagggtagccttgtggctgagaggggtcagactaggtggcacaggggctcctggaaagacagcaggcttcctgctgggcgttcccttgttggagggaatagagtgggggtgggactctgcaggggtgtccttgtccactcgcacccctcgccgcccaccagggccatgctctgtgacttgggctgatccccaccctttctgggcctacagcaccacaggccgctgtacccccttagagctgcccctctctggcctggccggcaggcgtcttcttaactcctctgtcctctatattcagcatgttccttgtcagctgctgggccggccctgccttgcgctagcagagcctctcctggcagcttctcaggtctccctaatggagacaccaggctactaggacactggctggggccaccccctcctgcctaatgcctcaccttacagctggggaaactgaggcctggaatggcccagagtcaccaaggcaaagttggggctggtcccagcctgaggctccagctgatgccctcagctcccagagagggggtgccccatctagctgggtgcaggggtcactgcttgtcagctcagggccctgtgcccgcttgcctgttcccctacatctgtgcctgcacatccagaactgcctccttgccgctgcctccaggaagcccaccttgagccagagtcaagggctgcagcactgcccgatagaacacgcccgccctcactgctgttcttgccttacagccaccatgggaaagctgcaacctttctgttttatttaaagaaagcccaacattaaagggttttcattgcaaaaaaaaaaaaaaaaaa

SEQ ID NO: 2615 - protein, 208 aa, Homo sapiens
MLGLLVALLALGLAVFALLDVWYLVRLPCAVLRARLLQPRVRDLLAEQRFPGRVLPSDLDLLLHMNNARYLREADFARVAHLTRCGVLGALRELRAHTVLAASCARHRRSLRLLEPFEVRTRLLGWDDRAFYLEARFVSLRDGFVCALLRFRQHLLGTSPERVVQHLCQRRVEPPELPADLQHWISYNEASSQLLRMESGLSDVTKDQ

SEQ ID NO: 2616 - DNA, 1923 bp, Homo sapiens
ctttcccggaggctggcagatgcgcgtggtgcggctgctgcggctccgggcggctctgacgctgctcggggaggtcccccgccgcccggcctcccggggtgtcccgggctcgcgcaggacgcagaagggcagtggagccaggtgggagaaggagaagcacgaagacggggtgaagtggagacagctggagcacaagggcccgtacttcgcacccccatacgagccccttcccgacggagtgcgtttcttctatgaaggaaggcctgtgagattgagcgtggcagcggaggaggtcgccactttttatgggaggatgttagatcatgaatacacaacaaaggaggttttccggaagaacttcttcaatgactggcgaaaggaaatggcggtggaagagagggaagtcatcaagagcctggacaagtgtgacttcacggagatccacagatactttgtggacaaggccgcagcccggaaagtcctgagcagggaggagaagcagaagctaaaagaagaggcagaaaaacttcagcaagagttcggctactgtattttagatggtcaccaagaaaaaataggcaacttcaagattgagccgcctggcttgttccgtggccgtggcgaccatcccaagatggggatgctgaagagaaggatcacgccagaggatgtggttatcaactgcagcagggactcgaagatccccgagccgccggcggggcaccagtggaaggaggtgcgctccgataacaccgtcacgtggctggcagcttggaccgagagcgttcagaactccatcaagtacatcatgctgaacccttgctcgaagctgaagggggagacagcttggcagaagtttgaaacagctcgacgcctgcggggatttgtggacgagatccgctcccagtaccgggctgactggaagtctcgggaaatgaagacgagacagcgggcggtggccctgtatttcatcgataagctggcactgagagcaggaaatgagaaggaggacggtgaggcggccgacaccgtgggctgctgttccctccgcgtggagcacgtccagctgcacccggaggccgatggctgccaacacgtggtggaatttgacttcctggggaaggactgcatccgctactacaacagagtgccggtggagaagccggtgtacaagaacttacagctctttatggagaacaaggacccccgggacgacctcttcgacaggctgaccacgaccagcctgaacaagcacctccaggagctgatggacgggctgacggccaaggtgttccggacctacaacgcctccatcactctgcaggagcagctgcgggccctgacgcgcgccgaggacagcatagcagctaagatcttatcctacaaccgagccaaccgagtcgtggccattctctgcaaccatcagcgagcaacccccagtacgttcgagaagtcgatgcagaatctccagacgaagatccaggcaaagaaggagcaggtggctgaggccagggcagagctgaggagggcgagggctgagcacaaagcccaaggggatggcaagtccaggagtgtcctggagaagaagaggcggctcctggagaagctgcaggagcagctggcgcagctgagtgtgcaggccacggacaaggaggagaacaagcaggtggccctgggcacgtccaagctcaactacctggaccccaggatcagcattgcctggtgcaagcggttcagggtgccagtggagaagatctacagcaaaacacagcgggagaggttcgcctgggctctcgccatggcaggagaagactttgaattctaacgacgagccgtgttgaaacttcttttgtatgtgtgtgtgtttttttcactattaaagcagtactggggaattttgtacaataaaaaaaaaaaaaaaaa

SEQ ID NO: 2617 - protein, 601 aa, Homo sapiens
MRVVRLLRLRAALTLLGEVPRRPASRGVPGSRRTQKGSGARWEKEKHEDGVKWRQLEHKGPYFAPPYEPLPDGVRFFYEGRPVRLSVAAEEVATFYGRMLDHEYTTKEVFRKNFFNDWRKEMAVEEREVIKSLDKCDFTEIHRYFVDKAAARKVLSREEKQKLKEEAEKLQQEFGYCILDGHQEKIGNFKIEPPGLFRGRGDHPKMGMLKRRITPEDVVINCSRDSKIPEPPAGHQWKEVRSDNTVTWLAAWTESVQNSIKYIMLNPCSKLKGETAWQKFETARRLRGFVDEIRSQYRADWKSREMKTRQRAVALYFIDKLALRAGNEKEDGEAADTVGCCSLRVEHVQLHPEADGCQHVVEFDFLGKDCIRYYNRVPVEKPVYKNLQLFMENKDPRDDLFDRLTTTSLNKHLQELMDGLTAKVFRTYNASITLQEQLRALTRAEDSIAAKILSYNRANRVVAILCNHQRATPSTFEKSMQNLQTKIQAKKEQVAEARAELRRARAEHKAQGDGKSRSVLEKKRRLLEKLQEQLAQLSVQATDKEENKQVALGTSKLNYLDPRISIAWCKRFRVPVEKIYSKTQRERFAWALAMAGEDFEF

SEQ ID NO: 2618 - DNA, 1662 bp, Homo sapiens
gatggcggcggagcaggaccccgaggcgcgcgcggggcggccgctgctcactgacctctaccaggccaccatggcgttgggctattggcgcgcgggccgggcgcgggacgccgccgagttcgagctcttcttccgccgctgcccgttcggcggcgccttcgccttggtagccggcttgcgcgactgtgtgcgcttcctgcgcgccttccgcctgcgggacgccgacgtgcagttcctggcctcggtgctgcccccagacacggatcctgcgttcttcgagcaccttcgggccctcgactgctccgaggtgacggtgcgagccctgcccgaggctccctcgccttccccggagtgccgctcctgcaggtgtccgggccgctcctggtggtgcagctgctggagacaccgctgctctgcctggtcagctacgccagcctggtggccaccaacgcagcgcgcgttcgcttgatcgcagggccagagaagcggctgctagagatgggcctgaggcgggctcagggcccgatggggcctgacagcctccacctacagctacctgggcggcttcgacagcagcagcaacgtgctagcgggccagctgcgaggtgtgccggtggccgggaccctggcccactccttcgtcacttccttttcaggcagcgaggtgccccctgacccgatgttggcgccagcagctggtgagggccctggggtggacctggcggccaaagcccaggtgtggctggagcaggtgtgtgcccacctggggctgggggtgcaggagccgcatccaggcgagcgggcagcctttgtggcctatgccttggcttttccccgggccttccagggcctcctggacacctacagcgtgtggaggagtggtctccccaacttcctagcagtcgccctggccctgggagagctgggctaccgggcagtgggcgtgaggctggacagtggtgacctgctacagcaggctcaggagatccgcaaggtcttccgagctgctgcagcccagttccaggtgccctggctggagtcagtcctcatcgtagtcagcaacaacattgacgaggaggcgctggcccgactggcccaggagggcagtgaggtgaatgtcattggcattggcaccagtgtggtcacctgcccccaacagccttccctgggtggtgtctataagctggtggccgtggggggccagccacgaatgaagctgaccgaggaccccgagaagcagacgttgcctgggagcaaggctgctttccggctcctgggctctgacgggtctccactcatggacatgctgcagttagcagaagagccagtgccacaggctgggcaggagctgagggtgtggcctccaggggcccaggagccctgcaccgtgaggccagcccaggtggagccactactgcggctctgcctccagcagggacagctgtgtgagccgctcccatccctggcagagtctagagccttggcccagctgtccctgagccgactcagccctgagcacaggcggctgcggagccctgcacagtaccaggtggtgctgtccgagaggctgcaggccctggtgaacagtctgtgtgcggggcagtccccctgagactcggagcggggctgactggaaacaacacgaatcactcacttttcccc

SEQ ID NO: 2619 - DNA, 816 bp, Homo sapiens
cagaaaaatggctacaaacttcctagcacatgagaagatctggttcgacaagttcaaatatgacgacgcagaaaggagattctacgagcagatgaacgggcctgtggcaggtgcctcccgccaggagaacggcgcccgtgatcctccgtgacattgcgagagccagagagaacatccagaaatccctggctggaagctcaggccccggggcctccagcggcaccagcggagaccacggtgagctcgtcgtccggattgccagtctggaagtggagaaccagagtctgcgtggcgtggtacaggagctgcagcaggccatctccaagctggaggcccggctgaacgtgctggagaagagctcgcctggccaccgggccacggccccacagacccagtgacaatgaggaggaggacaaggaggcggcacagctgcgggaggagcggctacggcagtacgcggagaagaaggccaagaagcctgcactggtggccaagtcctccatcctgctggatgtcaagccttgggatgatgagacggacatggcccagctggaggcctgtgtgcgctctatccagctggacgggctggtctggggggcttccaagctggtgcccgtgggctacggtatccggaagctacagattcagtgtgtggtggaggacgacaaggtggggacagacttgctggaggaggagatcaccaagtttgaggagcacgtgcagagtgtcgatatcgcagctttcaacaagatctgaagcctgagtgtgtgtacgtgcgcgcgtgcgtgaggccctgccacgattaaagactgagac

SEQ ID NO: 2620 - DNA, 2331 bp, Homo sapiens
agcgcagcggcgtccgaggcaacaagatggcagctgcggagccgtctccgcggcgcgtgggcttcgtgggcgcgggccgcatggcgggggccatcgcgcagggcctcatcagagcaggaaaagtggaagctcagcacatactggccagtgcaccaacagacaggaacctatgtcactttcaagctctgggttgccggaccacgcactccaaccaggaggtgctacagagctgcctgctcgtcatctttgccaccaagcctcatgtgctgccagctgtcctggcagaggtggctcctgtggtcaccactgaacacatcttggtgtccgtggctgctggggtgtctctgagcaccctggaggagctgctgcccccaaacacacgggtgctgcgggtcttgcccaacctgccctgtgtggtccaggaaggggccatagtgatggcgcggggccgccacgtggggagcagcgagaccaagctcctgcagcatctgctggaggcctgtgggcggtgtgaggaggtgcctgaagcctacgtcgacatccacactggcctcagtggcagtggcgtggccttcgtgtgtgcattctccgaggccctggctgaaggagccgtcaagatgggcatgcccagcagcctggcccaccgcatcgctgcccagaccctgctggggacggccaagatgctgctgcacgagggccaacacccagcccagctgcgctcagacgtgtgcaccccgggtggcaccaccatctatggactccacgccctggagcagggcgggctgcgagcagccaccatgagcgccgtggaggctgccacctgccgggccaaggagctcagcagaaagtaggctgggctctggccatcctttcctgcctctgtgcccctgcctctccctgtgtcccttcccctgaggactgcggctccctccctcctgcatgagggtctcctactgctccttctccccttgcacagggaaatgcagggggcaggacttgggaggttccagcaggcgggggagccccgaccagtggggacactcctccctccccagtgagcagaaggcaccgtggtggtggctctgccccttgctgcagtgagcccaccttgctgcaacattggttctgaggggcccaagagatggcgtcttggtcatttgcccgcatggttgggcagttggttgaggccatgaacagaacttacggtaacaggcacggctggcccaatgcctggtctggagctggagcttgcctttggctttccaggtggctccgtgcagctacagccaggccggctgcctcatctcagctctagggggcacgagccatatggggtctgcacaagagaccctctcccctgcagtaaagccaggggccctggcctgatggggcccccatggggagctggagcctgccctgcagcctggagaagagggtggctgtggtgggcgtgctcatcccctgctaaggagcaggagctgctgggccaggtctgcggcagtgctggggtggcaccaggtgggcagtggtaggtggggtggcttgaggtctgggagggtggccctggccagccaggacacatgcagacccctggcttagtctggatacaggctccctctttcctcccaatcctaagctcctgacaagtggccaggtggctctgggccctcctgccccgtgcctaggtcaggggtcctggaataccccgtagctctggcaccaccacactggcctctgatggcaagacttggcccctccacctgtccctaacggacggcaggtcaggaaagccaggactcaggggagaagcaaacccccaggattgaaggctagggttctagggcctttgggtggggagggcccgggccggacagcctcagctccgtcccctgccccacaagattcacctgggcctccagtcccacgctggccccaactgctgcagctctcggcttccgcccaacagcctctggaggtgaggcgggagcatgccctcagcgaggctgggcggcgggtcctgctgtgccatctccctgtgcgcctgagcagatcaatccaccagtgcaaaacagggctaacggcacctgcaggacagcagcacgctccatccctcatgctcagctgcctctgcggccacggacttctgcccttcatctgctctctcttactctcctgagcctagcccgtccgtaagctccctcccctgcctggttcccagggcaggctgactcagttgactgcttggtccaagcctggccctggcacttgtcagggtcagcctaaggagatgggaataaagaggccagagagcaccaagtgagctcatgtttc

SEQ ID NO: 2621 - protein, 274 aa, Homo sapiens
MAAAEPSPRRVGFVGAGRMAGAIAQGLIRAGKVEAQHILASAPTDRNLCHFQALGCRTTHSNQEVLQSCLLVIFATKPHVLPAVLAEVAPVVTTEHILVSVAAGVSLSTLEELLPPNTRVLRVLPNLPCVVQEGAIVMARGRHVGSSETKLLQHLLEACGRCEEVPEAYVDIHTGLSGSGVAFVCAFSEALAEGAVKMGMPSSLAHRIAAQTLLGTAKMLLHEGQHPAQLRSDVCTPGGTTIYGLHALEQGGLRAATMSAVEAATCRAKELSRK

SEQ ID NO: 2622 - DNA, 522 bp, Homo sapiens
cgcgtggtgcggctgctgcggctccgggcggctctgacgtgctcggggaggtccccgccgcccgcctcccgggatgtccgctcgcgcaggacgcagaagggcagtggagccagaaacagccagaaaggccctttcagaaatgtctgttgcacatgctttcccctctcagacccttcagagacttcctgttgctctgaggacactcatcccagccgaccaggccaccaggcccccaacagcactacctggctggggtcacgtgcaggtctcctggctctggcaggtgggagaaggagaagcacgaagacggggtgaagtggagacagctggagcacaagggcccgtacttcgcacccccatacgagccccttcccgatggagtgcgtttcttctatgaaggaaggcctgtgagattgagcgtggcagcggaggaggtcgccactttttatgggaggatgttagatcatgaatacacaacaaaggaggttttccggaagaacttcttcaatgactggcgaaagg

SEQ ID NO: 2623 - DNA, 3255 bp, Homo sapiens
gcggactcgggagatggaggaaaaggagatattacggcggcagatccgcctactgcagggtctgattgatgactacaaaaccctccacggcaatgccccggcccctggtaccccagcagcttctgggtggcagccacccacttaccacagtggcagagcctttagtgcccgctaccctcgtccaagccggaggggctactcttcccaccatgggccttcgtggcgcaagaaatactccctcgtgaatcggcccccgggaccctcagaccctcctgccgaccatgctgtgcggccgttgcacggggcccgggggggccagcctcctgtcccgcagcagcatgtccttgagagacaggtccagctcagtcagggtcagaacgtggtcatcaaagttaaaccgccatcaaagtctggctctgccagtgcctcaggggcccagcggggctctttggaagaatatgaggacaccccctggagtgaccaaaggccccgggaaggtgaaggtgagccccctcggggacagctgcagccctcgaggccaacaagagccagggggacctgcagtgtggaagatcctcttctggtctgccagaaggagcctggtaagcccaggatggtgaagtcagtgggcagtgtgggcgacagcccctgggagccccgccggacagtcagtgagagcgtgattgccgtcaaggcgagcttcccatcctccgctctgcccccacgcactggcgtggccctgggccggaagctgggttctcattccgtggccagctgtgctccacagctccttggggacaggagagtagatgctggccacacagatcagccagttccgtctggctcagtggggggtcccgccagaccggcctcaggacccaggcaggcccgggaggcctcgctggttgtgacctgtcgaactaacaagttccggaaaaacaactacaaatgggtggctgcctcctcgaagagtccccgggttgctcggagggccctcagtcccagagtggctgcagagaatgtgtgcaaggcctctgctggcatggcaaacaaggtggagaagccgcagctcatagctgacccagagcccaagcccaggaagccagccacgtcctccaagccagggtctgcccccagcaagtacaagtggaaggcctccagcccctctgcctcctcctcttcctccttccgttggcagtcggaggccggcagcaaggaccatgcctcccagctctccccagtcctgtctaggtccccgtcgggggacagaccagcagtaggacacagtggcttgaagcccctctctggggagaccccgctctcggcttacaaagtgaagagccgcaccaagatcatccggagacgcggcagcacaagccttcctggagacaagaaaagcggcacctcacctgccgccaccgccaagagccacctcagcctccggcggagacaggccctcagggggaagagcagccctgtcctgaagaagacccccaacaagggcctggtacaggtcaccacgcaccgactatgtcgcctgccaccgagccgggcccacctccccaccaaggaagcgtccagcctgcatgctgtgcggactgcacccaccagcaaggtgatcaagacccgctaccgcattgtcaagaagacgccggcctcgcctctcagcgccccgcccttccccctgtctctgccctcctggcgggcccggcggctctcactatccaggtccctggtgctgaaccgcctgcgtccagttgccagcgggggtgggaaagcccaaccgggctccccttggtggcggagcaaaggctaccgctgcatcggaggggtcctctacaaagtatctgccaacaagctctccaagacctccggccagcccagtgatgcgggcagcaggcccctcctgcgcacaggccggctggatcctgcaggcagctgtagccgttccctggccagccgggcagtgcagcgcagcctggccatcatccggcaggcgcggcagcgcagggagaagaggaaggagtactgcatgtactacaaccgcttcggcaggtgcaaccgtggcgagcgctgcccctacatccacgatcccgagaaggtggccgtgtgcaccaggtttgtccggggcacctgcaagaaaacggatgggacctgccccttctcccaccatgtgtccaaggagaagatgccggtgtgctcctacttcctgaagggcatctgcagcaacagcaactgtccctatagccacgtgtacgtgtcccgcaaggccgaggtctgcagcgacttcctcaaaggctactgccccctgggtgcaaagtgcaagaagaaacacacgctgctgtgccccgactttgcccgcaggggggcgtgtccccgcggcgcccagtgccagctgctccaccgtacccagaaacgccacagtcggcgggcagccacgtcccccgccccagggcccagcgacgcaaccgccaggagcagggtctcggccagccacgggcccaggaagccttcagcatcccagcgccccaccaggcagacgcccagctcggctgccctcactgcggctgccgtggctgcacctccccactgcccaggggggtcagcctctccctcatcctcgaaggcttcctcctcctcctcctcctcctcatcccctcccgcttccttggaccacgaggcaccatctctccaggaggctgccttagcagcagcgtgctccaacaggctctgcaagctgccttccttcatctccctgcagtcctcgccgagcccaggagcccagcccagggtccgggcccctagggcccccctcaccaaggactcagggaagcctctgcacatcaaaccacgtctgtgaggaccccagggaccggcctgcacctacctcagaccctcatccttggagaggaaagaggctctgtccaccactctaccccacaggagggccgcccgccaccaagcctcacctgggggccacagggacactgctctgcctgcctggccctcaaccttccatgaccagcgtgtgcgcagggcctggtcttcctcccccaagccaggcccctgtccccaccccaccaccttccagggtgccaggcagggctggcctccaggcctgtccccgactgccattggcaacagtggccctgcagcccccagccctccccacccaggttttcggcccagtgaagaggccactggccaggcctcccaggcaggtgttttatgttcagcaataaaggttctatccgt

SEQ ID NO: 2624 - protein, 545 aa, Homo sapiens
MEEKEILRRQIRLLQGLIDDYKTLHGNAPAPGTPAASGWQPPTYHSGRAFSARYPRPSRRGYSSHHGPSWRKKYSLVNRPPGPSDPPADHAVRPLHGARGGQPPVPQQHVLERQVQLSQGQNVVIKVKPPSKSGSASASGAQRGSLEEFEETPWSDQRPREGEGEPPRGQLQPSRPTRARGTCSVEDPLLVCQKEPGKPRMVKSVGSVGDSPREPRRTVSESVIAVKASFPSSALPPRTGVALGRKLGSHSVASCAPQLLGDRRVDAGHTDQPVPSGSVGGPARPASGPRQAREASLVVTCRTNKFRKNNYKWVAASSKSPRVARRALSPRVAAENVCKASAGMANKVEKPQLIADPEPKPRKPATSSKPGSAPSKYKWKASSPSASSSSSFRWQSEASSKDHASQLSPVLSRSPSGDRPAVGHSGLKPLSGETPLSAYKVKSRTKIIRRRSSTSLPGDKKSGTSPAATAKSHLSLRRRQALRGKSSPVLKKTPNKGLVQVTTHRLCRLPPSRAHLPTKEASSLHRRGPLQSICQQALQDLRPAQ

SEQ ID NO: 2625 - DNA, 2428 bp, Homo sapiens
ctcctgcgcacgcggcccggtcgctgtcggaagcggctgtgcgggtggcggccggcgcgcggtggggcatggcgggttcgcggggtgcggggcgcacggcggcgccgagcgtgcggccggagaagcggcggtctgagcccgaactggagcctgagcccgagccggagccccccctcctctgcacctctcctctcagccacagcaccggcagcgattctggcgtctccgacagcgaggagagtgtgttctcaggcctggaagattccggcagtgacagcagtgaggatgatgacgaaggcgacgaggagggagaggacggagcccttgatgacgagggccacagtgggattaaaaagaccactgaggagcaggtgcaggccagcactccttgcccgaggacagagatggcgagcgcccggattggggatgagtatgcggaggacagctctgatgaggaggacatccggaacacggtgggcaacgtgcccttggagtggtacgatgacttcccccacgtgggctacgacctggatggcaggcgcatctacaagcccctgcggacccgggatgagctggaccagttcctggacaagatggacgatcctgactactggcgcaccgtgcaggacccgatgacagggcgggacctgagactgacggatgagcaggtggccctggtgcggcggctgcagagtggccagtttggggatgtgggcttcaacccctatgagccggctgtcgacttcttcagcggggacgtcatgatccacccggtgaccaaccgcccggccgacaagcgcagcttcatcccctccctggtggagaaggagaaggtctctcgcatggtgcacgccatcaagatgggctggatccagcctcgccggccccgagaccccacccccagcttctatgacctgtgggcccaggaggaccccaacgccgtgctcgggcgccacaagatgcacgtacctgctcccaagctggccctgccaggccacgccgagtcgtacaacccaccccctgaatacctgctcagcgaggaggagcgcttggcgtgggaacagcaggagccaggcgagaggaagctgagctttttgccacgcaagttcccgagcctgcgggccgtgcctgcctacggacgcttcatccaggaacgcttcgagcgctgccttgacctgtacctgtgcccacggcagcgcaagatgagggtgaatgtagaccctgaggacctcatccccaagctgcctcggccgagggacctgcagcccttccccacgtgccaggccctggtctacaggggccacagtgaccttgtccggtgcctcagtgtctctcctgggggccagtggctggtttcaggctctgacgacggctccctgcggctctgggaggtggccactgcccgctgtgtgaggactgttcccgtggggggcgtggtgaagagtgtggcctggaaccccagccccgctgtctgcctggtggctgcagccgtggaggactcggtgctgctgctgaacccagctctgggggaccggctggtggcgggcagcacagatcagctgttgagcgccttcgtcccgcctgaggagccccccttgcagccggcccgctggctggaggcctcagaggaggagcgccaagtgggcctgcggctgcgcatctgccacgggaagccagtgacgcaggtgacctggcacgggcgtggggactacctggccgtggtgctggccacccaaggccacacccaggtgctgattcaccagctgagccgtcgccgcagccagagtccgttccgccgcagccacggacaggtgcagcgagtggccttccaccctgcccggcccttcctgttggtggcgtcccagcgcagcgtccgcctctaccacctgctgcgccaggagctcaccaagaagctgatgcccaactgcaagtgggtgtccagcctggcggtgcaccctgcaggtgacaacgtcatctgtgggagctacgatagcaagctggtgtggtttgacctggatctttccaccaagccatacaggatgctgagacaccacaagaaggctctgcgggctgtggccttccacccgcggtacccactctttgcgtcaggctcggacgacggcagtgtcatcgtctgccatggcatggtgtacaatgaccttctgcagaaccccttgctggtgcccgtcaaggtgctgaagggacacgtgctgacccgagatctgggagtgctggacgtcatcttccaccccacccagccgtgggtcttctcctcgggggcagacgggactgtccgcctcttcacctagctgttctgcctgcctggggctggggtggtcgtgctgaagtcaacagagcctttaccctgtgctgcctggtgctcccaccttcttgaattggggttgccaacaaagccgcccccaccaca

SEQ ID NO: 2626 - DNA, 2133 bp, Homo sapiens
gcccgttgcaagatggcggcggccatgctgggccccggggctgtgtgtgcgcagcgggcggcggcgcggcccggaaggctggcgcggcgacggcgttagcccggccctcggcccctctttgcggccgctccctccgcctattccctccttgctcgagatggatctgcccgtgggccccggcgcggcggggcccagcaacgtcccggccttcctgaccaagctgtggaccctcgtgagcgacccggacaccgacgcgctcatctgctggagcccgagcgggaacagcttccacgtgttcgaccagggccagtttgccaaggaggtgctgcccaagtacttcaagcacaacaacatggccagcttcgtgcggcagctcaacatgtatggcttccggaaagtggtccacatcgagcagggcggcctggtcaagccagagagagacgacacggagttccagcacccatgcttcctgcgtggccaggagcagctccttgagaacatcaagaggaaagtgaccagtgtgtccaccctgaagagtgaagacataaagatccgccaggacagcgtcaccaagctgctgacggacgtgcagctgatgaaggggaagcaggagtgcatggactccaagctcctggccatgaagcatgagaatgaggctctgtggcgggaggtggccagccttcggcagaagcatgcccagcaacagaaagtcgtcaacaagctcattcagttcctgatctcactggtgcagtcaaaccggatcctgggggtgaagagaaagatccccctgatgctgaacgacagtggctcagcacattccatgcccaagtatagccggcagttctccctggagcacgtccacggctcgggcccctactcggccccctccccagcctacagcagctccagcctctacgcccctgatgctgtggccagctctggacccatcatctccgacatcaccgagctggctcctgccagccccatggcctcccccggcgggagcatagacgagaggcccctatccagcagccccctggtgcgtgtcaaggaggagccccccagcccgcctcagagcccccgggtagaggaggcgagtcccgggcgcccatcttccgtggacaccctcttgtccccgaccgccctcattgactccatcctgcgggagagtgaacctgcccccgcctccgtcacagccctcacggacgccaggggccacacggacaccgagggccggcttccttcccccccgcccacctccacccatgaaaagtgcttcagggtagcctgcctggacaagaatgagctcagtgaccacttggatgctatggactccaacctggataacctgcagaccatgctgagcagccacggcttcagcgtggacaccagtgccctgctggacctgttcagcccctcggtgaccgtgcccgacatgagcctgcctgaccttgacagcagcctggccagtatccaagagctcctgtctccccaggagccccccaggcctcccgaggcagagaacagcagcccggattcagggaagcagctggtgcactacacagcgcagccgctgttcctgctggaccccggctccgtggacaccgggagcaacgacctgccggtgctgtttgagctgggagagggctcctacttctccgaaggggacggcttcgccgaggaccccaccatctccctgctgacaggctcggagcctcccaaagccaaggaccccactgtctcctagaggccccggaggagctgggccagccgcccacccccacccccagtgcagggctggtcttggggaggcagggcagcctcgcggtcttgggcactggtgggtcggccgccatagccccagtaggacaaacgggctcgggtctgggcagcacctctggtcaggagggtcaccctggcctgccagtctgccttcccccaaccccgtgtcctgtggtttggttggggcttcacagccacacctggactgaccctgcaggttgttcatagtcagaattgtattttggatttttacacaactgtcccgttccccgctccacagagatacacagatatatacacacagtggatggacggacaagacaggcagagatctataaacagacaggctct

SEQ ID NO: 2627 - DNA, 1890 bp, Homo sapiens
gaagctctgggaaggggatgcccccgagggtgccagtccagctagctgccccacccctcaggcccagcctggcccccaagctccccactctggtgccccgagcagccctgtgggcaagcagccgccgccatggccgagcacctggagctgctggcagagatgcccatggtgggcaggatgagcacacaggagcggctgaagcatgcccagaagcggcgcgcccagcaggtgaagatgtgggcccaggctgagaaggaggcccagggcaagaagggtcctggggagcgtccccggaaggaggcagccagccaagggctcctgaagcaggtcctcttccctcccagtgttgtccttctggaggccgctgcccgaaatgacctggaagaagtccgccagttccttgggagtggggtcagccctgacttggccaacgaggacggcctgacggccctgcaccagtgctgcattgatgatttccgagagatggtgcagcagctcctggaggctggggccaacatcaatgcctgtgacagtgagtgctggacgcctctgcatgctgcggccacctgcggccacctgcacctggtggagctgctcatcgccagtggcgccaatctcctggcggtcaacaccgacgggaacatgccctatgacctgtgtgatgatgagcagacgctggactgcctggagactgccatggccgaccgtggcatcacccaggacagcatcgaggccgcccgggccgtgccagaactgcgcatgctggacgacatccggagccggctgcaggccggggcagacctccatgcccccctggaccacggggccacgctgctgcacgtcgcagccgccaacgggttcagcgaggcggctgccctgctgctggaacaccgagccagcctgagcgctaaggaccaagacggctgggagccgctgcacgccgcggcctactggggccaggtgcccctggtggagctgctcgtggcgcacggggccgacctgaacgcaaagaggtgcgggccaagcttctggaactgaaacacaagcacgacgccctcctgcgcgcccagagccgccagcgctccttgctgcgccgccgcacctccagcgccggcagccgcgggaaggtggtgaggcgggtgagcctaacccagcgcaccgacctgtaccgcaagcagcacgcccaggaggccatcgtgtggcaacagccgccgcccaccagcccggagccgcccgaggacaacgatgaccgccagacaggcgcagagctcaggccgccgcccccggaggaggacaaccccgaagtggtcaggccgcacaatggccgagtagggggctccccagtgcggcatctatactccaagcgactagaccggagtgtctcctaccagctgagccccctggacagcaccaccccccacaccctggtccacgacaaggcccaccacaccctggctgacctgaagcgccagcgagctgctgccaagctgcagcgacccccacctgaggggcccgagagccctgagacagctgagcctggcctgcctggtgacacggtgaccccccagcctgactgtggcttcagggcaggcggggacccacccctgctcaagctcacagccccggcggtggaggctcccgtggagaggaggccgtgctgcctgctcatgtgaggctgttgctcagcatgcaggggccctgtctcgggcacagcccaaggctgcctccccacggtgcgtgccctggtgctgcgggtgcagcacggaaaccccggcttctactgtacaggacactggcccctctcaggtcagaagacatgcctggagggatgtctggctgcaaagactatttttatcctgcaactcttgataaagggctgttttgccatgg

SEQ ID NO: 2628 - DNA, 291 bp, Homo sapiens
gacctgaagcgccagcgagctgctgccaagctgcagcgacccccacctgaggggcccgagagccctgagacagctgagcctggcctgcctggtgacacggtgaccccccagcctgactgtggcttcagggcaggcggggacccacccctgctcaagctcacagccccacggtgcgtgccctggtgctgcgggtgcagcacggaaaccccggcttctactgtacaggacactggcccctctcaggtcagaagacatgcctggagggatgtctggctgcaaagactattttta

SEQ ID NO: 2629 - DNA, 3296 bp, Homo sapiens
atggtcaccatggagcccgggtacctgttcctgggttctcgcctgggcaattccctcctcctcaagtacacggagaagctgcaggagcccccggccagtgctgtccgtgaggctgccgacaaggaagagcctccctcaaagaagaagcgagtggatgcgacggccggctggtcagctgcgggtaagtcggtgccgcaggatgaggtggacgagattgaagtgtacggcagcgaggcccagtcgggaacacagctggccacctactcctttgaggtgtgtgacagcatcctgaacattggaccctgtgccaatgccgccgtgggcgaacctgccttcctctctaaagagtttcagaacagccccgagccggacctggagattgtggtttgctccggccacgggaagaacggggctttgtcggtgctgcagaagagcatccggccccaggtggtgacaacatttgagcttcccggctgctatgacatgtggacagtcatcgccccggtgcgtaaggaggaggaggacaatcccaagggggagggcacagagcaggaacccagcaccacccctgaagcagacgacgacggccgcagacacggattcctgattctgagccgggaagactccaccatgatcctgcagacggggcaggagatcatggagctggacaccagtggcttcgccactcagggccccacggtctttgctgggaacatcggggacaaccgctacattgtccaagtgtcaccactgggcatccgcctgctggaaggagtgaatcagctgcacttcatccccgtggacctgggcgcccccatcgtgcagtgcgccgtggccgacccctatgtggtcatcatgagtgccgagggccacgtcaccatgttcctgctgaagagtgactcctacggtggccgccaccaccgcctggcgctgcacaagcccccgctgcaccatcagtccaaggtgattacgctgtgcctgtaccgagacctcagcggcatgttcaccactgagagccgcctgggtggggcccgtgacgagctcgggggccgcagtggcccggaggccgagggcctgggctcagagactagccccacagtggatgacgaggaggagatgctgtatggggattcgggctccctcttcagccccagcaaggaggaggcccgaagaagcagccagccccctgctgaccgggaccctgcacccttccgggcagagcctacccactggtgcctgctggtgcgggagaatggcaccatggagatctaccagcttcccgactggcggctggtgttcctggtgaagaacttccctgtggggcagcgggtccttgtggacagctcctttggacagcccactacacagggcgaggcccgcagggaggaggccacgcgccagggggagctgcccctcgtcaaggaggtgctgctggtggcgctgggcagccgccagagcaggccctacctgctggtgcatgtggaccaagagctgcttatctacgaggccttcccccacgactctcagctcggccagggcaatctcaaagtccgctttaagaaggtccctcacaacatcaacttccgtgagaagaagccaaagccatccaagaagaaagcagaaggtggcggcgcagaggagggggctggggcccggggcctcgtggcgcgtttccgctacttcgaggatatttatggctactcaggggtcttcatctgcggcccctcccctcactggctcttggtgaccggccgaggggctctgcggctacaccccatggccatcgacggcccggtcgactctttcgctccattccacaatgtcaactgtccccgcggcttcctgtacttcaacagacagggcgagctgaggatcagtgtcctgcctgcctacctgtcctatgatgccccatggcctgtcaggaagatcccgcagcgttgcacggcccactatgtggcttaccacgtggagtttaaggtgtatgctgtggccaccagcaccaacacgccgtgtgcccgcatcccacgcatgactggcgaggagaaggagtttgagaccatcgagagagatgagcggtacatccacccccagcaggaggccttctccatccagctcatctccccggtcagctgggaggctattcccaatgccaggatcgagctgcaggagtgggagcatgtgacctgcatgaagacagtgtctctgcgcagtgaggagaccgtgtcgggcctcaaaggctacgtggccgccgggacctgcctcatgcagggggaggaggtcacgtgccgagggcggatcttgatcatggatgtgattgaggtggtgcccgagcctggccagcccttgaccaagaacaagttcaaagtcctttacgagaaggagcagaaggggcccgtgaccgccctgtgccactgcaatggccacctggtgtcggccatcggccagaagattttcctgtggagcctgcgggccagcgagctgacgggcatggccttcatcgacacgcagctctacatacaccagatgatcagcgtcaagaacttcatcctggcagccgacgtcatgaagagcatttcgctgctgcgctaccaggaggaaagcaagacgctgagcctggtgtcgcgggatgccaagcccctggaggtgtacagcgtggacttcatggtggacaatgcccagctgggttttctggtgtctgaccgcgaccgcaacctcatggtgtacatgtacctgcccgaagccaaggagagtttcgggggcatgcgcctgctgcgtcgggcagacttccacgtgggtgcccacgtgaacacgttttggaggaccccgtgccggggggccactgaagggctcagcaaaaagtcggtcgtgtgggagaataagcacatcacgtggtttgccaccctggacggcggcatcgggctgctgctgcccatgcaggagaagacctaccggcggctgctgatgctgcagaacgcgctgaccaccatgctgccacaccacgccggcctcaacccccgcgccttccggatgctgcacgtggaccgccgcaccctccagaatgccgtgcgcaacgtgctggatggggagctgctcaaccgctacctgtacctgagcaccatggagcgcagcgaggtagccaagaagatcggcaccacaccagacataatcctggacgacttgctggagacggaccgcgtcaccgcccacttctagccccgtggatgccgtcaccaccagcacacggaactacctcccaccccctttttgtacaaaacacaaggaaaaacattttttgc

SEQ ID NO: 2630 - protein, 1443 aa, Homo sapiens
MYAVYKQAHPPTGLEFSMYCNFFNNSERNLVVAGTSQLYVYRLNRDAEALTKNDRSTEGKAHREKLELAASFSFFGNVMSMASVQLAGAKRDALLLSFKDAKLSVVEYDPGTHDLKTLSLHYFEEPELRDGFVQNVHTPRVRVDPDGRCAAMLVYGTRLVVLPFRRESLAEEHEGLVGEGQRSSFLPSYIIDVRALDEKLLNIIDLQFLHGYYEPTLLILFEPNQTWPGRVAVRQDTCSIVAISLNITQKVHPVIWSLTSLPFDCTQALAVPKPIGGVVVFAVNSLLYLNQSVPPYGVALNSLTTGTTAFPLRTQEGVRITLDCAQATFISYDKMVISLKGGEIYVLTLITDGMRSVRAFHFDKAAASVLTTSMVTMEPGYLFLGSRLGNSLLLKYTEKLQEPPASAVREAADKEEPPSKKKRVDATAGWSAAGKSVPQDEVDEIEVYGSEAQSGTQLATYSFEVCDSILNIGPCANAAVGEPAFLSKEFQNSPEPDLEIVVCSGHGKNGALSVLQKSIRPQVVTTFELPGCYDMWTVIAPVRKEEEDNPKGEGTEQEPSTTPEADDDGRRHGFLILSREDSTMILQTGQEIMELDTSGFATQGPTVFAGNIGDNRYIVQVSPLGIRLLEGVNQLHFIPVDLGAPIVQCAVADPYVVIMSAEGHVTMFLLKSDSYGGRHHRLALHKPPLHHQSKVITLCLYRDLSGMFTTESRLGGARDELGGRSGPEAEGLGSETSPTVDDEEEMLYGDSGSLFSPSKEEARRSSQPPADRDPAPFRAEPTHWCLLVRENGTMEIYQLPDWRLVFLVKNFPVGQRVLVDSSFGQPTTQGEARREEATRQGELPLVKEVLLVALGSRQSRPYLLVHVDQELLIYEAFPHDSQLGQGNLKVRFKKVPHNINFREKKPKPSKKKAEGGGAEEGAGARGLVARFRYFEDIYGYSGVFICGPSPHWLLVTGRGALRLHPMAIDGPVDSFAPFHNVNCPRGFLYFNRQGELRISVLPAYLSYDAPWPVRKIPQRCTAHYVAYHVEFKVYAVATSTNTPCARIPRMTGEEKEFETIERDERYIHPQQEAFSIQLISPVSWEAIPNARIELQEWEHVTCMKTVSLRSEETVSGLKGYVAAGTCLMQGEEVTCRGRILIMDVIEVVPEPGQPLTKNKFKVLYEKEQKGPVTALCHCNGHLVSAIGQKIFLWSLRASELTGMAFIDTQLYIHQMISVKNFILAADVMKSISLLRYQEESKTLSLVSRDAKPLEVYSVDFMVDNAQLGFLVSDRDRNLMVYMYLPEAKESFGGMRLLRRADFHVGAHVNTFWRTPCRGATEGLSKKSVVWENKHITWFATLDGGIGLLLPMQEKTYRRLLMLQNALTTMLPHHAGLNPRAFRMLHVDRRTLQNAVRNVLDGELLNRYLYLSTMERSEVAKKIGTTPDIILDDLLETDRVTAHF

SEQ ID NO: 2631 - DNA, 1972 bp, Homo sapiens
aatggacgagagaggcggccgtccattagttagcggctccggagcaacgcagccgttgtccttgaggccgacgggcctgacgcgggcgggttgaacgcgctggtgaggcggtcacccgggctacggcggccggcagggggcagtggcggccgttgtctagggcccggaggtggggccgcgcgcctcgggcgctacgaacccggcaggcccacgcttggctgcggccgggtgcgggctgaggccatgggcgaccgcggcagctcccggcgccggaggacagggtcgcggccctcgagccacggcggcggcgggcctgcggcggcggaagaggaggtgcgggacgccgctgcgggccccgacgtgggagccgcgggggacgcgccagccccggcccccaacaaggacggagacgccggcgtgggcagcggccactgggagctgaggtgccatcgcctgcaggattctttattcagctctgacagtggcttcagcaactaccgtggcatcctgaactggtgtgtggtgatgctgatcttgagcaatgcccggttatttctggagaacctcatcaagtatggcatcctggtggaccccatccaggtggtttctctgttcctgaaggatccctatagctggcccgccccatgcctggttattgcggccaatgtctttgctgtggctgcattccaggttgagaagcgcctggcggtgggtgccctgacggagcaggcgggactgctgctgcacgtggccaacctggccaccattctgtgtttcccagcggctgtggtcttactggttgagtctatcactccagtgggctccctgctggcgctgatggcgcacaccatcctcttcctcaagctcttctcctaccgcgacgtcaactcatggtgccgcagggccagggccaaggctgcctctgcagggaagaaggccagcagtgctgctgccccgcacaccgtgagctacccggacaatctgacctaccgcgatctctactacttcctcttcgcccccaccttgtgctacgagctcaactttccccgctctccccgcatccggaagcgctttctgctgcgacggatccttgagatgctgttcttcacccagctccaggtggggctgatccagcagtggatggtccccaccatccagaactccatgaagcccttcaaggacatggactactcacgcatcatcgagcgcctcctgaagctggcggtccccaatcacctcatctggctcatcttcttctactggctcttccactcctgcctgaatgccgtggctgagctcatgcagtttggagaccgggagttctaccgggactggtggaactccgagtctgtcacctacttctggcagaactggaacatccctgtgcacaagtggtgcatcagacacttctacaagcccatgcttcgacggggcagcagcaagtggatggccaggacaggggtgttcctggcctcggccttcttccacgagtacctggtgagcgtccctctgcgaatgttccgcctctgggcgttcacgggcatgatggctcagatcccactggcctggttcgtgggccgctttttccagggcaactatggcaacgcagctgtgtggctgtcgctcatcatcggacagccaatagccgtcctcatgtacgtccacgactactacgtgctcaactatgaggccccagcggcagaggcctgagctgcacctgagggcctggcttctcactgccacctcacacccgctgccagagcccacctctcctcctaggcctcgagtgctggggatgggcctggctgcacagcatcctcctctggtcccagggaggcctctctgcccctatggggctctgtcctgcacccctcagggatggcgacagcaggccagacacagtctgatgccagctgggagtcttgctgaccctgccccgggtccgagggtgtcaataaagtgctgtccagtg

SEQ ID NO: 2632 - protein, 488 aa, Homo sapiens
MGDRGSSRRRRTGSRPSSHGGGGPAAAEEEVRDAAAGPDVGAAGDAPAPAPNKDGDAGVGSGHWELRCHRLQDSLFSSDSGFSNYRGILNWCVVMLILSNARLFLENLIKYGILVDPIQVVSLFLKDPYSWPAPCLVIAANVFAVAAFQVEKRLAVGALTEQAGLLLHVANLATILCFPAAVVLLVESITPVGSLLALMAHTILFLKLFSYRDVNSWCRRARAKAASAGKKASSAAAPHTVSYPDNLTYRDLYYFLFAPTLCYELNFPRSPRIRKRFLLRRILEMLFFTQLQVGLIQQWMVPTIQNSMKPFKDMDYSRIIERLLKLAVPNHLIWLIFFYWLFHSCLNAVAELMQFGDREFYRDWWNSESVTYFWQNWNIPVHKWCIRHFYKPMLRRGSSKWMARTGVFLASAFFHEYLVSVPLRMFRLWAFTGMMAQIPLAWFVGRFFQGNYGNAAVWLSLIIGQPIAVLMYVHDYYVLNYEAPAAEA

SEQ ID NO: 2633 - DNA, 894 bp, Mus musculus
ggccgcgctggtgaacaggacccgtcgccatgggccgtgtgatccgtggacagaggaagggcgccgggtctgtgttccgcgcgcacgtgaagcaccgtaaaggcgctgcgcgcctgcgcgccgtggatttcgctgagcggcacggctacatcaagggcatcgtcaaggacatcatccacgacccgggccgcggcgcgcccctcgccaaggtggtcttccgggatccgtatcggtttaagaagcggacggagctgttcattgccgccgagggcattcacacgggccagtttgtgtattgcggcaagaaggcccagctcaacattggcaatgtgctccctgtgggcaccatgcctgagggtacaatcgtgtgctgcctggaggagaagcctggagaccgtggcaagctggcccgggcatcagggaactatgccaccgttatctcccacaaccctgagaccaagaagacccgtgtgaagctgccctccggctccaagaaggttatctcctcagccaacagagctgtggttggtgtggtggctggaggtggccgaattgacaaacccatcttgaaggctggccgggcgtaccacaaatataaggcaaagaggaactgctggccacgagtacggggtgtggccatgaatcctgtggagcatccttttggaggtggcaaccaccagcacatcggcaagccctccaccatccgcagagatgcccctgctggccgcaaagtgggtctcattgctgcccgccggactggacgtctccggggaaccaagactgtgcaggagaaagagaactagtgctgagggcctcaataaagtttgtgtttatgccaaaaaaaaaaaaaaaaaaaaaaaaaaaaaaaaaaaaaaaaaaaaaaaaaaaaaaaaa

SEQ ID NO: 2634 - protein, 257 aa, Mus musculus [sequence omitted]

SEQ ID NO: 2635 - DNA, 967 bp, Mus musculus
gcggcatgggcagtatccgccgccatcctcttccgtgaggcgcgctgagacccggaccggccctcctgagaggatgccggtgcgggcgcccgcggagagggacccgtcgccatgggccgtgtgatccgtggacagaggaagggcgccgggtctgtgttccgcgcgcacgtgaagcaccgtaaaggcgctgcgcgcctgcgcgccgtggatttcgctgagcggcacggctacatcaagggcatcgtcaaggacatcatccacgacccgggccgcggcgcgcccctcgccaaggtggtcttccgggatccgtatcggtttaagaagcggacggagctgttcattgccgccgagggcattcacacgggccagtttgtgtattgcggcaagaaggcccagctcaacattggcaatgtgctccctgtgggcaccatgcctgagggtacaatcgtgtgctgcctggaggagaagcctggagaccgtggcaagctggcccgggcatcagggaactatgccaccgttatctcccacaaccctgagaccaagaagacccgtgtgaagctgccctccggctccaagaaggttatctcctcagccaacagagctgtggttggtgtggtggctggaggtggccgaattgacaaacccatcttgaaggctggccgggcgtaccacaaatataaggcaaagaggaactgctggccacgagtacggggtgtggccatgaatcctgtggagcatccttttggaggtggcaaccaccagcacatcggcaagccctccaccatccgcagagatgcccctgctggccgcaaagtgggtctcattgctgcccgccggactggacgtctccggggaaccaagactgtgcaggagaaagagaactagtgctgagggcctcaataaagtttgtgtttatgccaaaaaaaaaaaaaaaaaaaaaaaaaaaaaaaaaaaaaaaaaaaaaaaa

SEQ ID NO: 2636 - protein, 257 aa, Mus musculus [sequence omitted]

SEQ ID NO: 2637 - DNA, 439 bp, Homo sapiens
ctgtctccggtccgtgcctccaagatgacaaagaaaagaaggaacaatggtcgtgccaaaaagggctgcggccacgtgcagcctattcgctgcactaactgtgcccgatgcatgcccaaggacaaggccattaagaaattcgtcattcgaaacatagtggaggccgcagcagtcagggacatttctgaagcgagcgtcttcgatgcctatgtgcttcccaagctgtatgtgaagctacattactgtgtgagttgtgcaattcacagcaaagtagtcaggaatcgatctcgtgaagtccgcaaggaccgaacacccccaccccgatttagacctgcgggtgctgccccacgtcccccaccaaagcccatgtaaggagctgagttcttaaagactgaagacaggctattctctggagaaaaataaaatggaaattgtactt

SEQ ID NO: 2638 - DNA, 1426 bp, Homo sapiens
ttttcctgggggcagcagccgggctgagaggagagtggctgtctactctctccgccatggcgtgtgtccgcccactgatgtcgctgtactccgaaaagggggagtcatctggcaaaaatgtcacttagcccgctgtattcaaggctcctattcgaccagacatcgtgaactttgttcacaccaacttgcgcaaaaacaacagacagccctacgctgccagtgaattagcaggtcatcggaccagcactgagtcttggggtactggcagagctgtggctcgaattcccagagttcgaggtggtgggactcaccgctccggccagggtgcttttggaaacatgtgtcgtggaggccgaaggtttgcaccaaccaaaacctggcgccgttggcatcgtagagtgaacacaacccaaaaacggtatgccatctgttctgccctggctgcctcagccctaccagcactggtcatgtctaaaggtcatcgtattgaggaagttcctgaacttcctttggtagtcgaagataaagttgaaggctacaggaagaccaaggaagctgttttgctccttaagaaacttaaagccaggaacgatatcaaaaaggtctatgcctctcagcgaatgagagctggcaaaggcaaaatgagaaaccgtcgccgtatccagcgcaggggcccgtgcatcatctataatgaggataatggtatcaaggccttcagaaacatccctgcaattactctgcttaatgtaagcaagctgaccatttcgaagcttgctcctggtgggcacgtgggacgtttctgcatttggactggaagtgctttccggaagttggatgaattgtatggcacttggcgtaaagccgcttccctcaagagtaactacaatcttcccatgcacaagatgattaatacagatcttagcagaatcttgaaaagcccagagatccaaagagcctttcgggcaccaagcaagaagattcatcgcagagtcctaaagaagaacccactgaaaaacttgagaatcatgttgaagctaaacccatatgcaaagaccatgcgccggaacaccattcttcgccaggccaggaatcacaagctccggatggataaggcagctgctgctgcagcagcactagaagccaaaccagatgagaaggcggcggttgcaggcaagaagcctgtggtaggtaagaaaggaaagaaggctgctgttggtgtgaagaagcagaagaagcctctggtgggaaaaaaggcagcagctaccaagaaatcagcccctgaaaagaagcctgcagaaaagaaacctactgtagaggaaaagaagcctgctgcattaactcttaaatttgattattccataaaggtcaaatcattgtggacagcttcttttgaataaagacctgattatacaggcagtgagaaaca

SEQ ID NO: 2639 - protein, 352 aa, Homo sapiens
MCRGGRRFAPTKTWRRWHRRVNTTQKRYAICSALAASALPALVMSKGHRIEEVPELPLVVEDKVEGYRKTKEAVLLLKKLKARNDIKKVYASQRMRAGKGKMRNRRRIQRRGPCIIYNEDNGIKAFRNIPAITLLNVSKLTISKLAPGGHVGRFCIWTGSAFRKLDELYGTWRKAASLKSNYNLPMHKMINTDLSRILKSPEIQRAFRAPSKKIHRRVLKKNPLKNLRIMLKLNPYAKTMRRNTILRQARNHKLRMDKAAAAAAALEAKPDEKAAVAGKKPVVGKKGKKAAVGVKKQKKPLVGKKAAATKKSAPEKKPAEKKPTVEEKKPAALTLKFDYSIKVKSLWTASFE

SEQ ID NO: 2640 - DNA, 479 bp, Homo sapiens
ctgagtcttggggtactggcagagctgtggctcgaattcccagagttcgaggtggtgggactcaccgctccggccagggtgcttttggaaacatgtgtcgtggaggccgaaggtttgcaccaaccaaaacctggcgccgttggcatcgtagagtgaacacaacccaaaaacggtatgccatctgttctgccctggctgcctcagccctaccagcactggtcatgtctaaaggtcatcgtattgaggaagttcctgaacttcctttggtagtcgaagataaagttgaaggctacaggaagaccaaggaagctgttttgctccttaagaaatcagcccctgaaaagaagcctgcagaaaagaaacctactgtagaggaaaagaagcctgctgcattaactcttaaatttgattattccataaaggtcaaatcattgtggacagcttcttttgaataaagacctgattatacaggcagtgag

SEQ ID NO: 2641 - DNA, 498 bp, Homo sapiens
agagctgtggctcgaattcccagagttcgaggtggtgggactcaccgctccggccagggtgcttttggaaacatgtgtcgtggaggccgaaggtttgcaccaaccaaaacctggcgccgttggcatcgtagagtgaacacaacccaaaaacggtatgccatctgttctgccctggctgcctcagccctaccagcactggtcatgtctaaaggtcatcgtattgaggaagttcctgaacttcctttggtagtcgaagataaagttgaaggctacaggaagaccaaggaagctgttttgctccttaagaaacttaaagccaggaacgatatcaaaaaggcagcagctaccaagaaatcagcccctgaaaagaagcctgcagaaaagaaacctactgtagaggaaaagaagcctgctgcattaactcttaaatttgattattccataaaggtcaaatcattgtggacagcttcttttgaataaagacctgattatacaggc

SEQ ID NO: 2642 - DNA, 1305 bp, Homo sapiens
agtggcggtgtctgtgatggtccggagcgaggcctcggccaatctgggtggcgtgcccagcgagattaaagatgcagtacgccacggggccactgctcaagttccagatttgtgtttcctgaggttataggcgggtgtttgaggagtacatgtgggttactagccaggggtacccagacatccgtattgaaggagagaattacctccctcaaccaatgtatagacacatagcatctttcctgtcagtcttcaaactagtattaataggcttaataattgttggcaaggatccttttgctttctttggcatgcaagctcctagcatctggcagtggggccaagaaaataaggtctatgcatgtatgatggttttcttcttgagcaacatgattgagaaccagtgtatgtcaacaggtgcatttgagataactttaaatgatgtacctgtgtggtctaagctggaatccggtcaccttccatccatgcaacagcttgttcaaattcttgacaatgaaatgaagctcaatgtgcatatggattcaatcccacaccatcgatcatagcaccacctatcagcactgaaaactcttttgcattaagggatcattccaagagcagcttgactgacattatgaaggcctgtactgaagagagcaagctgttagtacagaccaaatgctttcttagcatgctcgttgtacctcttggaaaacctcaatgcaagatagcttttccgtgctggcatattttggaattcttcacattcatggagtgcaataatactgtatagctttccccaccccccacacaatcacccagttaatgtgtgtttttttttaaggtagacattactacttgtaacttttttccttagtcgtatttgaaaaagtagaaaattgagttacaatttgattttttttccaaagatgtctgttaaatctgttgtgcttttatatgaatatttgttttttatagtttaaaattcatcctttgggaatccagttgaagttcccaaatactttataagagtttatcagacatctctaatttggccatgtccagtttatatagtttacaaaatacagcagatgcaagattatgggggaaatcctatattcagagtactctacaaatttttgtgtatgtgtgtatgtgcgtgtgattaccagagaactactaaaaaaaccaactgctttttaaatcctattgtgtagttcaagtgtcatgccttgaccaatctaatgaattgattaattaactgggcctttatacttaactaaataaaaaactaagcagatatgagtt

SEQ ID NO: 2643 - protein, 163 aa, Homo sapiens
CSTPRGHCSSSRFVFPEGYRRVFEEYMWVTSQGYPDIRIEGENYLPQPMYRHIASFLSVFKLVLIGLIIVGKDPFAFFGMQAPSIWQWGQENKVYACMMVFFLSNMIENQCMSTGAFEITLNDVPVWSKLESGHLPSMQQLVQILDNEMKLNVHMDSIPHHRS

SEQ ID NO: 2644 - DNA, 517 bp, Homo sapiens
agtggcggtgtctgtgatggtccggagcgaggcctcggccaatctgggtggcgtgcccagcgagattaaagatgcagtacgccacggggccactgctcaagttccagatttgtgtttcctgaggttataggcgggtgtttgaggagtacatgtgggttactagccaggggtacccagacatccgtattgaaggagagaattacctccctcaaccaatgtatagacacatagcatctttcctgtcagtcttcaaactagtattaataggcttaataattgttggcaaggatccttttgctttctttggcatgcaagctcctagcatctggcagtggggccaagaccagtgtatgtcaacaggtgcatttgagataactttaaatgatgtacctgtgtggtctaagctggaatccggtcaccttccatccatgcaacagcttgttcaaattcttgacaatgaaatgaagctcaatgtgcatatggattcaatcccacaccatcgatcatagcaccacct

SEQ ID NO: 2645 - DNA, 2300 bp, Homo sapiens
gggagattaaaaccttggattctaggtggtagaggataatttttttttgaatgaatttctttttatttatttatttatttttttcctttttaggatagaatttttgcggcatttgaagagctttttccagattatgtttaaaattgaaaccaagccatgtggtgaagaactcaagggtggggataaagtgctgatgacctgtgttggcattggtttctccaaccttagcaagaccctcaagtgataaccatcacaagataaggccccaatgcctacagacaaagcagaagctgccacggacaccaatgggaccaagtccaaatggattaatccaggacagaatagccacttgcttaattttctgtgaagaaatatcaatatacaaataaaagacatccctgtagcatatggtttccagctgtttctccagtggcattgccattgcccaggaggggcccagtcaccatgagagctcccttgccttacctggaggaagaatgtgccttcaggccacagtcgtgctgctagaacagtctcgtagctgcagttcagctgtgcttcctcagcctactatcataggcttcctcagccctctgtcatatggctgttttgcaaacctgtggagtctgttactgttctttctgcaaggactcacctccttgagccttggtttttgttgtagggattaaatgagataatatgagtggcagctcttcatgagtcctgcagtgctaagcaaatgtcagaaattggtgtattagactatttatctttgatcttctgaatggattgctgtcatggacacggacacggatcttcatctggttcattgtatttatatgtgagggatggatggctgcggggctccaagagcagcctcctgaagtgagggtggcaagtatgtgacagggcacccacaaaggcagacaaggactctgagaaccaacaggacttctctggtcttattctgaggctaagacaaaaaccgcacctgagccagatctctcagcctggcagctccaggacccgtgggccctgccactggcccatctcaacggctaggacctagagcatcatcaagctgcaggttaaacaggttggttggttctgatttgactgcacctctacaaggacctatggctgcacttgttgatactttcccgaggagccacaacactgagcaatgaggggaggagcatgtgttagttcattcatcaagtcctaaatgttaactactatgtgccaggtgctgagccaggcaccagagataccatgatgaacaagacacataaatcttaccctcattgagcttacaccatgtgaaagagaagtatgaaataattatacgttatttttttttagtttttgagatggagtttcacttttgtcccccaggctggagtgcggtggtgtgacctcagctcactgcaacctctgcctcccaggttcaagcgattctcctgcctcagcctcccaagtagctgggattacaggcacctgccaccatgcctggctaaattttgtatttttagtagagacgggctttcaccatgttggtcaggctagtcttgaactcctggcctcaggtgatcctcccaccttggcctcccaaagtgctgggattgcaggcgtgagccacggcacctcacaaattacacattattcaactgtaactgtgaaagtgattctaaggaaaaagtacagagagctgtgggaaaacataataggaaatctttgtcattctgtcactattgtctattaggctgtcactgttgtcattgtcacccctaccctctcgcagagagtggttcccatttgccagagctcatttattgtcctgaaggtctgtgaaaagatgacaaagtcgtgttgccttctttccactttcccaagtctcacgtgagcacccctaactggcagaatcaattcacacccacaagcctagctgcaaggggacctgggaaatgtattcccagctttccaacctctccacccaggagatgaaacagccaatttaggccaggtgcaatggcttacacatgtaaaaccagcactatgggaggctgaggagggaagattacttgagcccaggagtttgagaccagcctggacaacagggcgagaccatcatctctacaaaaaatacaaaaaaaattagctaggcgtggtgtcctgtgcctgtggtcccagctcctcaggaggctgaggcaggaggatcgcttgagatcgaggctgcagtgagccgtgatcgcgccactgcactccagtctgggtgacagcgagaccctatctcaaaaaag

SEQ ID NO: 2646 - DNA, 1888 bp, Homo sapiens
ctcagctacgcagggtgcaacttcttgcgccaacgtctggtcctgtctaccctgagcgggcgccccgtcaaaatccgaaagattcgggccagagacgacaacccgggcctccgagattttgaagccagcttcataaggctattggacaaaataacgaatggttctcgaattgaaataaaccaaacaggaacaaccttatattatcagcctggcctcctgtatggtggatctgtggaacatgactgtagcgtccttcgtggcattgggtattacctggagagtcttctttgcttggctccatttatgaagcacccgttaaaaatagttctacgaggagtgaccaatgatcaggttgacccttcagttgatgttcttaaggcaacagcactccctttgttgaaacaatttgggattgatggtgaatcatttgaactgaagattgtgcgacggggaatgcctcccggaggaggaggcgaagtggttttctcatgtcctgtgaggaaggtcttgaagcccattcaactcacagatccaggaaaaatcaaacgtattagaggaatggcgtactctgtacgtgtgtcacctcagatggcgaaccggattgtggattctgcaaggagcatcctcaacaagttcatacctgatatctatatttacacagatcacatgaaaggagtcaactctgggaagtctccgggctttgggttgtcactggttgctgagaccaccagtggcaccttcctcagtgctgaactggcctccaacccccagggccagggagcagcagtacttccagaggaccttggcaggaactgtgcccggctgctgctggaggaaatctacaggggtggatgcgtagactcgaccaaccaaagcctggcgctactactcatgacccttggacagcaggatgtttccaaagtcctgctaggccctctctctccctacacgatagaatttttgcggcatttgaagagctttttccagattatgtttaaaattgaaaccaagccatgtggtgaagaactcaagggtggggataaagtgctgatgacctgtgttggcattggtttctccaaccttagcaagaccctcaagtgataaccatcacaagataaggccccaatgcctacagacaaagcagaagctgccacggacaccaatgggaccaagtccaaatggattaatccaggacagaatagccacttgcttaattttctgtgaagaaatatcaatatacaaataaaagacatccctgtagcatatggtttccagctgtttctccagtggcattgccattgcccaggaggggcccagtcaccatgagagctcccttgccttacctggaggaagaatgtgccttcaggccacagtcgtgctgctagaacagtctcgtagctgcagttcagctgtgcttcctcagcctactatcataggcttcctcagccctctgtcatatggctgttttgcaaacctgtggagtctgttactgttctttctgcaaggactcacctccttgagccttggtttttgttgtagggattaaatgagataatatgagtggcagctcttcatgagtcctgcagtgctaagcaaatgtcagaaattggtgtattagactatttatctttgatcttctgaatggattgctgtcatggacacggacacggatcttcatctggttcattgtatttatatgtgagggatggatggctgcggggctccaagtaagttattgggatgtttttatattccaggtgtgctgtacattcttattttattttcacaatagctctgtgatgtaagtgctatctccatgagaaaattcataaagggtgttttgttcctttgaaatgtataatgtaaagacattaaatctcctcattta

SEQ ID NO: 2647 - DNA, 626 bp, Homo sapiens
cgccgcagctccagcgccgcgcagcagccgccgccgccgcctctccttagtcactgccatgacgaccgcgtccacctcgcaggtgcgccagaactaccaccaggactcagaggccgccatcaaccgccagatcaacctggagctctacacctcctacctttacctgtccacgtcttactactttgacctcgatgatgtggctttgaagaactttgccaaatactttcttcaccaatctcatgaggagagggaacatgctgagaaactgttgaagctgcagaaccaacgaggtggccgaatccttcttcaggatatcaagaaaccagactgtgatgactgggagagtgggctgaatgcgatggagtgtgcactacatttggaaaaaaatgtgtatcagtcaccactggaactgcacaaaccggccactgacaaaaatgccatcaaagaatggggtgaccacgtgaccaacttgtgcaagatgggagcacccgaatctggcttggcagaatatctctttgacaagcactccctgggagacagtgataatgaaagctaagcctcaggctaatttccccatagccgtggggtgacttccctggtcaccaaggcagtgcatgcatgttggg

SEQ ID NO: 2648 - protein, 165 aa, Homo sapiens
MTTASTSQVRQNYHQDSEAAINRQINLELYTSYLYLSTSYYFDLDDVALKNFAKYFLHQSHEEREHAEKLLKLQNQRGGRILLQDIKKPDCDDWESGLNAMECALHLEKNVYQSPLELHKPATDKNAIKEWGDHVTNLCKMGAPESGLAEYLFDKHSLGDSDNES

SEQ ID NO: 2649 - DNA, 1314 bp, Homo sapiens
atggcatccgttgcagttgatccacaaccgagtgtggtgactcgggtggtcaacctgcccttggtgagctccacgtatgacctcatgtcctcagcctatctcagtacaaaggaccagtatccctacctgaagtctgtgtgtgagatggcagagaacggtgtgaagaccatcacctccgtggccatgaccagtgctctgcccatcatccagaagctagagccgcaaattgcagttgccaatacctatgcctgtaaggggctagacaggattgaggagagactgcctattctgaatcagccatcaactcagattgttgccaatgccaaaggcgctgtgactggggcaaaagatgctgtgacgactactgtgactggggccaaggattctgtggccagcacgatcacaggggtgatggacaagaccaaaggggcagtgactggcagtgtggagaagaccaagtctgtggtcagtggcagcattaacacagtcttggggagtcggatgatgcagctcgtgagcagtggcgtagaaaatgcactcaccaaatcagagctgttggtagaacagtacctccctctcactgaggaagaactagaaaaagaagcaaaaaaagttgaaggatttgatctggttcagaagccaagttattatgttagactgggatccctgtctaccaagcttcactcccgtgcctaccagcaggctctcagcagggttaaagaagctaagcaaaaaagccaacagaccatttctcagctccattctactgttcacctgattgaatttgccaggaagaatgtgtatagtgccaatcagaaaattcaggatgctcaggataagctctacctctcatgggtagagtggaaaaggagcattggatatgatgatactgatgagtcccactgtgctgagcaatttgagtcacgtactcttgcaattgcccgcaacctgactcagcagctccagaccacgtgccacaccctcctgtccaacatccaaggtgtaccacagaacatccaagatcaagccaagcacatgggggtgatggcaggcgacatctactcagtgttccgcaatgctgcctcctttaaagaagtgtctgacagcctcctcacttctagcaaggggcagctgcagaaaatgaaggaatctttagatgacgtgatggattatcttgttaacaacacgcccctcaactggctggtaggtcccttttatcctcagctgactgagtctcagaatgctcaggaccaaggtgcagagatggacaagagcagccaggagacccagcgatctgagcataaaactcattaa

SEQ ID NO: 2650 - protein, 437 aa, Homo sapiens
MASVAVDPQPSVVTRVVNLPLVSSTYDLMSSAYLSTKDQYPYLKSVCEMAENGVKTITSVAMTSALPIIQKLEPQIAVANTYACKGLDRIEERLPILNQPSTQIVANAKGAVTGAKDAVTTTVTGAKDSVASTITGVMDKTKGAVTGSVEKTKSVVSGSINTVLGSRMMQLVSSGVENALTKSELLVEQYLPLTEEELEKEAKKVEGFDLVQKPSYYVRLGSLSTKLHSRAYQQALSRVKEAKQKSQQTISQLHSTVHLIEFARKNVYSANQKIQDAQDKLYLSWVEWKRSIGYDDTDESHCAEQFESRTLAIARNLTQQLQTTCHTLLSNIQGVPQNIQDQAKHMGVMAGDIYSVFRNAASFKEVSDSLLTSSKGQLQKMKESLDDVMDYLVNNTPLNWLVGPFYPQLTESQNAQDQGAEMDKSSQETQRSEHKTH

SEQ ID NO: 2651 - DNA, 829 bp, Rattus norvegicus
cctcttttccgtggcgcctcggaggcgttcagctgcttcaagatgaagctgaacatctccttcccagccactggctgccagaaactcattgaagtggacgatgaacgcaaacttcgtactttctatgagaagcgtatggccacagaagttgctgctgacgctctgggtgaagaatggaagggttatgtggtccgaatcagtggtgggaacgacaaacaaggtttccccatgaagcagggtgtcttgacccatggccgtgtccgcctgctactgagtaaggggcattcctgttacagaccaaggagaactggagaaagaaagagaaaatcagttcgtggttgcattgtggatgcaaatctgagcgttctcaacttggttattgtaaaaaaaggagagaaggatattcctggactgactgatactacagtgcctcgccgcctgggccccaaaagagctagcagaatccgcaaacttttcaatctctctaaagaagatgatgtccgccagtatgttgtaagaaagcccttaaataaagaaggtaagaaacctaggaccaaagcacccaagattcagcgtcttgttactccacgtgtcctgcagcacaaacggcggcgtattgctctgaagaagcagcgtaccaagaaaaataaagaagaggctgcagaatatgctaaacttttggccaagagaatgaaggaggctaaggagaagcgccaggaacaaattgcgaagagacgcagactttcctctctgcgagcttctacttctaagtctgaatccagtcagaaataagattttttgagtaacaaataaataagatcagactctg

SEQ ID NO: 2652 - protein, 249 aa, Rattus norvegicus
MKLNISFPATGCQKLIEVDDERKLRTFYEKRMATEVAADALGEEWKGYVVRISGGNDKQGFPMKQGVLTHGRVRLLLSKGHSCYRPRRTGERKRKSVRGCIVDANLSVLNLVIVKKGEKDIPGLTDTTVPRRLGPKRASRIRKLFNLSKEDDVRQYVVRKPLNKEGKKPRTKAPKIQRLVTPRVLQHKRRRIALKKQRTKKNKEEAAEYAKLLAKRMKEAKEKRQEQIAKRRRLSSLRASTSKSESSQK

SEQ ID NO: 2653 - DNA, 1275 bp, Homo sapiens
cctccctacgggcgcctccggcagcccttcccgcgtgcgcagggctcagagccgttccgagatcttggaggtccgggtgggagtgggggtggggtgggggtgggggtgaaggtggggggcgggcgcgctcagggaaggcgggtgcgcgcctgcggggcggagatgggcagggggcggtgcgtgggtcccagtctgcagttaagggggcaggagtggcgctgctcacctctggtgccaaagggcggcgcagcggctgccgagctcggccctggaggcggcgagaacatggtgcgcaggttcttggtgaccctccggattcggcgcgcgtgcggcccgccgcgagtgagggttttcgtggttcacatcccgcggctcacgggggagtgggcagcgccaggggcgcccgccgctgtggccctcgtgctgatgctactgaggagccagcgtctagggcagcagccgcttcctagaagaccaggtcatgatgatgggcagcgcccgagtggcggagctgctgctgctccacggcgcggagcccaactgcgccgaccccgccactctcacccgacccgtgcacgacgctgcccgggagggcttcctggacacgctggtggtgctgcaccgggccggggcgcggctggacgtgcgcgatgcctggggccgtctgcccgtggacctggctgaggagctgggccatcgcgatgtcgcacggtacctgcgcgcggctgcggggggcaccagaggcagtaaccatgcccgcatagatgccgcggaaggtccctcagacatccccgattgaaagaaccagagaggctctgagaaacctcgggaaacttagatcatcagtcaccgaaggtcctacagggccacaactgcccccgccacaacccaccccgctttcgtagttttcatttagaaaatagagcttttaaaaatgtcctgccttttaacgtagatatatgccttcccccactaccgtaaatgtccatttatatcattttttatatattcttataaaaatgtaaaaaagaaaaacaccgcttctgccttttcactgtgttggagttttctggagtgagcactcacgccctaagcgcacattcatgtgggcatttcttgcgagcctcgcagcctccggaagctgtcgacttcatgacaagcattttgtgaactagggaagctcaggggggttactggcttctcttgagtcacactgctagcaaatggcagaaccaaagctcaaataaaaataaaataattttcattcattcactc

SEQ ID NO: 2654 - protein, 173 aa, Homo sapiens
MGRGRCVGPSLQLRGQEWRCSPLVPKGGAAAAELGPGGGENMVRRFLVTLRIRRACGPPRVRVFVVHIPRLTGEWAAPGAPAAVALVLMLLRSQRLGQQPLPRRPGHDDGQRPSGGAAAAPRRGAQLRRPRHSHPTRARRCPGGLPGHAGGAAPGRGAAGRARCLGPSARGPG

SEQ ID NO: 2655 - DNA, 1218 bp, Homo sapiens
cccaacctggggcgacttcaggtgtgccacattcgctaagtgctcggagttaatagcacctcctccgagcactcgctcacggcgtccccttgcctggaaagataccgcggtccctccagaggatttgagggacagggtcggagggggctcttccgccagcaccggaggaagaaagaggaggggctggctggtcaccagagggtggggcggaccgcgtgcgctcggcggctgcggagagggggagagcaggcagcgggcggcggggagcagcatggagccggcggcggggagcagcatggagccttcggctgactggctggccacggccgcggcccggggtcgggtagaggaggtgcgggcgctgctggaggcgggggcgctgcccaacgcaccgaatagttacggtcggaggccgatccaggtcatgatgatgggcagcgcccgagtggcggagctgctgctgctccacggcgcggagcccaactgcgccgaccccgccactctcacccgacccgtgcacgacgctgcccgggagggcttcctggacacgctggtggtgctgcaccgggccggggcgcggctggacgtgcgcgatgcctggggccgtctgcccgtggacctggctgaggagctgggccatcgcgatgtcgcacggtacctgcgcgcggctgcggggggcaccagaggcagtaaccatgcccgcatagatgccgcggaaggtccctcagacatccccgattgaaagaaccagagaggctctgagaaacctcgggaaacttagatcatcagtcaccgaaggtcctacagggccacaactgcccccgccacaacccaccccgctttcgtagttttcatttagaaaatagagcttttaaaaatgtcctgccttttaacgtagatatatgccttcccccactaccgtaaatgtccatttatatcattttttatatattcttataaaaatgtaaaaaagaaaaacaccgcttctgccttttcactgtgttggagttttctggagtgagcactcacgccctaagcgcacattcatgtgggcatttcttgcgagcctcgcagcctccggaagctgtcgacttcatgacaagcattttgtgaactagggaagctcaggggggttactggcttctcttgagtcacactgctagcaaatggcagaaccaaagctcaaataaaaataaaataattttcattcattcactc

SEQ ID NO: 2656 - protein, 156 aa, Homo sapiens
MEPAAGSSMEPSADWLATAAARGRVEEVRALLEAGALPNAPNSYGRRPIQVMMMGSARVAELLLLHGAEPNCADPATLTRPVHDAAREGFLDTLVVLHRAGARLDVRDAWGRLPVDLAEELGHRDVARYLRAAAGGTRGSNHARIDAAEGPSDIPD

SEQ ID NO: 2657 - DNA, 897 bp, Homo sapiens
tgtgtgggggtctgcttggcggtgagggggctctacacaagcttcctttccgtcatgccggcccccaccctggctctgaccattctgttctctctggcaggtcatgatgatgggcagcgcccgagtggcggagctgctgctgctccacggcgcggagcccaactgcgccgaccccgccactctcacccgacccgtgcacgacgctgcccgggagggcttcctggacacgctggtggtgctgcaccgggccggggcgcggctggacgtgcgcgatgcctggggccgtctgcccgtggacctggctgaggagctgggccatcgcgatgtcgcacggtacctgcgcgcggctgcggggggcaccagaggcagtaaccatgcccgcatagatgccgcggaaggtccctcagacatccccgattgaaagaaccagagaggctctgagaaacctcgggaaacttagatcatcagtcaccgaaggtcctacagggccacaactgcccccgccacaacccaccccgctttcgtagttttcatttagaaaatagagcttttaaaaatgtcctgccttttaacgtagatataagccttcccccactaccgtaaatgtccatttatatcattttttatatattcttataaaaatgtaaaaaagaaaaacaccgcttctgccttttcactgtgttggagttttctggagtgagcactcacgccctaagcgcacattcatgtgggcatttcttgcgagcctcgcagcctccggaagctgtcgacttcatgacaagcattttgtgaactagggaagctcaggggggttactggcttctcttgagtcacactgctagcaaatggcagaaccaaagctcaaataaaaataaaataattttcattcattcactc

SEQ ID NO: 2658 - protein, 105 aa, Homo sapiens
MMMGSARVAELLLLHGAEPNCADPATLTRPVHDAAREGFLDTLVVLHRAGARLDVRDAWGRLPVDLAEELGHRDVARYLRAAAGGTRGSNHARIDAAEGPSDIPD

SEQ ID NO: 2659 - DNA, 2002 bp, Homo sapiens
gcagtagtgctagcggcttcacggttcggtcctcggacccggcagccgccactggtgctgagctgttaggaagcccctatcggcgagctcattggagcttgaacccattgtcacccctccgactcaccggcaaaaaaaaaaaaaaaaaatggttgaagcagattgcccaggaaagccgttcactggtgggcttaacacggaaacaaatgagaaagctcttgaagcagtatttggcaaatatggacgaatagtggaagtactcttggtgaaagaccatgaaaccaacaaatcaggaggatttgcttttgtcacctttgaaagcccagcagatgctaaggatgcagccagagacatgaatggaaagtcattagatggaaaagccatcgaggtggaacaagccaacaaaccatcatttgaaagtggtagacgtggaccgcctccacctccaagaagtagaggccctccaagaggtcttagaggtggaagaggaggaagtggaggaacaaggggacctccctcacggggaggacacatggatgacggtggatattccatgaattttaacatgagttcttccaggggaccacatccagtaaaaagaggaccaccaccaagaagtgggagtcctccttctaagagatctgcaccttcaggaccagttcgcagtagcagtgaaatgggaggaagagctcctgtatcacgtggaagagatagttacggaggtccacctcgaagggaactgctgccctcttgtagaaatgattatttgtccccaagagatgatgggtattctactaaagacagctattcaagcagagattacccaagttctcatgatactagagcttatgcaccaccaccacgagattatacttaccgtgattatggtcattccagttcacgtgttgactatccataaagaggctatagcgatagagatagatatggtcgtgatcatgactattcagatcatccaggtggaggttcctacagagattcatatgagagttatggtaactcacgtagtgctccacctacacgagggcccccaccatcttatggtggaagcagtcgctatgatgattacagcagctcatgtgacggatatggtggaagtcgagacagttactcaagcagccgaagtgatctctactcaagtggtcgtgatcgggttggcagacaagaaagagggcttaccccttctatggaaagaggataccctcctccacgtgattcctacagcagttcaagtgcggagcaccaagcggtggtggctgtggaggaagccgatctgatagagggggaggtagaagcagatactagaaacaaacaaaactttggaccaaaatcccagttcaaagaaacaaaaagtggaagctattctatcataactacccaaggactactaaaaggaaaaattgtgttactttttaaaaattccctgttaagttcccctccataatttttatgttcttgtgaggagaaaagtaaaacatgtttaattttattttgacttttgcattgcttttcaacaagcaaacgttaaatgtgttaagacttgtactggtgttgtaactttccaagtaaaagtatccctaaaggccacttcctatctgatttttcccagtaaatgaggcaggcaattctaagatcttccacaaaacatctagccatctaaaatggagagatgaatcattctacctatacaaacaagctagctattagagggtggttggggtatgctactcataagatttcagggtgtcttccaactgaaatctcaatgttttcagtatgaaaaacctgaaatcacatgcctttgtaaggaaagtgctattcacccagtaaacccaaaaaagcaaatggatgatgctggccattttgcctttctgacatttccttgggaatctgcaagaacctccctttccccctcccccaataagaccatttaagtgtgtgttaaacaactacagaatactaaataaaaagtttggccaaaacc

SEQ ID NO: 2660 - DNA, 1438 bp, Homo sapiens
cggtaactaccccggctgcgcacagctcggcgctccttcccgctccctcacacaccgcctcagcccgcaccggcagtagaagatggtgaaagaaacaacttactacgatgttttgggggtcaaacccaatgctactcaggaagaattgaaaaaggcttataggaaactggccttgaagtaccatcctgataagaacccaaatgaaggagagaagtttaaacagatttctcaagcttacgaagttctctctgatgcaaagaaaagggaattatatgacaaaggaggagaacaggcaattaaagagggtggagcaggtggcggttttggctcccccatggacatctttgatatgttttttggaggaggaggaaggatgcagagagaaaggagaggtaaaaatgttgtacatcagctctcagtaaccctagaagacttatataatggtgcaacaagaaaactggctctgcaaaagaatgtgatttgtgacaaatgtgaaggtagaggaggtaagaaaggagcagtagagtgctgtcccaattgccgaggtactggaatgcaaataagaattcatcagataggacctggaatggttcagcaaattcagtctgtgtgcatggagtgccagggccatggggagcggatcagtcctaaagatagatgtaaaagctgcaacggaaggaagatagttcgagagaagaaaattttagaagttcatattgacaaaggcatgaaagatggccagaagataacattccatggtgaaggagaccaagaaccaggactggagccaggcgatattatcattgtgttagatcagaaggaccatgctgtttttactcgacgaggagaagaccttttcatgtgtatggacatacagctcgttgaagcactgtgtggcttccagaagccaatatctactcttgacaaccgaaccatcgtcatcacctctcatccaggtcagattgtcaagcatggagatatcaagtgtgtactaaatgaaggcatgccaatttatcgtagaccatatgaaaagggtcgcctaatcatcgaatttaaggtaaactttcctgagaatggctttctctctcctgataaactgtctttgctggaaaaactcctacccgagaggaaggaagtggaagagactgatgagatggaccaagtagaactggtggactttgatccaaatcaggaaagacggcgccactacaatggagaagcatatgaggatgatgaacatcatcccagaggtggtgttcagtgtcagacctcttaatggccagtgaataacactcactgctggcatttaatgtgcagtagtgaatgagtgaaggactgtaatcataatatgctcactacttgctcttgtttttgttttaataaactatagtagtgttataaaaagttaaatgaagaataaacgcaaatataaaagctc

SEQ ID NO: 2661 - protein, 397 aa, Homo sapiens
MVKETTYYDVLGVKPNATQEELKKAYRKLALKYHPDKNPNEGEKFKQISQAYEVLSDAKKRELYDKGGEQAIKEGGAGGGFGSPMDIFDMFFGGGGRMQRERRGKNVVHQLSVTLEDLYNGATRKLALQKNVICDKCEGRGGKKGAVECCPNCRGTGMQIRIHQIGPGMVQQIQSVCMECQGHGERISPKDRCKSCNGRKIVREKKILEVHIDKGMKDGQKITFHGEGDQEPGLEPGDIIIVLDQKDHAVFTRRGEDLFMCMDIQLVEALCGFQKPISTLDNRTIVITSHPGQIVKHGDIKCVLNEGMPIYRRPYEKGRLIIEFKVNFPENGFLSPDKLSLLEKLLPERKEVEETDEMDQVELVDFDPNQERRRHYNGEAYEDDEHHPRGGVQCQTS

SEQ ID NO: 2662 - DNA, 1311 bp, Homo sapiens
tagtcgggcggggttgtgagacgccgcgctcagcttccatcgctgggcggtcaacaagtgcgggcctggctcagcgcgggggggcgcggagaccgcgaggcgaccgggagcggctgggttcccggctgcgcgcccttcggccaggccgggagccgcgccagtcggagcccccggcccagcgtggtccgcctccctctcggcgtccacctgcccggagtactgccagcgggcatgaccgacccaccaggggcgccgccgccggcgctcgcaggccgcggatgaagaagaaaacccggcgccgctcgacccggagcgaggagttgacccggagcgaggagttgaccctgagtgaggaagcgacctggagtgaagaggcgacccagagtgaggaggcgacccagggcgaagagatgaatcggagccaggaggtgacccgggacgaggagtcgacccggagcgaggaggtgaccagggaggaaatggcggcagctgggctcaccgtgactgtcacccacagcaatgagaagcacgaccttcatgttacctcccagcagggcagcagtgaaccagttgtccaagacctggcccaggttgttgaagaggtcataggggttccacagtcttttcagaaactcatatttaagggaaaatctctgaaggaaatggaaacaccgttgtcagcacttggaatacaagatggttgccgggtcatgttaattgggaaaaagaacagtccacaggaagaggttgaactaaagaagttgaaacatttggagaagtctgtggagaagatagctgaccagctggaagagttgaataaagagcttactggaatccagcagggttttctgcccaaggatttgcaagctgaagctctctgcaaacttgataggagagtaaaagccacaatagagcagtttatgaagatcttggaggagattgacacactgatcctgccagaaaatttcaaagacagtagattgaaaaggaaaggcttggtaaaaaaggttcaggcattcctagccgagtgtgacacagtggagcagaacatctgccaggagactgagcggctgcagtctacaaactttgccctggccgagtgaggtgtagcagaaaaaggctgtgctgccctgaagaatggcgccaccagctctgccgtctctggatcggaatttacctgatttcttcagggctgctgggggcaactggccatttgccaattttcctactctcacactggttctcaatgaaaaatagtgtctttgtgatttgagtaaagctcctattctgtttttcacaaaaaaaaaaaaa

SEQ ID NO: 2663 - protein, 345 aa, Homo sapiens
LAQRGGARRPRGDRERLGSRLRALRPGREPRQSEPPAQRGPPPSRRPPARSTASGHDRPTRGAAAGARRPRMKKKTRRRSTRSEELTRSEELTLSEEATWSEEATQSEEATQGEEMNRSQEVTRDEESTRSEEVTREEMAAAGLTVTVTHSNEKHDLHVTSQQGSSEPVVQDLAQVVEEVIGVPQSFQKLIFKGKSLKEMETPLSALGIQDGCRVMLIGKKNSPQEEVELKKLKHLEKSVEKIADQLEELNKELTGIQQGFLPKDLQAEALCKLDRRVKATIEQFMKILEEIDTLILPENFKDSRLKRKGLVKKVQAFLAECDTVEQNICQETERLQSTNFALAE

SEQ ID NO: 2664 - DNA, 1434 bp, Homo sapiens
ggggaagtcgaggcgggagtgactctgcttccgtttctggttttgctctagtgtttgggtttcttcgcggctgctcaagatgaaccgactcttcgggaaagcgaaacccaaggctccgccgcccagcctgactggctgcattggcacggtggacagtagagcagaatccattgacaagaagatttctcgattggatgctgagctagtgaagtataaggatcagatcaagaagatgagagagggtcctgcaaagaatatggtcaagcagaaagccttgcgagttttaaagcaaaagaggatgtatgagcagcagcgggacaatcttgcccaacagtcattcaacatggaacaagccaattataccatccagtctttgaaggacaccaagaccacggttgatgctatgaaactgggagtaaaggaaatgaagaaggcatacaagcaagtgaagatcgaccagattgaggatttacaagaccagctagaggatatgatggaagatgcaaatgaaatccaagaagcactgagtcgcagttatggcaccccagaactggatgaagatgatttagaagcagagttggatgcactaggtgatgagcttctggctgatgaagacagttcttatttggatgaggcagcatctgcacctgcaattccagaaggtgttcccactgatacaaaaaacaaggatggagttctggtggatgaatttggattgccacagatccctgcttcatagatttgcatcattcaagcatatcttgtaaaacaaacacatattatgggactaggaaatatttatctttccaaatttgccataacagatttaggtttctttcctttctttgaaggaaagtttaattacattgctcttttattttttccattaagagactcattgcttgggaaatgctttcttcgtactaaaatttgattcctttttttcttatgaaaaacgaactcagtttaaaagtatttttagctcgtatgacttgttttcattcattaataataatttgaaataaaactaaggaaatggaatcttaaaagtctatgacagtgtaactctacagtctcaaaatgacctgataaattgataagacaaagatgagattattggggctgttcatattatgattcagaatcattttctattgtggtattataggttggttaaagtgatggcctttttgatgggttttgttgtgtcttgtgaacaagtcgttactgtgtccattattggaatggaattatcactactgtatcatgagtgggtattttgattctatggttccctcagtattacatcttgacttgtaatcaattatgaatatttcttgatatttaatgtataggacatttatttatactcaataaatatttttcaaaaggaaaaaaaaaaaaatcaaaaaaaaaaaaaaaaaaaaaaaaaaa

SEQ ID NO: 2665 - protein, 219 aa, Homo sapiens
MNRLFGKAKPKAPPPSLTGCIGTVDSRAESIDKKISRLDAELVKYKDQIKKMREGPAKNMVKQKALRVLKQKRMYEQQRDNLAQQSFNMEQANYTIQSLKDTKTTVDAMKLGVKEMKKAYKQVKIDQIEDLQDQLEDMMEDANEIQEALSRSYGTPELDEDDLEAELDALGDELLADEDSSYLDEAASAPAIPEGVPTDTKNKDGVLVDEFGLPQIPAS

SEQ ID NO: 2666 - DNA, 1450 bp, Homo sapiens
tgctcgctgcgccaccgcctcccgccacccctgcccgcccgacagcgccgccgcctgccccgccatgggtcgacagaaggagctggtgtcccgctgcggggagatgctccacatccgctaccggctgctccgacaggcgctggccgagtgcctggggaccctcatcctggtgatgtttggctgtggctccgtggcccaggttgtgctcagccggggcacccacggtggtttcctcaccatcaacctggcctttggctttgctgtcactctgggcatcctcatcgctggccaggtctctggggcccacctgaaccctgccgtgacctttgccatgtgcttcctggctcgtgagccctggatcaagctgcccatctacaccctggcacagacgctgggagccttcttgggtgctggaatagtttttgggctgtattatgatgcaatctggcacttcgccgacaaccagctttttgtttcgggccccaatggcacagccggcatctttgctacctacccctctggacacttggatatgatcaatggcttctttgaccagttcataggcacagcctcccttatcgtgtgtgtgctggccattgttgacccctacaacaaccccgtcccccgaggcctggaggccttcaccgtgggcctggtggtcctggtcattggcacctccatgggcttcaactccggctatgccgtcaaccctgcccgggactttggcccccgcctttttacagcccttgcgggctggggctctgcagtcttcacgaccggccagcattggtggtgggtgcccatcgtgtccccactcctgggctccattgcgggtgtcttcgtgtaccagctgatgatcggctgccacctggagcagcccccaccctccaacgaggaagagaatgtgaagctggcccatgtgaagcacaaggagcagatctgagtgggcaggggccatctccccactccgctgccctggccttgagcatccactgactgtccaagggccactcccaagaagcccccttcacgatccaccctttcaggctaaggagctccctatctaccctcaccccacgagacagccccttcaggatttccactggaccttgcccaaatagcaccttaggccactgcccctaagctggggtggaaccggaatttgggtcaatacatccttttgtctcccaagggaagagaatgggcagcaggtatgtgtgtgtgtgcatgtgtgtgcatgtgtgtgcatgtgtgtgcaggggtgtgtgtgtgtggggggggttcccagatattcagggcaagggaccagtcggaagggattctggctattgggggagcccagagacaggggaaggcagcctgtccatctgtgcataaggagaggaaagttccagggtgtgtatgtttcaggggcttcacatggaggagctgcagatagatatgtgtttct

SEQ ID NO: 2667 - protein, 292 aa, Homo sapiens
MGRQKELVSRCGEMLHIRYRLLRQALAECLGTLILVMFGCGSVAQVVLSRGTHGGFLTINLAFGFAVTLGILIAGQVSGAHLNPAVTFAMCFLAREPWIKLPIYTLAQTLGAFLGAGIVFGLYYDAIWHFADNQLFVSGPNGTAGIFATYPSGHLDMINGFFDQFIGTASLIVCVLAIVDPYNNPVPRGLEAFTVGLVVLVIGTSMGFNSGYAVNPARDFGPRLFTALAGWGSAVFTTGQHWWWVPIVSPLLGSIAGVFVYQLMIGCHLEQPPPSNEEENVKLAHVKHKEQI

SEQ ID NO: 2668 - DNA, 1923 bp, Homo sapiens
ggcacgagggaggcggcggctccagccggcgcggcgcgaggctcggcggtgggatccggcgggcggtgctagctccgcgctccctgcctcgctcgctgccgggggcggtcggaaggcgcggcgcgaagcccgggtggcccgagggcgcgatggctgctcctgtcccgtgggcctgctgtgctgtgcttgccgccgccgccgcagttgtctacgcccagagacacagtccacaggaggcaccccatgtgcagtacgagcgcctgggctctgacgtgacactgccatgtgggacagcaaactgggatgctgcggtgacgtggcgggtaaatgggacagacctggcccctgacctgctcaacggctctcagctggtgctccatggcctggaactgggccacagtggcctctacgcctgcttccaccgtgactcctggcacctgcgccaccaagtcctgctgcatgtgggcttgccgccgcgggagcctgtgctcagctgccgctccaacacttaccccaagggcttctactgcagctggcatctgcccacccccacctacattcccaacaccttcaatgtgactgtgctgcatggctccaaaattatggtctgtgagaaggacccagccctcaagaaccgctgccacattcgctacatgcacctgttctccaccatcaagtacaaggtctccataagtgtcagcaatgccctgggccacaatgccacagctatcacctttgacgagttcaccattgtgaagcctgatcctccagaaaatgtggtagcccggccagtgcccagcaaccctcgccggctggaggtgacgtggcagaccccctcgacctggcctgaccctgagtcttttcctctcaagttctttctgcgctaccgacccctcatcctggaccagtggcagcatgtggagctgtccgacggcacagcacacaccatcacagatgcctacgccgggaaggagtacattatccaggtggcagccaaggacaatgagattgggacatggagtgactggagcgtagccgcccacgctacgccctggactgaggaaccgcgacacctcaccacggaggcccaggctgcggagaccacgaccagcaccaccagctccctggcacccccacctaccacgaagatctgtgaccctggggagctgggcagcggcgggggaccctcggcacccttcttggtcagcgtccccatcactctggccctggctgccgctgccgccactgccagcagtctcttgatctgagcccggcaccccatgaggacatgcagagcacctgcagaggagcaggaggccggagctgagcctgcagaccccggtttctattttgcacacgggcaggaggaccttttgcattctcttcagacacaatttgtggagaccccggcgggcccgggcctgccgccccccagccctgccgcaccaagctggccctccttcctccctcaggggaggtgggccatgcagctaacccacccaccaaagaccccctcaccctggccccttgggctggaccctccaatgccagcgactcccaggagcccttgggggacgtgaggggagcctctcacatccgatttctcctcctgccccagcctcctgtctatcccagggtctctgttgccaccatcagattataagctcctgatgctgggggggcccagccatccccctccccccagcacccacaattttcagtcccctcccctctgccctgttttgtatacccctcccctgaccctgctcctatcccacagtatttaatgccctgtcagtcccttctagtctgactcaatggtaacttgctgtatttgaattttttatagatgtatatacagggtggggggagtgggcggttctcattaaacgtcaccatttcatgaaaaaaaaaaaaaaaaaa

SEQ ID NO: 2669 - protein, 372 aa, Homo sapiens
MAAPVPWACCAVLAAAAAVVYAQRHSPQEAPHVQYERLGSDVTLPCGTANWDAAVTWRVNGTDLAPDLLNGSQLVLHGLELGHSGLYACFHRDSWHLRHQVLLHVGLPPREPVLSCRSNTYPKGFYCSWHLPTPTYIPNTFNVTVLHGSKIMVCEKDPALKNRCHIRYMHLFSTIKYKVSISVSNALGHNATAITFDEFTIVKPDPPENVVARPVPSNPRRLEVTWQTPSTWPDPESFPLKFFLRYRPLILDQWQHVELSDGTAHTITDAYAGKEYIIQVAAKDNEIGTWSDWSVAAHATPWTEEPRHLTTEAQAAETTTSTTSSLAPPPTTKICDPGELGSGGGPSAPFLVSVPITLALAAAAATASSLLI

SEQ ID NO: 2670 - DNA, 1650 bp, Homo sapiens
ctccgaggccgtgagcgcaaagcctcaggccccggctccctcctgagctgcgccgtgccaggccgcccgccgggatgcagtgggccgtgggccggcggtgggcgtgggccgcgctgctcctggctgtcgcagcggtgctgacccaggtcgtctggctctggctgggtacgcagagcttcgtcttccagcgcgaagagatagcgcagttggcgcggcagtacgctgggctggaccacgagctggccttctctcgtctgatcgtggagctgcggcggctgcacccaggccacgtgctgcccgacgaggagctgcagtgggtgttcgtgaatgcgggtggctggatgggcgccatgtgccttctgcacgcctcgctgtccgagtatgtgctgctcttcggcaccgccttgggctcccgcggccactcggggcgctactgggctgagatctcggataccatcatctctggcaccttccaccagtggagagagggcaccaccaaaagtgaggtcttctacccaggggagacggtagtacacgggcctggtgaggcaacagctgtggagtgggggccaaacacatggatggtggagtacggccggggcgtcatcccatccaccctggccttcgcgctggccgacactgtcttcagcacccaggacttcctcaccctcttctatactcttcgctcctatgctcggggcctccggcttgagctcaccacctacctctttggccaggacccttgaccagccaggcctgaaggaagacctgcggatggacaggagcgggcagcccgcacatatccacttgctggagcccatgtttacagacagggacatacaccatgcagatcctgagttcctgctgtatgagcagggatatccatgcttatgtatccaaacacagagacccatgggaacaaatgagacacatatagatactgagacctgtgtgtacagtaggaccatgcactcacacccatctggagagggagcccccggtataccaagggagccagttgtgttcagacacacacatcacagcttgactcactaactgaggcctttccatagctccacagcttcccacctcctccccaccaaaccggggttctagagttaaggatgggggagggtattatactgcctcagtctgactcctcaacccagcagcaatttgaggggatgagggggaagaggagctgccttttggaggcccccttcacctgcagctatgatgcccttccccttctcccctgtcctcaccatatgccttatccccattctactcccctgctatgcaagtgcccctgtggcttgtccccaaccccctcagcaacaaagctcagctggggaacgagagtaatttgaagaatgcttgaagtcagcgtcttccattccagaaagacccccattcttcctttgggggtatgatgtggaagctggtttcagcccaggacccaccactgaggagaggatctagacaggtgggcctaattccaaggggcccttcctggcctggagaaggccttttacacacacacaacacatacacacacacacacacacatatcacagttttcacacagcccctgctgcattctctgtccatctgtctgtttctattaataaagatttgttgatctgttcc

SEQ ID NO: 2671 - protein, 223 aa, Homo sapiens
MQWAVGRRWAWAALLLAVAAVLTQVVWLWLGTQSFVFQREEIAQLARQYAGLDHELAFSRLIVELRRLHPGHVLPDEELQWVFVNAGGWMGAMCLLHASLSEYVLLFGTALGSRGHSGRYWAEISDTIISGTFHQWREGTTKSEVFYPGETVVHGPGEATAVEWGPNTWMVEYGRGVIPSTLAFALADTVFSTQDFLTLFYTLRSYARGLRLELTTYLFGQDP

SEQ ID NO: 2672 - DNA, 771 bp, Homo sapiens
gatgatatggcagcctgcatgaagtctgtaactgagcaaggagcttaattatccaatgaggagaggaatcttctctcagttgcttataaaaatgttgtaggagcccgtaggtcatcttggagcatcgtctcaagtattgaacaaaagacagaaggtgctgagaaaaaaacagcagatggctcaagaatacagagagaaaactgagacctagctaagagatagctgcaatgatgtactgtcccttttggaaaagttcttgatccccagtgcttcacaagcgagagcaaattcttctatttgaaaatgaaaggagatcactaccattacttggctgaggttgccgctggtgatgataagaaagggactgtggatcagtcacaacaagcacaccaagaagcttttgaaatcagcaaaaaggaaatgcaaccaacatatcctatcagactgggtctggcccttaacttctccgtgttctattatgacgttctgaattccccagagaaagcctgctctcttgcaaagacagcttttgatgaagccattgctgaacttgatacattaagtgaagagtcatccaaagacagcacactaataatgcaattactgagagacaacttgacattgtggtttttatgtttaatattaggggagtagagccagttaacatttagggagttatctgttttcatcttgaggtggccaatatggggatgtggaatttttatacaagttattaatgtttggcatagtacttttggtacattgtggctt

SEQ ID NO: 2673 - DNA, 3188 bp, Homo sapiens
ctgccactgccacctcgcggatcaggagccagcgttgttcgcccgacgcctcgctgccggtgggaggaagcgagagggaagccgcttgcgggtttgtcgccgctgctcgcccaccgcctggaagagccgagccccggcccagtcggtcgcttgccaccgctcgtagccgttacccgcgggccgccacagccgccggccgggagaggcgcgcgccatggcttctggagccgattcaaaaggtgatgacctatcaacagccattctcaaacagaagaaccgtcccaatcggttaattgttgatgaagccatcaatgaggacaacagtgtggtgtccttgtcccagcccaagatggatgaattgcagttgttccgaggtgacacagtgttgctgaaaggaaagaagagacgagaagctgtttgcatcgtcctttctgatgatacttgttctgatgagaagattcggatgaatagagttgttcggaataaccttcgtgtacgcctaggggatgtcatcagcatccagccatgccctgatgtgaagtacggcaaacgtatccatgtgctgcccattgatgacacagtggaaggcattactggtaatctcttcgaggtataccttaagccgtacttcctggaagcgtatcgacccatccggaaaggagacatttttcttgtccgtggtgggatgcgtgctgtggagttcaaagtggtggaaacagatcctagcccttattgcattgttgctccagacacagtgatccactgcgaaggggagcctatcaaacgagaggatgaggaagagtccttgaatgaagtagggtatgatgacattggtggctgcaggaagcagctagctcagataaaggagatggtggaactgcccctgagacatcctgccctctttaaggcaattggtgtgaagcctcctagaggaatcctgctttacggacctcctggaacaggaaagaccctgattgctcgagctgtagcaaatgagactggagccttcttcttcttgatcaatggtcctgagatcatgagcaaattggctggtgagtctgagagcaaccttcgtaaagcctttgaggaggctgagaagaatgctcctgccatcatcttcattgatgagctagatgccatcgctcccaaaagagagaaaactcatggcgaggtggagcggcgcattgtatcacagttgttgaccctcatggatggcctaaagcagagggcacatgtgattgttatggcagcaaccaacagacccaacagcattgacccagctctacggcgatttggtcgctttgacagggaggtagatattggaattcctgatgctacaggacgcttagagattcttcagatccataccaagaacatgaagctggcagatgatgtggacctggaacaggtagccaatgagactcacgggcatgtgggtgctgacttagcagccctgtgctcagaggctgctctgcaagccatccgcaagaagatggatctcattgacctagaggatgagaccattgatgccgaggtcatgaactctctagcagttactatggatgacttccggtgggccttgagccagagtaacccatcagcactgcgggaaaccgtggtagaggtgccacaggtaacctgggaagacatcgggggcctagaggatgtcaaacgtgagctacaggagctggtccagtatcctgtggagcacccagacaaattcctgaagtttggcatgacaccttccaagggagttctgttctatggacctcctggctgtgggaaaactttgttggccaaagccattgctaatgaatgccaggccaacttcatctccatcaagggtcctgagctgctcaccatgtggtttggggagtctgaggccaatgtcagagaaatctttgacaaggcccgccaagctgccccctgtgtgctattctttgatgagctggattcgattgccaaggctcgtggaggtaacattggagatggtggtggggctgctgaccgagtcatcaaccagatcctgacagaaatggatggcatgtccacaaaaaaaaatgtgttcatcattggcgctaccaaccggcctgacatcattgatcctgccatcctcagacctggccgtcttgatcagctcatctacatcccacttcctgatgagaagtcccgtgttgccatcctcaaggctaacctgcgcaagtccccagttgccaaggatgtggacttggagttcctggctaaaatgactaatggcttctctggagctgacctgacagagatttgccagcgtgcttgcaagctggccatccgtgaatccatcgagagtgagattaggcgagaacgagagaggcagacaaacccatcagccatggaggtagaagaggatgatccagtgcctgagatccgtcgagatcactttgaagaagccatgcgctttgcgcgccgttctgtcagtgacaatgacattcggaagtatgagatgtttgcccagacccttcagcagagtcggggctttggcagcttcagattcccttcagggaaccagggtggagctggccccagtcagggcagtggaggcggcacaggtggcagtgtatacacagaagacaatgatgatgacctgtatggctaagtggtggtggccagcgtgcagtgagctggcctgcctggaccttgttccctgggggtgggggcgcttgcccaggagagggaccaggggtgcgcccacagcctgctccattctccagtctgaacagttcagctacagtctgactctggacagggggtttctgttgcaaaaatacaaaacaaaagcgataaaataaaagcgattttcatttggtaggcggagagtgaattaccaacagggaattgggccttgggcctatgccatttctgttgtagtttggggcagtgcaggggacctgtgtggggtgtgaaccaaggcactactgccacctgccacagtaaagcatctgcacttgactcaatgctgcccgagccctcccttccccctatccaacctgggtaggtgggtaggggccacagttgctggatgtttatatagagagtaggttgatttattttacatgcttttgagttaatgttggaaaactaatcacaagcagtttctaaaccaaaaaatgacatgttgtaaaaggacaataaacgttgggtcaaaatgg

SEQ ID NO: 2674 - protein, 806 aa, Homo sapiens
MASGADSKGDDLSTAILKQKNRPNRLIVDEAINEDNSVVSLSQPKMDELQLFRGDTVLLKGKKRREAVCIVLSDDTCSDEKIRMNRVVRNNLRVRLGDVISIQPCPDVKYGKRIHVLPIDDTVEGITGNLFEVYLKPYFLEAYRPIRKGDIFLVRGGMRAVEFKVVETDPSPYCIVAPDTVIHCEGEPIKREDEEESLNEVGYDDIGGCRKQLAQIKEMVELPLRHPALFKAIGVKPPRGILLYGPPGTGKTLIARAVANETGAFFFLINGPEIMSKLAGESESNLRKAFEEAEKNAPAIIFIDELDAIAPKREKTHGEVERRIVSQLLTLMDGLKQRAHVIVMAATNRPNSIDPALRRFGRFDREVDIGIPDATGRLEILQIHTKNMKLADDVDLEQVANETHGHVGADLAALCSEAALQAIRKKMDLIDLEDETIDAEVMNSLAVTMDDFRWALSQSNPSALRETVVEVPQVTWEDIGGLEDVKRELQELVQYPVEHPDKFLKFGMTPSKGVLFYGPPGCGKTLLAKAIANECQANFISIKGPELLTMWFGESEANVREIFDKARQAAPCVLFFDELDSIAKARGGNIGDGGGAADRVINQILTEMDGMSTKKNVFIIGATNRPDIIDPAILRPGRLDQLIYIPLPDEKSRVAILKANLRKSPVAKDVDLEFLAKMTNGFSGADLTEICQRACKLAIRESIESEIRRERERQTNPSAMEVEEDDPVPEIRRDHFEEAMRFARRSVSDNDIRKYEMFAQTLQQSRGFGSFRFPSGNQGGAGPSQGSGGGTGGSVYTEDNDDDLYG

SEQ ID NO: 2675 - DNA, 1303 bp, Homo sapiens
ggcttctgggagcgaccgctccgctcgtctcgttggttccggaggtcgctgcggcggtgggaaatgctggcgcgcgcggcgcggggcactggggcccttttgctgaggggctctctactggcttctggccgcgctccgcgccgcgcctcctctggattgccccgaaacaccgtggtactgttcgtgccgcagcaggaggcctgggtggtggagcgaatgggccgattccaccggatcctggagcctggtttgaacatcctcatccctgtgttagaccggatccgatatgtgcagagtctcaaggaaattgtcatcaacgtgcctgagcagtcggctgtgactctcgacaatgtaactctgcaaatcgatggagtcctttacctgcgcatcatggacccttacaaggcaagctacggtgtggaggaccctgagtatgccgtcacccagctagctcaaacaaccatgagatcagagctcggcaaactctctctggacaaagtcttccgggaacgggagtccctgaatgccagcattgtggatgccatcaaccaagctgctgactgctggggtatccgctgcctccgttatgagatcaaggatatccatgtgccaccccgggtgaaagagtctatgcagatgcaggtggaggcagagcggcggaaacgggccacagttctagagtctgaggggacccgagagtcggccatcaatgtggcagaagggaagaaacaggcccagatcctggcctccgaagcagaaaaggctgaacagataaatcaggcagcaggagaggccagtgcagttctggcgaaggccaaggctaaagctgaagctattcgaatcctggctgcagctctgacacaacataatggagatgcagcagcttcactgactgtggccgagcagtatgtcagcgcgttctccaaactggccaaggactccaacactatcctactgccctccaaccctggcgatgtcaccagcatggtggctcaggccatgggtgtatatggagccctcaccaaagccccagtgccagggactccagactcactctccagtgggagcagcagagatgtccagggtacagatgcaagtcttgatgaggaacttgatcgagtcaagatgagttagtggagctgggcttggccagggagtctggggacaaggaagcagattttcctgattctggctctagcttccctgccaagattttggtttttatttttttatttgaactttagtcgtgtaataaactcaccagtggcaaacctgaaaaaaaaaaaaaaaaaaaaaaaaaaaa

SEQ ID NO: 2676 - protein, 356 aa, Homo sapiens
MLARAARGTGALLLRGSLLASGRAPRRASSGLPRNTVVLFVPQQEAWVVERMGRFHRILEPGLNILIPVLDRIRYVQSLKEIVINVPEQSAVTLDNVTLQIDGVLYLRIMDPYKASYGVEDPEYAVTQLAQTTMRSELGKLSLDKVFRERESLNASIVDAINQAADCWGIRCLRYEIKDIHVPPRVKESMQMQVEAERRKRATVLESEGTRESAINVAEGKKQAQILASEAEKAEQINQAAGEASAVLAKAKAKAEAIRILAAALTQHNGDAAASLTVAEQYVSAFSKLAKDSNTILLPSNPGDVTSMVAQAMGVYGALTKAPVPGTPDSLSSGSSRDVQGTDASLDEELDRVKMS

SEQ ID NO: 2677 - DNA, 1110 bp, Homo sapiens
gggcggccggccaatgccggaccgcttcggcaccgcccgcccgatccctccacccgtgggccggcaatggcgggcgcagtttcgctcttgggtgtggtggggctgctgcttgtgtctgcgctgtccggggtcctaggagaccgcgccaatcccgacctccgggcacacccagggaacgcagcccaccccggctctggagccacggaaccccggcggcgaccaccgctcaaggatcaacgcgagcggacccgggccgggtcgctgcctctgggggcgctgtacaccgcggccgtcgcggcttttgtgctgtacaagtgtttgcaggggaaagatgaaactgcggttctccacgaggaggcaagcaagcagcagccactgcagtcaggtgggtttagcagaagtctgtgctgggtcgggggagtttaggggacagcagaagatacataaccacttctgcccccttttttcccttatccccagagcaacagctggcccagttgacacaacagctggcccagacagagcagcacctgaacaacctgatggcccagctggaccccctttttgagcggtgaggagagcaatgattctgtgaatttttggggaatttgtggcaggagggaggaatggggacataggttgggagccactgagtggacatttcttcagtgtgactactctggctggagcccagcaggagcttctgaacatgaagctatggaccatccacgagctgctgcaagatagcaagccggacaaggatatggaggcttcagaaccaggtgaaggctcgggaggcgagtctgctggaggtggagacaaagtctctgaaactggaacattcctgatctctccccacacagaggccagcagacctcttcctgaggacttctgtttaaaggaggacgaggaggagattggtgacagtcaggcctgggaggagcccacaaactggagcacagagacatggaacctagctacttcctgggaggtggggcggggactacggagaaggtgcagccaggctgtggcaaagggccccagtcacagccttggctgggaaggagggacgacagctgaaggtcgactaaaacaaagtctgttttcatg

SEQ ID NO: 2678 - protein, 119 aa, Homo sapiens
MAGAVSLLGVVGLLLVSALSGVLGDRANPDLRAHPGNAAHPGSGATEPRRRPPLKDQRERTRAGSLPLGALYTAAVAAFVLYKCLQGKDETAVLHEEASKQQPLQSGGFSRSLCWVGGV

SEQ ID NO: 2679 - DNA, 2862 bp, Homo sapiens
agtgtcgatccctcagccagggcatggagctctcctgccccggttcgcggtgcccggtgcaagagcagcgtgcccgctgggagcggaaacgcgcctgcaccgcccgggagctgctagagaccgagcggcgctaccaagaacagctggggctggtggccacgtactttttggggatcctgaaagccaaggggaccctgcgaccacctgagcgccaggccctgtttggctcctgggagctcatctacggcgccagccaggagctgcttccctacctggaaggaggatgctggggccaagggctggagggcttctgccgccacttggagctctataaccaatttgctgccaactcagagaggtcccagaccaccctgcaggagcagctaaagaaaaataaaggtttccggaggtttgtacggcttcaggaaggccgccctgagtttgggggccttcagctccaggacctgctccctctgcctctgcaacggctccagcagtatgagaatctcgtcgtagctttggctgaaaacacaggtcccaacagccctgaccatcaacagctcacacctgtccttccctcatgagaagctactgcttatgtccacagaccaggaggagctgtcacgctggtaccacagtctgacttgggctatcagcagccagaaaaactagaggaatcttatagattccagaactcaggatacctcagggataggtcacagccaagagtacaaaggaatcttcagtactgaacaaaacagaacccttcatgatttgacaaaggtcactttctgtttgcctggaccaagctactccagatcatctgaccaactcttaaaaatcacggccaggcacagtggctcatgcctgtaatcccagcactttgggaagcagaggtggcaggatcattccagcccaggagttcaagaccagcctgggcaacacagtgagtgagaccctgtctctatttaagaaaaaataattaagaaattttattaaaaaagaagaatcaggaaaccaagtccaacccaactaaacctcaaatgaaccagcccctaacacagatgaggggatttgggactgataagctctgtgctgtgtccatggcccgtcatttatcaaggctgcagctttgtaaatgtggctatttttatgttgtgtatagtttctatcatttatttttccactggatttgagtaaagttttttttcttttttttgggaaagacccttctgtctcagttttgctatgagaaaagggatttttgggccctgaacgcgggcatgctggtggcctcaggaatacgaggaaaagagctggagctccctctatcttctctgctgtcacactggaaggcagcctctttttgtcctaataaggacagctcttcaagaaggcccagttgtccttaggcacctagtatgggtgtgtacaaccaactaggatcgaaaaaacacacaggagcactccatcatgaaaacagactttgttttagtcgaccttcagctgtcgtccctccttcccagccaaggctgtgactggggccctttgccacagcctggctgcaccttctccgtagtccccgccccacctcccaggaagtagctaggttccatgtctctgtgctccagtttgtgggctcctcccaggcctgactgtcaccaatctcctcctcgtcctcctttaaacagaagtcctcaggaagaggtctgctggcctctgtgtggggagagatcaggaatgttccagtttcagagactttgtctccacctccagcagactcgcctcccgagccttcacctggttctgaagcctccatatccttgtccggcttgctatcttgcagcagctcgtggatggtccatagcttcatgttcagaagctcctgctgggctccagccagagtagtcacactgaagaaatgtccactcagtggctcccaacctatgtccccattcctccctcctgccacaaattccccaaaaattcacagaatcattgctctcctcaccgctcaaaaagggggtccagctgggccatcaggttgttcaggtgctgctctgtctgggccagctgttgtgtcaactgggccagctgttgctctggggataagggaaaaaagggggcagaagtggttatgtatcttctgctgtcccctaaactcccccgacccagcacagacttctgctaaacccacctgactgcagtggctgctgcttgcttgcctcctcgtggagaaccgcagtttcatctttcccctgttgtggaagaaggaaagggcagtactgaagcaacaaggttctgctccatcacctcagtctccagagccagccaagagagagtgcaatttgagatggagacagtgattgggtttttacctcagagaatcacaatcctagtctatctagctcctcacccagcatatgaagcgacgtcctatgtcccacacatggtcagtttgctgaaacacctccaggaatgagcaactccctccggtttgaaaaaagctctggtggctgagtgctgtggctcacacctgtaatcccagcacttcgggaagccaagggcctcctcccaaggagaacatgagaccacttcatatctggaactctagaaacactggctgcagcaatcaacctcctgtgccaaggctggccccactcttgtagcatggacactgctagctgggttcaaatcccagctccagcagttgccagcgctgggtgacctcgagcaagtgactactcctcactggattgtaggagaactaaatgtgatagtcattatttacagttcaccacacgctcttcacatccgttacctccctggatcctcaaaataacctcataatattggaaggcc

SEQ ID NO: 2680 - DNA, 1044 bp, Homo sapiens
tgctgctctcctcccgctccgtcctcctcgcctgccaccggtgcacccagtccgctcacccagcccagtccgtccggtcctcaccgcctgccggccggcccaccccccaccgcaggccatggacgccatcaagaagaagatgcagatgctgaagctggacaaggagaacgccatcgaccgcgccgagcaggccgaagccgacaagaagcaagctgaggaccgctgcaagcagctggaggaggagcagcaggccctccagaagaagctgaaggggacagaggatgaggtggaaaagtattctgaatccgtgaaggaggcccaggagaaactggagcaggccgagaagaaggccactgatgctgaggcagatgtggcctccctgaaccgccgcattcagctggttgaggaggagctggaccgggcccaggagcgcctggctacagccctgcagaagctggaggaggccgagaaggcggctgatgagagcgagagaggaatgaaggtcatcgaaaaccgggccatgaaggatgaggagaagatggaactgcaggagatgcagctgaaggaggccaagcacatcgctgaggattcagaccgcaaatatgaagaggtggccaggaagctggtgatcctggaaggagagctggagcgctcggaggagagggctgaggtggccgagagccgagccagacagctggaggaggaacttcgaaccatggaccaggccctcaagtccctgatggcctcagaggaggagtattccaccaaagaagataaatatgaagaggagatcaaactgttggaggagaagctgaaggaggctgagacccgagcagagtttgccgagaggtctgtggcaaagttggagaaaaccatcgatgacctagaagagaccttggccagtgccaaggaggagaacgtcgagattcaccagaccttggaccagaccctgctggaactcaacaacctgtgagggccagccccacccccagccaggctatggttgccaccccaacccaataaaactgatgttactagcctctc

SEQ ID NO: 2681 - protein, 284 aa, Homo sapiens
MDAIKKKMQMLKLDKENAIDRAEQAEADKKQAEDRCKQLEEEQQALQKKLKGTEDEVEKYSESVKEAQEKLEQAEKKATDAEADVASLNRRIQLVEEELDRAQERLATALQKLEEAEKAADESERGMKVIENRAMKDEEKMELQEMQLKEAKHIAEDSDRKYEEVARKLVILEGELERSEERAEVAESRARQLEEELRTMDQALKSLMASEEEYSTKEDKYEEEIKLLEEKLKEAETRAEFAERSVAKLEKTIDDLEETLASAKEENVEIHQTLDQTLLELNNL

SEQ ID NO: 2682 - DNA, 8187 bp, Homo sapiens
cccgagaagcggcggggcggcgggccggcgggcggggcgcagagccaggcagcgcaggtatagccaggctggagaaaagaagctgccaccatggttgcactttcactgaagatcagcattgggaatgtggtgaagacgatgcagtttgagccgtctaccatggtgtacgacgcctgccgcatcattcgtgagcggatcccagaggccccagctggtcctcccagcgactttgggctctttctgtcagatgatgaccccaaaaagggtatatggctggaggctgggaaagctttggactactacatgctccgaaatggggacactatggagtacaggaagaaacagagacccctgaagatccgtatgctggatggaactgtgaagacgatcatggtggatgactctaagactgtcactgacatgctcatgaccatctgtgcccgcattggcatcaccaatcatgatgaatattcattggttcgagagctgatggaagagaaaaaggaggaaataacagggaccttaagaaaggacaagacattgctgcgagatgaaaagaagatggagaaactaaagcagaaattgcacacagatgatgagttgaactggctggaccatggtcggacactgagggagcagggtgtagaggagcacgagacgctgctgctgcggaggaagttcttttactcagaccagaatgtggattcccgggaccctgtacagctgaacctcctgtatgtgcaggcacgagatgacatcctgaatggctcccaccctgtctcctttgacaaggcctgtgagtttgctggcttccaatgccagatccagtttgggccccacaatgagcagaagcacaaggctggcttccttgacctgaaggacttcctgcccaaggagtatgtgaagcagaagggagagcgtaagatcttccaggcacacaagaattgtgggcagatgagtgagattgaggccaaggtccgctacgtgaagctagcccgttctctcaagacttacggtgtctccttcttcctggtgaaggaaaaaatgaaagggaagaacaagctagtgcccaggcttctgggcatcaccaaggagtgtgtgatgcgagtggatgagaagaccaaggaagtgatccaggagtggaacctcaccaacatcaaacgctgggctgcgtctcccaaaagcttcaccctggattttggagattaccaagatggctattactcagtacagacaactgaaggggagcagattgcacagctcattgccggctacatcgatatcatcctgaagaagaaaaaaagcaaggatcactttgggctggaaggagatgaggagtctactatgctggaggactcagtgtcccccaaaaagtcaacagtcctgcagcagcaatacaaccgggtggggaaagtggagcatggctctgtggccctgcctgccatcatgcgctctggagcctctggtcctgagaatttccaggtgggcagcatgccccctgcccagcagcagattaccagcggccagatgcaccgaggacacatgcctcctctgacttcagcccagcaggcactcactggaaccattaactccagcatgcaggccgtgcaggctgcccaggccaccctggatgactttgacactctgccgcctcttggccaggatgctgcctctaaggcctggcgtaaaaacaagatggatgaatcaaagcatgagatccactctcaggtagatgccatcacagctggtactgcgtctgtggtgaacctgacagcaggggaccctgctgagacagactataccgcagtgggctgtgcagtcaccacaatctcctccaacctgacggagatgtcccgtggggtgaagctgctggctgccttgctggaggacgaaggcggcagtggtcggcccctgttgcaggcagcaaagggccttgcgggagcagtgtcagaactgctgcgcagtgcccaaccagccagtgctgagccccgtcagaacctgctgcaagcagctgggaacgtgggccaggccagtggggagctgttgcaacaaattggggaaagtgatactgacccccacttccaggatgcgctaatgcagctcgccaaagctgtggcaagtgctgcagctgccctggtcctcaaggccaagagtgtggcccagcggacagaggactcgggacttcagacccaagttattgctgcagcaacacagtgtgccctatccacttcccaactagtggcctgtactaaggtggtggcacctacaatcagctcacctgtctgccaagagcaactggtggaggctggacgactggtagccaaagccgtggagggctgtgtgtctgcctcccaggcagctacagaggatgggcaactgttgcgaggggtaggagcagcagccacagctgtcacccaggccctaaatgagctgctgcagcatgtgaaagcccatgccacaggggctgggcctgctggccgttatgaccaggctactgacaccatcctaaccgtcactgagaacatctttagctccatgggtgatgctggggagatggtgggacaggcccgcatcctggcccaagccacatctgacctggtcaatgccatcaaggctgatgctgagggggaaagtgatctggagaactcccgcaagctcttaagtgctgccaagatcctagctgatgccacagccaagatggtagaggctgccaagggagcagctgcccaccctgacagtgaggagcagcagcagcggctgcgggaggcagctgaggggctgcgcatggccaccaatgcagctgcgcagaatgccatcaagaaaaagctggtgcagcgcctggagcatgcagccaagcaggctgcagcctcagccacacagaccatcgctgcagctcagcacgcagcctctacccccaaagcctctgccggcccccagcccctgctggtgcagagctgcaaggcagtggcagagcagattccactgctggtgcagggcgtccgaggaagccaagcccagcctgacagccccagcgctcagcttgccctcattgctgccagccagagcttcctgcagccaggtgggaagatggtggcagctgcaaaggcctcagtgccaacgattcaggaccaggcttcagccatgcagctgagtcagtgtgccaagaacctgggcaccgcgctggctgaactccggacggctgcccagaaggctcaggaagcatgtggacctttggagatggattctgcactgagtgtggtacagaatctagagaaagatctacaggaagtgaaggcagcagctcgagatggcaagcttaaacccttacctggggagacaatggagaagtgtacccaggacctgggcaacagcaccaaagccgtgagctcagccatcgcccagctactgggagaggttgcccagggcaatgagaattatgcaggtattgcagctcgggatgtggcaggtgggctgcggtcactggcccaggccgctaggggagtcgctgcactgacgtcagatcctgcagtgcaggccattgtacttgatacggccagtgatgtgctggacaaggccagcagcctcattgaggaggcgaaaaaggcagctggccatccaggggaccctgagagccagcagcggcttgcccaggtggctaaagcagtgacccaggctctgaaccgctgtgtcagctgcctacctggccagcgcgatgtggataatgccctgagggcagttggagatgccagcaagcgactcctgagtgactcgcttcctcctagcactgggacatttcaagaagctcagagccggttgaatgaagctgctgctgggctgaatcaggcagccacagaactggtgcaggcctctcggggaacccctcaggacctggctcgagcctcaggccgatttggacaggacttcagcaccttcctggaagctggtgtggagatggcaggccaggctccgagccaggaggaccgagcccaagttgtgtccaacttgaagggcatctccatgtcttcaagcaaacttcttctggctgccaaggccctgtccacggaccctgctgcccctaacctcaagagtcagctggctgcagctgccagggcagtaactgacagcatcaatcagctcatcactatgtgcacccagcaggcacccggccagaaggagtgtgataacgccctgcgggaattggagacggtccgggaactcctggagaacccagtccagcccatcaatgacatgtcctactttggttgcctggacagtgtaatggagaactcaaaggtgctgggcgaggccatgactggcatctcccaaaatgccaagaacggaaacctgccagagtttggagatgccatttccacagcctcaaaggcactttgtggcttcaccgaggcagctgcacaggctgcatatctggttggtgtctctgaccccaatagccaagctggacagcaagggctagtggagcccacacagtttgcccgtgcaaaccaggcaattcagatggcctgccagagtttgggagagcctggctgtacccaggcccaggtgctctctgcagccaccattgtggctaaacacacctctgcactgtgtaacagctgtcgcctggcttctgcccgtaccaccaatcctactgccaagcgccagtttgtacagtcagccaaggaggtggccaacagcacagctaatcttgtcaagaccatcaaggcgctagatggggccttcacagaggagaaccgtgcccagtgccgagcagcaacagcccctctgctggaggctgtggacaatctgagtgcctttgcgtccaaccctgagttctccagcattcctgcccagatcagccctgagggtcgggctgccatggagcccattgtgatctctgccaagacaatgttagagagtgccgggggactcatccagacagcccgggccctcgcagtcaatccccgggaccccccgagctggtcggtgctggccggccactcccgtactgtctcagactccatcaagaagctaattacaagcatgagggacaaggctccagggcagctggagtgtgaaacggccattgcagctctgaacagttgtctacgggacctagaccaggcttccctcgctgcagtcagccagcagcttgctccccgtgagggaatctctcaagaggccttgcacactcagatgctcactgcagtccaagagatctcccatctcattgagccgctggccaatgctgcccgggctgaagcctcccagctgggacacaaggtgtcccagatggcgcagtactttgagccgctcaccctggctgcagtgggtgctgcctccaagaccctgagccacccgcagcagatggcactcctggaccagactaaaacattggcagagtctgccctgcagttgctatacactgccaaggaggctggtggtaacccaaagcaagcagctcacacccaggaagccctggaggaggctgtgcagatgatgaccgaggccgtagaggacctgacaacaaccctcaacgaggcagccagtgctgctggggtcgtgggtggcatggtggactccatcacccaggccatcaaccagctagatgaaggaccaatgggtgaaccagaaggttccttcgtggattaccaaacaactatggtgcggacagccaaggccattgcagtgaccgttcaggagatggttaccaagtcaaacaccagcccagaggagctgggccctcttgctaaccagctgaccagtgactatggccgtctggcctcggaggccaagcctgcagcggtggctgctgaaaatgaagagataggttcccatatcaaacaccgggtacaggagctgggccatggctgtgccgctctggtcaccaaggcaggcgccctgcagtgcagccccagtgatgcctacaccaagaaggagctcatagagtgtgcccggagagtctctgagaaggtctcccacgtcctggctgcgctccaggctgggaatcgtggcacccaggcctgcatcacagcagccagcgctgtgtctggtatcattgctgacctcgacaccaccatcatgttcgccactgctggcacgctcaatcgtgagggtactgaaactttcgctgaccaccgggagggcatcctgaagactgcgaaggtgctggtggaggacaccaaggtcctggtgcaaaacgcagctgggagccaggagaagttggcgcaggctgcccagtcctccgtggcgaccatcacccgcctcgctgatgtggtcaagctgggtgcagccagcctgggagctgaggaccctgagacccaggtggtactaatcaacgcagtgaaagatgtagccaaagccctgggagacctcatcagtgcaacgaaggctgcagctggcaaagttggagatgaccctgctgtgtggcagctaaagaactctgccaaggtgatggtgaccaatgtgacatcattgcttaagacagtaaaagccgtggaagatgaggccaccaaaggcactcgggccctggaggcaaccacagaacacatacggcaggagctggcggttttctgttccccagagccacctgccaagacctctaccccagaagacttcatccgaatgaccaagggtatcaccatggcaaccgccaaggccgttgctgctggcaattcctgtcgccaggaagatgtcattgccacagccaatctgagccgccgtgctattgcagatatgcttcgggcttgcaaggaagcagcttaccacccagaagtggcccctgatgtgcggcttcgagccctgcactatggccgggagtgtgccaatggctacctggaactgctggaccatgtactgctgaccctgcagaagccaagcccagaactgaagcagcagttgacaggacattcaaagcgtgtggctggttccgtcactgagctcatccaggctgctgaagccatgaagggaacagaatgggtagacccagaggaccccacagtcattgctgagaatgagctcctgggagctgcagccgccattgaggctgcagccaaaaagctagagcagctgaagccccgggccaaacccaaggaggcagatgagtccttgaactttgaggagcagatactagaagctgccaagtccattgcagcagccaccagtgcactggtaaaggctgcgtcggctgcccagagagaactagtggcccaagggaaggtgggtgccattccagccaatgcactggacgatgggcagtggtcccagggcctcatttctgctgcccggatggtggctgcggccaccaacaatctgtgtgaggcagccaatgcagctgtacaaggccatgccagccaggagaagctcatctcatcagccaagcaggtagctgcctccacagcccagctccttgtggcctgcaaggtcaaggctgaccaggactcggaggcaatgaaacgacttcaggctgctggcaacgcagtgaagcgagcctcagataatctggtgaaagcagcacagaaggctgcagcctttgaagagcaggagaatgagacagtggtggtgaaagagaagatggttggcggcattgcccagatcatcgcagcacaggaagaaatgcttcggaaggaacgagagctggaagaggcgcggaagaaactggcccagatccggcagcagcagtacaagtttctgccttcagagcttcgagatgagcactaaagaagcctcttctatttaatgcagacccggcccagagactgtgcgtgccactaccaaagccttctgggctgtcggggcccaacctgcccaaccccagcactccccaaagtgcctgccaaaccccagggcctggccccgcccagtcccgcagtacatcccctgtcccctccccaaccccaagtgccttcatgccctagggccccccaagtgcctgcccctccccagagtattaacgctccaagagtattattaacgctgctgtacctcgatctgaatctgccggggccccagcccactccaccctgccagcagcttccagccagtccccacagcctcatcagctctcttcaccgttttttgatactatcttcccccacccccagctacccataggggctgcagagttataagccccaaacaggtcatgctccaataaaaatgattctacctacaaaaaaaaaaaaaaaaaaa

SEQ ID NO: 2683 - protein, 2541 aa, Homo sapiens
MVALSLKISIGNVVKTMQFEPSTMVYDACRIIRERIPEAPAGPPSDFGLFLSDDDPKKGIWLEAGKALDYYMLRNGDTMEYRKKQRPLKIRMLDGTVKTIMVDDSKTVTDMLMTICARIGITNHDEYSLVRELMEEKKEEITGTLRKDKTLLRDEKKMEKLKQKLHTDDELNWLDHGRTLREQGVEEHETLLLRRKFFYSDQNVDSRDPVQLNLLYVQARDDILNGSHPVSFDKACEFAGFQCQIQFGPHNEQKHKAGFLDLKDFLPKEYVKQKGERKIFQAHKNCGQMSEIEAKVRYVKLARSLKTYGVSFFLVKEKMKGKNKLVPRLLGITKECVMRVDEKTKEVIQEWNLTNIKRWAASPKSFTLDFGDYQDGYYSVQTTEGEQIAQLIAGYIDIILKKKKSKDHFGLEGDEESTMLEDSVSPKKSTVLQQQYNRVGKVEHGSVALPAIMRSGASGPENFQVGSMPPAQQQITSGQMHRGHMPPLTSAQQALTGTINSSMQAVQAAQATLDDFDTLPPLGQDAASKAWRKNKMDESKHEIHSQVDAITAGTASVVNLTAGDPAETDYTAVGCAVTTISSNLTEMSRGVKLLAALLEDEGGSGRPLLQAAKGLAGAVSELLRSAQPASAEPRQNLLQAAGNVGQASGELLQQIGESDTDPHFQDALMQLAKAVASAAAALVLKAKSVAQRTEDSGLQTQVIAAATQCALSTSQLVACTKVVAPTISSPVCQEQLVEAGRLVAKAVEGCVSASQAATEDGQLLRGVGAAATAVTQALNELLQHVKAHATGAGPAGRYDQATDTILTVTENIFSSMGDAGEMVGQARILAQATSDLVNAIKADAEGESDLENSRKLLSAAKILADATAKMVEAAKGAAAHPDSEEQQQRLREAAEGLRMATNAAAQNAIKKKLVQRLEHAAKQAAASATQTIAAAQHAASTPKASAGPQPLLVQSCKAVAEQIPLLVQGVRGSQAQPDSPSAQLALIAASQSFLQPGGKMVAAAKASVPTIQDQASAMQLSQCAKNLGTALAELRTAAQKAQEACGPLEMDSALSVVQNLEKDLQEVKAAARDGKLKPLPGETMEKCTQDLGNSTKAVSSAIAQLLGEVAQGNENYAGIAARDVAGGLRSLAQAARGVAALTSDPAVQAIVLDTASDVLDKASSLIEEAKKAAGHPGDPESQQRLAQVAKAVTQALNRCVSCLPGQRDVDNALRAVGDASKRLLSDSLPPSTGTFQEAQSRLNEAAAGLNQAATELVQASRGTPQDLARASGRFGQDFSTFLEAGVEMAGQAPSQEDRAQVVSNLKGISMSSSKLLLAAKALSTDPAAPNLKSQLAAAARAVTDSINQLITMCTQQAPGQKECDNALRELETVRELLENPVQPINDMSYFGCLDSVMENSKVLGEAMTGISQNAKNGNLPEFGDAISTASKALCGFTEAAAQAAYLVGVSDPNSQAGQQGLVEPTQFARANQAIQMACQSLGEPGCTQAQVLSAATIVAKHTSALCNSCRLASARTTNPTAKRQFVQSAKEVANSTANLVKTIKALDGAFTEENRAQCRAATAPLLEAVDNLSAFASNPEFSSIPAQISPEGRAAMEPIVISAKTMLESAGGLIQTARALAVNPRDPPSWSVLAGHSRTVSDSIKKLITSMRDKAPGQLECETAIAALNSCLRDLDQASLAAVSQQLAPREGISQEALHTQMLTAVQEISHLIEPLANAARAEASQLGHKVSQMAQYFEPLTLAAVGAASKTLSHPQQMALLDQTKTLAESALQLLYTAKEAGGNPKQAAHTQEALEEAVQMMTEAVEDLTTTLNEAASAAGVVGGMVDSITQAINQLDEGPMGEPEGSFVDYQTTMVRTAKAIAVTVQEMVTKSNTSPEELGPLANQLTSDYGRLASEAKPAAVAAENEEIGSHIKHRVQELGHGCAALVTKAGALQCSPSDAYTKKELIECARRVSEKVSHVLAALQAGNRGTQACITAASAVSGIIADLDTTIMFATAGTLNREGTETFADHREGILKTAKVLVEDTKVLVQNAAGSQEKLAQAAQSSVATITRLADVVKLGAASLGAEDPETQVVLINAVKDVAKALGDLISATKAAAGKVGDDPAVWQLKNSAKVMVTNVTSLLKTVKAVEDEATKGTRALEATTEHIRQELAVFCSPEPPAKTSTPEDFIRMTKGITMATAKAVAAGNSCRQEDVIATANLSRRAIADMLRACKEAAYHPEVAPDVRLRALHYGRECANGYLELLDHVLLTLQKPSPELKQQLTGHSKRVAGSVTELIQAAEAMKGTEWVDPEDPTVIAENELLGAAAAIEAAAKKLEQLKPRAKPKEADESLNFEEQILEAAKSIAAATSALVKAASAAQRELVAQGKVGAIPANALDDGQWSQGLISAARMVAAATNNLCEAANAAVQGHASQEKLISSAKQVAASTAQLLVACKVKADQDSEAMKRLQAAGNAVKRASDNLVKAAQKAAAFEEQENETVVVKEKMVGGIAQIIAAQEEMLRKERELEEARKKLAQIRQQQYKFLPSELRDEH

SEQ ID NO: 2684 - DNA, 3390 bp, Homo sapiens
agaccggaaagggctcgggtcatcccggcgcccagggtcaccttcccacgggctggcacctgggcgcgggcgctgccccggagccggccggcgggacctggcgcccaatcctgggggacccggtgccgtggcccaggggccgggccgaggtcccgggggcggtgccttgcgggcccgtcccggggcggtgcctggtgggctggccccgcggctcctcccctctctgcgggcccagtcgccctttggccgggcgagctaatcgtcggctcaatgacgacgaggcccgacccttcccgtccaggacctacagagacaaccgaaggagagcccaaggcggcttctttgctgtcgccgcccccactgaagcaagagctccccggctccactgaaacaccagctcatttaagctttccccaacgcccggccctccgggacgatacctaacaacgaccggcgcccgcatctggaataggctggcgagatacttagtatccgagggctcgggacttggcgccatcgaggtcatggggacccaggatccagggaacatgggaaccggcgtcccagcctcggagcagataagctgtgccaaagaggatccacaagtttattgccctgaagagactggcggcaccaaggatgtgcaggttacagactgtaagagtcccgaagacagccgacccccaaaagagacggactgctgcaatccggaggactctgggcagctgatggtttcctatgagggtaaagctatgggctaccaggtgcctccctttggctggcgcatctgtctggctcatgagtttacagagaagaggaaaccctttcaagctaacaacgtctccctaagcaacatgataaagcatataggcatgggcttgaggtacctgcagtggtggtaccggaagacccatgtggaaaagaagacacctttcatcgacatgatcaattctgtacccctaagacagatttatggttgtcccttgggtggcatcgggggaggcactattacccgtggctggagaggccagttctgtcgttggcagcttaaccctggaatgtatcagcaccggacagtcatcgctgaccaagacagcagcctgcctgtaggagtctttgtgtgggatgtggaaaatgaaggggacgaagctctagatgtgtccatcatgttctccatgcggaatggactgggtggtggagacgatgccccaggggtttgtggaatgagcccttctgtctggagcgtagcggggaaactgtccgggggctgctcctgcatcatccaacccttccaaacccctacacgatggctgtggctgcacgagtcacggcagctaccacggtaacccacatcacagcctttgaccctgacagcacggggcagcaggtgtggcaggatctacttcaggatggacagctggactctcccactggccaaagcacccctacgcagaaaggagtaggcattgctggagctgtgtgtgtttccagcaagttgcgacctcgaggccagtgccgcctggagttttcactggcttgggacatgcccaggatcatgtttggagctaaaggccaagtccactacaggcggtatacaaggttctttggccaggatggagatgcagcacctgccctcagccactatgcactgtgccgatacgcagagtgggaagagaggatctcagcttggcagagcccggtattggatgacagatcactgcctgcctggtacaaatctgcgctgttcaatgaactatacttcctggctgatggaggcacagtgtggctggaagttcttgaggactccctaccagaggagctgggcagaaacatgtgtcacctccgccccaccctacgggactacggtcgatttggctaccttgagggccaggagtaccgcatgtacaacacatatgatgtccacttttatgcttcctttgccctcatcatgctctggcccaaacttgagctcagcctacagtatgacatggctctggccactctcagggaggacctgacacggcgacggtacctgatgagtggggtgatggcacctgtgaaaaggaggaacgtcatcccccatgatattggggacccagatgatgaaccatggctccgcgtcaatgcatatttaatccatgatactgctgattggaaggacctgaacctgaagtttgtgctgcaggtttatcgggactattacctcacgggtgatcaaaacttcctgaaggacatgtggcctgtgtgtctagctgtgatggaatctgaaatgaagtttgacaaggaccatgatggactcattgaaaatggaggctatgcagaccagacctatgatggatgggtgaccacaggccccagtgcttactgtggagggctgtggctggcagctgtggctgtgatggtccagatggctgctctgtgtggggcacaggacatccaggataagttttcttctatcctcagccggggccaagaagcctatgagagactgctgtggaatggccgctattacaactatgacagcagctctcggcctcagtctcgtagtgttatgtctgaccagtgtgctggacagtggttcctgaaggcctgtggcctaggagaaggagacactgaggtgtttcctacccaacatgtggtccgtgctctccaaactatctttgagctgaacgtccaggcctttgcaggaggggccatgggggctgtgaatgggatgcagccccatggtgtccctgataaatccagtgtgcagtctgatgaagtctgggtgggtgtggtctacgggctggcagctaccatgatccaagagggcctgacttgggagggcttccagacagctgaaggctgctaccgtaccgtgtgggagcgcctgggtctggccttccagaccccagaggcatactgccagcagcgagtgttccgctcactggcctacatgcggccactgagcatatgggccatgcagctagccctgcaacagcagcagcacaaaaaggcctcctggccaaaagtcaaacagggcacaggactaaggacagggcctatgtttggaccaaaggaagccatggcaaacctgagcccagagtgagccgtctgaactgtgggagggaagtgctaacagcccagcctccagcctggcctttcctccttcccctctgaacctcctgcaaccctgagccatcaggacaatcataccccttcccttctctccacccaattgtgccagtaaatgggggttgagggtgacctaggcagcattagaatcacttatttatttctttcctcacctgttccctgactgcgtgaaatgttcagggaggtcagttgatttccccaggtacattcatggtgtgacagacacatgggtacaaataaaagacccagaaagcc

SEQ ID NO: 2685 - protein, 593 aa, Homo sapiens
MAVAARVTAATTVTHITAFDPDSTGQQVWQDLLQDGQLDSPTGQSTPTQKGVGIAGAVCVSSKLRPRGQCRLEFSLAWDMPRIMFGAKGQVHYRRYTRFFGQDGDAAPALSHYALCRYAEWEERISAWQSPVLDDRSLPAWYKSALFNELYFLADGGTVWLEVLEDSLPEELGRNMCHLRPTLRDYGRFGYLEGQEYRMYNTYDVHFYASFALIMLWPKLELSLQYDMALATLREDLTRRRYLMSGVMAPVKRRNVIPHDIGDPDDEPWLRVNAYLIHDTADWKDLNLKFVLQVYRDYYLTGDQNFLKDMWPVCLAVMESEMKFDKDHDGLIENGGYADQTYDGWVTTGPSAYCGGLWLAAVAVMVQMAALCGAQDIQDKFSSILSRGQEAYERLLWNGRYYNYDSSSRPQSRSVMSDQCAGQWFLKACGLGEGDTEVFPTQHVVRALQTIFELNVQAFAGGAMGAVNGMQPHGVPDKSSVQSDEVWVGVVYGLAATMIQEGLTWEGFQTAEGCYRTVWERLGLAFQTPEAYCQQRVFRSLAYMRPLSIWAMQLALQQQQHKKASWPKVKQGTGLRTGPMFGPKEAMANLSPE

SEQ ID NO: 2686 - DNA, 1473 bp, Homo sapiens
aaaaagaaatcaagaatgcaattttatttacaatagtcacgccaaaaatacctagaaataaatttaactgaggatgtaaaagacctctacaaggagagttcaatcggtagcgggagcggagagctgaccccagagagccctgggcagccccacctccgccgccggcctagttaccatcacaccccgggagaagccgcagctgccgcagccggccccagtcaccatcaccgcaactatgagcagcgaggccgagacccagcagccgcccgccgctcccccacgccgcccccgccctcagcgccgccgacacccaccccagcactgcaggcagcggcgcaggaagcggtggcccgggcggcctcacatcggcggcgcctgccggcggggacaagaaggtcatcgcaacgaaggttttgggaacagtaaaatggttcagtgtaaggaacggatatggtttcatcaacaggaatgacaccaaggaagatgtatttgtacaccagactgccagaaagaagaataaccccaggaagtaccttcgcagtgtaggagatggagagactgtggagtttgatgttgttgaaggagaaaagggtgcggaggcagcaaatgttacagggcctggtggtgttccagttcaaggcagtacatatgcagcagaccgtaaccattatagacgctatccacgtcgtagggtcctccacgcaattaccagcaaaattaccagaatagtgagagtggggaaaagaacgagggatcggagagtgctcccgcaggccaagcccaacaacgccggccctaccgcaggcgaaggttcccaccttactacatgcggagaccctatgggcgtcgaccacagtattccaaccctcctgtgcagggtgaagtgatggagggtgctgacaaccagggtgcaggagaacaaggtagaccagtgaggcagaatacgtatcggggatatagaccacgattccgcaggggccctccacgccaaagacagcctagagaggacggcaatgatgaagataaagaaaatcaaggagatgagacccaaggtcagcagccacctcaacgtcggtaccgccgcaacttcaattgccgacgcagacacccagaaaaccctaaaccacaagatggcaaagagacaaaagcagccgatccaccagctgagaattcgtccactcctgaggctgagcggggcaggactgagtaaatgccagcttaccatctctaccatcatccggtttagtcatccaacaggaagaaatatgaaattccagctataagaaatgaacaaaagattggagctgaagaccttaagtgcttgctttttgcccgttgaccagataaatagaactatctgcattatctatgcagcatgggatttttattatttttacctaaagacgtctctttttggtaataacaaacgtgttttttaaaaaagcctggtttttttcaatacgcctttaaagg

SEQ ID NO: 2687 - protein, 127 aa, Homo sapiens [sequence omitted]

SEQ ID NO: 2688 - DNA, 557 bp, Homo sapiens
gaagaataaccccaggaagtaccttcgcagtattccaaccctcctgtgcagggtgaagtgatggagggtgctgacaaccagggtgcaggagaacaaggtagaccagtgaggcagaatacgtatcggggatatagaccacgattccgcaggggccctccacgccaaagacagcctagagaggacggcaatgatgaagataaagaaaatcaaggagatgagacccaaggtcagcagccacctcaacgtcggtaccgccgcaacttcaattgccgacgcagacacccagaaaaccctaaaccacaagatggcaaagagacaaaagcagccgatccaccagctgagaattcgtccactcctgaggctgagcggggcaggactgagtaaatgccagcttaccatctctaccatcatccggtttagtcatccaacaggaagaaatatgaaattccagctataagaaatgaacaatagaactatctgcattatctatgcagcatgggatttttattatttttacctaaagacgtctctttttggtaataacaaacgtgtttttt

SEQ ID NO: 2689 - DNA, 1023 bp, Homo sapiens
agcggtggctgccgggcgtggtgtcggtgggtcggttggtttttgtctcaccgttggtgtccgtgccgttcagttgcccgccatggctgagctggatccgttcggcgcccctgccggcgcccctggcggtcccgcgctggggaacggagtggccggcgccggcgaagaagacccggctgcggccttcttggcgcagcaagagagcgagattgcgggcatcgagaacgacgaggccttcgccatcctggacggcggcgcccccgggccccagccgcacggcgagccgccggggggtccggatgctgttgatggagtaatgaatggtgaatactaccaggaaagtaatggtccaacagacagttatgcagctatttcacaagtggatcgattgcagtcagagcctgaaagtatccgtaaatggagagaagaacaaatggaacgcttggaagcccttgatgccaattctcggaagcaagaagcagagtggaaagaaaaggcaataaaggagctagaagaatggtatgcaagacaggacgagcagctacagaaaacaaaagcaaacaacagggcagcagaagaagcctttgtaaatgacattgacgagtcgtccccaggcactgagtgggaacgggtggcccggctgtgtgactttaaccccaagtctagcaagcaggccaaagatgtctcccgcatgcgctcagtcctcatctccctcaagcaggccccgctggtgcactgaagagccaccctgtggaaacactacatctgcaatatcttaatcctactcagtgaagctcttcacagtcattggattaattatgttgagttcttttggaccaaacctttttgtctttagagttgttcattgtttgtgattgcatgtttccttccttcaactgtgttctccctggcattcagagaggagggagaggaggaagaggaaggggagggaagcttcccaagagtagcctcaacctgtgcttctgtgcattattctgagaataaatttctgtttcaaactgt

SEQ ID NO: 2690 - protein, 218 aa, Homo sapiens
MAELDPFGAPAGAPGGPALGNGVAGAGEEDPAAAFLAQQESEIAGIENDEAFAILDGGAPGPQPHGEPPGGPDAVDGVMNGEYYQESNGPTDSYAAISQVDRLQSEPESIRKWREEQMERLEALDANSRKQEAEWKEKAIKELEEWYARQDEQLQKTKANNRAAEEAFVNDIDESSPGTEWERVARLCDFNPKSSKQAKDVSRMRSVLISLKQAPLVH

SEQ ID NO: 2691 - DNA, 1105 bp, Homo sapiens
gccaccgctgtggtgtcggtgggtcggttggtttttgtctcaccgttggtgtccgtgccgttcagttgcccgccatggctgagctggatccgttcggcgcccctgccggcgcccctggcggtcccgcgctggggaacggagtggccggcgccggcgaagaagacccggctgcggccttcttggcgcagcaagagagcgagattgcgggcatcgagaacgacgaggccttcgccatcctggacggcggcgcccccgggccccagccgcacggcgagccgccggggggtccggatgctgttgatggagtaatgaatggtgaatactaccaggaaagtaatggtccaacagacagttatgcagctatttcacaagtggatcgattgcagtcagagcctgaaagtatccgtaaatggagagaagaacaaatggaacgcttggaagcccttgatgccaattctcggaagcaagaagcagagtggaaagaaaaggcaataaaggagctagaagaatggtatgcaagacaggacgagcagctacagaaaacaaaagcaaacaacagggtggcagatgaagctttctacaaacaacccttcgctgacgtgattggttatgtcacaaacataaaccatccttgctacagcctagaacaggcagcagaagaagcctttgtaaatgacattgacgagtcgtccccaggcactgagtgggaacgggtggcccggctgtgtgactttaaccccaagtctagcaagcaggccaaagatgtctcccgcatgcgctcagtcctcatctccctcaagcaggccccgctggtgcactgaagagccaccctgtggaaacactacatctgcaatatcttaatcctactcagtgaagctcttcacagtcattggattaattatgttgagttcttttggaccaaacctttttgtctttagagttgttcattgtttgtgattgcatgtttccttccttcaactgtgttctccctggcattcagagaggagggagaggaggaagaggaaggggagggaagcttcccaagagtagcctcaacctgtgcttctgtgcattattctgagaataaatttctgtttcaaactgt

SEQ ID NO: 2692 - protein, 248 aa, Homo sapiens
MAELDPFGAPAGAPGGPALGNGVAGAGEEDPAAAFLAQQESEIAGIENDEAFAILDGGAPGPQPHGEPPGGPDAVDGVMNGEYYQESNGPTDSYAAISQVDRLQSEPESIRKWREEQMERLEALDANSRKQEAEWKEKAIKELEEWYARQDEQLQKTKANNRVADEAFYKQPFADVIGYVTNINHPCYSLEQAAEEAFVNDIDESSPGTEWERVARLCDFNPKSSKQAKDVSRMRSVLISLKQAPLVH

SEQ ID NO: 2693 - DNA, 1235 bp, Homo sapiens
gcttctgtactgccaggtccgggtcggcggctgcactgcggatgagaccggtgcgactcatgaaggtgttcgtcacccgcaggatacccgccgagggtagggtcgcgctcgcccgggcggcagactgtgaggtggagcagtgggactcggatgagcccatccctgccaaggagctagagcgaggtgtggcgggggcccacggcctgctctgcctcctctccgaccacgtggacaagaggatcctggatgctgcaggggccaatctcaaagtcatcagcaccatgtctgtgggcatcgaccacttggctttggatgaaatcaagaagcgtgggatccgagttggctacaccccagatgtcctgacagataccaccgccgaactcgcagtctccctgctacttaccacctgccgccggttgccggaggccatcgaggaagtgaagaatggtggctggacctcgtggaagcccctctggctgtgtggctatggactcacgcagagcactgtcggcatcatcgggctggggcgcataggccaggccattgctcggcgtctgaaaccattcggtgtccagagatttctgtacacagggcgccagcccaggcctgaggaagcagcagaattccaggcagagtttgtgtctacccctgagctggctgcccaatctgatttcatcgtcgtggcctgctccttaacacctgcaaccgagggactctgcaacaaggacttcttccagaagatgaaggaaacagctgtgttcatcaacatcagcaggggcgacgtcgtaaaccaggacgacctgtaccaggccttggccagtggtaagattgcagctgctggactggatgtgacgagcccagaaccactgcctacaaaccaccctctcctgaccctgaagaactgtgtgattctgccccacattggcagtgccacccacagaacccgcaacaccatgtccttgttggcagctaacaacttgctggctggcctgagaggggagccgatgcctagtgaactcaagctgtagccaaacagtagagatggagggccgggaagcaaaccgtgccctggtattgtcagacacacccaggcttgatttggatccacaggcagagccaagggaaggtgtgattctctgaggaaagagtgattctgatatatgtacttgtcacattggtgttggacacatttgcgccaaaagtatggtaattctattattaaataattctctgag

SEQ ID NO: 2694 - protein, 328 aa, Homo sapiens
MRPVRLMKVFVTRRIPAEGRVALARAADCEVEQWDSDEPIPAKELERGVAGAHGLLCLLSDHVDKRILDAAGANLKVISTMSVGIDHLALDEIKKRGIRVGYTPDVLTDTTAELAVSLLLTTCRRLPEAIEEVKNGGWTSWKPLWLCGYGLTQSTVGIIGLGRIGQAIARRLKPFGVQRFLYTGRQPRPEEAAEFQAEFVSTPELAAQSDFIVVACSLTPATEGLCNKDFFQKMKETAVFINISRGDVVNQDDLYQALASGKIAAAGLDVTSPEPLPTNHPLLTLKNCVILPHIGSATHRTRNTMSLLAANNLLAGLRGEPMPSELKL

SEQ ID NO: 2695 - DNA, 1399 bp, Homo sapiens
agtgtgaaatcttcagagaagaatttctctttagttctttgcaagaaggtagagataaagacactttttcaaaaatggcaatggtatcagaattcctcaagcaggcctggtttattgaaaatgaagagcaggaatatgttcaaactgtgaagtcatccaaaggtggtcccggatcagcggtgagcccctatcctaccttcaatccatcctcggatgtcgctgccttgcataaggccataatggttaaaggtgtggatgaagcaaccatcattgacattctaactaagcgaaacaatgcacagcgtcaacagatcaaagcagcatatctccaggaaacaggaaagcccctggatgaaacacttaagaaagcccttacaggtcaccttgaggaggttgttttagctctgctaaaaactccagcgcaatttgatgctgatgaacttcgtgctgccatgaagggccttggaactgatgaagatactctaattgagattttggcatcaagaactaacaaagaaatcagagacattaacagggtctacagagaggaactgaagagagatctggccaaagacataacctcagacacatctggagattttcggaacgctttgctttctcttgctaagggtgaccgatctgaggactttggtgtgaatgaagacttggctgattcagatgccagggccttgtatgaagcaggagaaaggagaaaggggacagacgtaaacgtgttcaataccatccttaccaccagaagctatccacaacttcgcagagtgtttcagaaatacaccaagtacagtaagcatgacatgaacaaagttctggacctggagttgaaaggtgacattgagaaatgcctcacagctatcgtgaagtgcgccacaagcaaaccagctttctttgcagagaagcttcatcaagccatgaaaggtgttggaactcgccataaggcattgatcaggattatggtttcccgttctgaaattgacatgaatgatatcaaagcattctatcagaagatgtatggtatctccctttgccaagccatcctggatgaaaccaaaggagattatgagaaaatcctggtggctctttgtggaggaaactaaacattcccttgatggtctcaagctatgatcagaagactttaattatatattttcatcctataagcttaaataggaaagtttcttcaacaggattacagtgtagctacctacatgctgaaaaatatagcctttaaatcatttttatattataactctgtataatagagataagtccattttttaaaaatgttttccccaaaccataaaaccctatacaagttgttctagtaacaatacatgagaaagatgtctatgtagctgaaaataaaatgacgtcacaagac

SEQ ID NO: 2696 - protein, 346 aa, Homo sapiens
MAMVSEFLKQAWFIENEEQEYVQTVKSSKGGPGSAVSPYPTFNPSSDVAALHKAIMVKGVDEATIIDILTKRNNAQRQQIKAAYLQETGKPLDETLKKALTGHLEEVVLALLKTPAQFDADELRAAMKGLGTDEDTLIEILASRTNKEIRDINRVYREELKRDLAKDITSDTSGDFRNALLSLAKGDRSEDFGVNEDLADSDARALYEAGERRKGTDVNVFNTILTTRSYPQLRRVFQKYTKYSKHDMNKVLDLELKGDIEKCLTAIVKCATSKPAFFAEKLHQAMKGVGTRHKALIRIMVSRSEIDMNDIKAFYQKMYGISLCQAILDETKGDYEKILVALCGGN

SEQ ID NO: 2697 - DNA, 1030 bp, Homo sapiens
tttccgcgctacctacagaggggcccatacggcgttgttctggattcccgtcgtaacttaaagggaaactttcacaatgtccggagcccttgatgtcctgcaaatgaaggaggaggatgtccttaagttccttgcagcaggaacccacttaggtggcaccaatcttgacttccagatggaacagtacatctgtaaaaggaaaagtaatggcatctatatcataaatctgaagaggacctgggagaagcttctgctggcagctagtgctattgttgccattgaaaaccctgctgatgtcagtgttatatcctccaggaatactggccagagggctgtgctgaagtttgctgctgccactggagccactccaattgctggccacttcactcctggaaccttcactaaccagatccaggcagccttccgggagccatggcttcttgtggttactgaccccagggctgaccaccagcctctcacggaggcatcttatgttaacctacctaccattgctctgtgtaacacagattctcctatgcgctatgtggacattgccatcccatgcaacaacaagggagctcactcagtgggtttgatgtggtagatgctggctcgggaagttctgcgcatgtgtagcacgatttcctatgaccacccgtgggaggtcatgcctgatctctacttctacagagatcctgaagatattgaaaaagaagagcaggctgctgctgaaaaggcagtgaccaaggaggaatttcagggtgaatggactgctccagctcctgagttcactgctactcagcctgaggttgcagactggtctgaaggtgtacaggtgccctctgtgcctattcagcagttccctactgaagactggagcgctcagcctgccacggaagactggtctgcagctcccactgctcaggccactgaatgggtaggagcaaccactgactggtcttaagctgttcttgcataggctcttaagcaacatggaaaaatggttgatggaaaataaacatcagtttct

SEQ ID NO: 2698 - protein, 295 aa, Homo sapiens
MSGALDVLQMKEEDVLKFLAAGTHLGGTNLDFQMEQYICKRKSNGIYIINLKRTWEKLLLAASAIVAIENPADVSVISSRNTGQRAVLKFAAATGATPIAGHFTPGTFTNQIQAAFREPWLLVVTDPRADHQPLTEASYVNLPTIALCNTDSPMRYVDIAIPCNNKGAHSVGLMWRMLAREVLRMCSTISYDHPWEVMPDLYFYRDPEDIEKEEQAAAEKAVTKEEFQGEWTAPAPEFTATQPEVADWSEGVQVPSVPIQQFPTEDWSAQPATEDWSAAPTAQATEWVGATTDWS

SEQ ID NO: 2699 - DNA, 709 bp, Homo sapiens
cagaggggcccatacggcgttgttctggattcccgtcgtaacttaaagggaaactttcacaatgtccggagcccttgatgtcctgcaaatgaaggaggaggatgtccttaagttccttgcagcaggaacccacttaggtggcaccaatcttgacttccagatggaacagtacatctgtaaaaggaaaagtaatggcatctatatcataaatctgaagaggacctgggagaagcttctgctggcttcactcctggaaccttcactaaccagatccaggcagccttccgggagccatggcttcttgtggttactgaccccagggctgaccaccagcctctcacggaggcatcttatgttaacctacctaccattgctctgtgtaacacagattctcctatgcgctatgtggacattgccatcccatgcaacaacaagggagctcactcagtgggtttgatgtggtagatgctggctcgggaagttctgcgcatgtgtagcacgatttcctatgaccacccgtgggaggtcatgcctgatctctacttctacagagatcctgaagatattgaaaaagaagagcaggctgctgctgaaaaggcagtgaccaaggaggaatttcagggtgaatggactgctccagctcctgagttcactgctactcagcctgaggttgcagactggtctgaaggtgtacaggtgccctctgtgc

SEQ ID NO: 2700 - DNA, 603 bp, Homo sapiens
gggaaactttcacaatgtccggagcccttgatgtcctgcaaatgaaggaggaggatgtccttaagttccttgcagcaggaacccacttaggtggcaccaatcttgacttccagatggaacagtacatctgtaaaaggaaaagtaatggcatctatatcataaatctgaagaggacctgggagaagcttctgctggcagctagtgctattgttgccattgaaaaccctgctgatgtcagtgttatatcctccaggaatactggccagagggctgtgctgaagtttgctgctgccactggagccactccaattgctggccacttcactcctggaaccttcactaaccagacacggaggcatcttatgttaacctacctaccattgctctgtgtaacacagattctcctatgcgctatgtggacattgccatcccatgcaacaacaagggagctcactcagtgggtttgatgtggtagatgctggctcgggaagttctgcgcatgtgtagcacgatttcctatgaccacccgtgggaggtcatgcctgatctctacttctacagagatcctgaagatattgaaaaagaagagcaggctgctgctga

SEQ ID NO: 2701 - DNA, 2091 bp, Homo sapiens
ggcacgagggccaggaacgccagccgttcacgcgttcggtcctccttggctgactcaccgccctcgccgccgcaccatggacgcccccaggcaggtggtcaactttgggcctggtcccgccaagctgccgcactcagtgttgttagagatacaaaaggaattattagactacaaaggagttggcattagtgttcttgaaatgagtcacaggtcatcagattttgccaagattattaacaatacagagaatcttgtgcgggaattgctagctgttccagacaactataaggtgatttttctgcaaggaggtgggtgcggccagttcagtgctgtccccttaaacctcattggcttgaaagcaggaaggtgtgcggactatgtggtgacaggagcttggtcagctaaggccgcagaagaagccaagaagtttgggactataaatatcgttcaccctaaacttgggagttatacaaaaattccagatccaagcacctggaacctcaacccagatgcctcctacgtgtattattgcgcaaatgagacggtgcatggtgtggagtttgactttatacccgatgtcaagggagcagtactggtttgtgacatgtcctcaaacttcctgtccaagccagtggatgtttccaagtttggtgtgatttttgctggtgcccagaagaatgttggctctgctggggtcaccgtggtgattgtccgtgatgacctgctggggtttgccctccgagagtgcccctcggtcctggaatacaaggtgcaggctggaaacagctccttgtacaacacgcctccatgtttcagcatctacgtcatgggcttggttctggagtggattaaaaacaatggaggtgccgcggccatggagaagcttagctccatcaaatctcaaacaatttatgagattattgataattctcaaggattctacgtgtctgtgggaggcatccgggcctctctgtataatgctgtcacaattgaagacgttcagaagctggccgccttcatgaaaaaatttttggagatgcatcagctatgaacacatcctaaccaggatatactctgttcttgaacaacatacaaagtttaaagtaacttggggatggctacaaaaagttaacacagtatttttctcaaatgaacatgtttattgcagattcttcttttttgaaagaacaacagcaaaacatccacaactctgtaaagctggtgggacctaatgtcaccttaattctgacttgaactggaagcattttaagaaatcttgttgcttttctaacaaattcccgcgtattttgcctttgctgctactttttctagttagatttcaaacttgcctgtggacttaataatgcaagttgcgattaattatttctggagtcatgggaacacacagcacagagggtaggggggccctctaggtgctgaatctacacatctgtggggtctcctgggttcagcggctgttgattcaaggtcaacattgaccattggaggagtggtttaagagtgccaggcgaagggcaaactgtagatcgatctttatgctgttattacaggagaagtgacatactttatatatgtttatattagcaaggtctgtttttaataccatatactttatatttctatacatttatatttctaataatacagttatcactgatatatgtagacacttttagaatttattaaatccttgaccttgtgcattatagcattccattagcaagagttgtaccccctccccagtcttcgccttcctctttttaagctgttttatgaaaaagacctagaagttcttgattcatttttaccattctttccataggtagaagagaaagttgattggttggttgtttttcaattatgccattaaactaaacatttctgttaaattaccctatcctttgttctctactgttttctttgtaatgtatgactacgagagtgatactttgctgaaaagtctttcccctattgtttatctattgtcagtattttatgttgaatatgtaaagaacattaaagtcctaaaacatctaaaaaaaaaaaaaaaaaaaaaaaaaaaaaaaaaaa

SEQ ID NO: 2702 - protein, 324 aa, Homo sapiens
MDAPRQVVNFGPGPAKLPHSVLLEIQKELLDYKGVGISVLEMSHRSSDFAKIINNTENLVRELLAVPDNYKVIFLQGGGCGQFSAVPLNLIGLKAGRCADYVVTGAWSAKAAEEAKKFGTINIVHPKLGSYTKIPDPSTWNLNPDASYVYYCANETVHGVEFDFIPDVKGAVLVCDMSSNFLSKPVDVSKFGVIFAGAQKNVGSAGVTVVIVRDDLLGFALRECPSVLEYKVQAGNSSLYNTPPCFSIYVMGLVLEWIKNNGGAAAMEKLSSIKSQTIYEIIDNSQGFYVSVGGIRASLYNAVTIEDVQKLAAFMKKFLEMHQL

SEQ ID NO: 2703 - DNA, 2229 bp, Homo sapiens
ggcacgagggccaggaacgccagccgttcacgcgttcggtcctccttggctgactcaccgccctcgccgccgcaccatggacgcccccaggcaggtggtcaactttgggcctggtcccgccaagctgccgcactcagtgttgttagagatacaaaaggaattattagactacaaaggagttggcattagtgttcttgaaatgagtcacaggtcatcagattttgccaagattattaacaatacagagaatcttgtgcgggaattgctagctgttccagacaactataaggtgatttttctgcaaggaggtgggtgcggccagttcagtgctgtccccttaaacctcattggcttgaaagcaggaaggtgtgcggactatgtggtgacaggagcttggtcagctaaggccgcagaagaagccaagaagtttgggactataaatatcgttcaccctaaacttgggagttatacaaaaattccagatccaagcacctggaacctcaacccagatgcctcctacgtgtattattgcgcaaatgagacggtgcatggtgtggagtttgactttatacccgatgtcaagggagcagtactggtttgtgacatgtcctcaaacttcctgtccaagccagtggatgtttccaagtttggtgtgatttttgctggtgcccagaagaatgttggctctgctggggtcaccgtggtgattgtccgtgatgacctgctggggtttgccctccgagagtgcccctcggtcctggaatacaaggtgcaggctggaaacagctccttgtacaacacgcctccatgtttcagcatctacgtcatgggcttggttctggagtggattaaaaacaatggaggtgccgcggccatggagaagcttagctccatcaaatctcaaacaatttatgagattattgataattctcaaggattctacgtttgtccagtggagccccaaaatagaagcaagatgaatattccattccgcattggcaatgccaaaggagatgatgctttagaaaaaagatttcttgataaagctcttgaactcaatatgttgtccttgaaagggcataggtctgtgggaggcatccgggcctctctgtataatgctgtcacaattgaagacgttcagaagctggccgccttcatgaaaaaatttttggagatgcatcagctatgaacacatcctaaccaggatatactctgttcttgaacaacatacaaagtttaaagtaacttggggatggctacaaaaagttaacacagtatttttctcaaatgaacatgtttattgcagattcttcttttttgaaagaacaacagcaaaacatccacaactctgtaaagctggtgggacctaatgtcaccttaattctgacttgaactggaagcattttaagaaatcttgttgcttttctaacaaattcccgcgtattttgcctttgctgctactttttctagttagatttcaaacttgcctgtggacttaataatgcaagttgcgattaattatttctggagtcatgggaacacacagcacagagggtaggggggccctctaggtgctgaatctacacatctgtggggtctcctgggttcagcggctgttgattcaaggtcaacattgaccattggaggagtggtttaagagtgccaggcgaagggcaaactgtagatcgatctttatgctgttattacaggagaagtgacatactttatatatgtttatattagcaaggtctgtttttaataccatatactttatatttctatacatttatatttctaataatacagttatcactgatatatgtagacacttttagaatttattaaatccttgaccttgtgcattatagcattccattagcaagagttgtaccccctccccagtcttcgccttcctctttttaagctgttttatgaaaaagacctagaagttcttgattcatttttaccattctttccataggtagaagagaaagttgattggttggttgtttttcaattatgccattaaactaaacatttctgttaaattaccctatcctttgttctctactgttttctttgtaatgtatgactacgagagtgatactttgctgaaaagtctttcccctattgtttatctattgtcagtattttatgttgaatatgtaaagaacattaaagtcctaaaacatctaaaaaaaaaaaaaaaaaaaaaaaaaaaaaaaaaaa

SEQ ID NO: 2704 - protein, 370 aa, Homo sapiens
MDAPRQVVNFGPGPAKLPHSVLLEIQKELLDYKGVGISVLEMSHRSSDFAKIINNTENLVRELLAVPDNYKVIFLQGGGCGQFSAVPLNLIGLKAGRCADYVVTGAWSAKAAEEAKKFGTINIVHPKLGSYTKIPDPSTWNLNPDASYVYYCANETVHGVEFDFIPDVKGAVLVCDMSSNFLSKPVDVSKFGVIFAGAQKNVGSAGVTVVIVRDDLLGFALRECPSVLEYKVQAGNSSLYNTPPCFSIYVMGLVLEWIKNNGGAAAMEKLSSIKSQTIYEIIDNSQGFYVCPVEPQNRSKMNIPFRIGNAKGDDALEKRFLDKALELNMLSLKGHRSVGGIRASLYNAVTIEDVQKLAAFMKKFLEMHQL

SEQ ID NO: 2705 - DNA, 1551 bp, Homo sapiens
atggtggaaaaggagcaaagacatagtcggaatgaatgggaaggttggtataatggacccaaatctcttgtttcaaaacaagttaaggaaaattgttttaaaaatcctaaacactcagtctgtgaatatgatcctgggtcctctcagaactgccaacattctaacaccagctggcaccagagaccctgctctgaggtcagggatgatgtgagcaagtggtctaataattcctcagaactctttttctcattcttcttccctctcttcctcttctgccttaccaagaacagagaaatggtctttcttaaagaagaagaaaagaggactccaaccgtaagaattgagtacaaggagttgctcagtgatgtgaagctgaagagggcatctgaggagatgagctgtaaaacatattcacaagagggacgtgtgaagggagtgaccattccgaagaacccagacagctgcccacaggagaaggatgccatcccaaagatgaatcagagtttccatgagcaaaagagccttgtgagtcgtcggcaaagcctgagtcctgtcctttcgctctcctcccccgacagtatgagcttcaccactcgctccaccttctccaccaactaccggtccctgggctctgtccaggcgcccagctacggcgcccggcctatagacaatgcccatcttgctgctgatgactgtagagtcaagtatgagacagaactggccatgcaccagtctgtggagaaagacatccatgggctccacaaggtcatcgatgacaccaatgtcacttggctgcaggtggagacacagatcgaggctctcaaggaggagctctttcatgaagaagaaccacgaataggaaataaaaggcccacaagctcagattgccagctctgggttgacagtggagtggtccccatgcagcccgccaaggtcggagctgctgagatgatgctcactgagccgagatgcacagtccagtcttcggaggtcgacctggaatcgatgagaaatctgaaggctagcttggggaacagcctgagggaggtggaggcctgctacaccgtgaagatggagcagctcgacggaatcgtgccacacttggagtcagagctggcacagacctgggcagaggaacagtgccaggcccagcagtacgaggccctgatgaacatcaaggtcaagttggaggctgagatcaccacctactgctgcctgctgaaagatggcgaggacgtcaatcttggtgataccctggacagcagcaactccatgcaaaccatccaaaagaccaccacctgccagacagtggatggcaaagtggtgtctgagaccaaagataccaaagttctgaggcattacaccagcagaaattacaactgcatggcccaggaaaggcgcaatggcaaagaaacaggaagtgattcttacagtggggaacccctggaagctgaggatgccaaagccgtaagacttaacatctccaagtcatcattcgaggtgttaatgctggaagctacagagaagatgacaggttcctcattaatgtga

SEQ ID NO: 2706 - protein, 516 aa, Homo sapiens [sequence omitted]

SEQ ID NO: 2707 - DNA, 2353 bp, Homo sapiens
acagagccccggccgccgccagagcgatgttcccgcagagccggcacccgacgccgcaccaggctgcaggccagcccttcaagttcactatcccggagtccctggaccggattaaagaggaattccagttcctgcaggcgcagtatcacagccttaaattggaatgtgagaaactggcaagtgaaaagacagaaatgcagaggcactatgtgatgtattatgaaatgtcatatggattaaacattgaaatgcacaaacagactgaaatcgccaagagattgaatacgatttgtgcacaagtcatcccatttctgtctcaggaacatcaacaacaggtggcccaggctgttgaacgtgccaaacaggtgaccatggcagaattgaatgccatcatcgggcagcagcagttgcaagctcagcatctttctcatggccacggacccccagttccccttacgcctcacccttcgggacttcagcctcctggaatcccgcccctcgggggcagtgccggccttcttgcgctgtctagtgctctgagtgggcagtctcacttggcaataaaagatgacaagaagcaccacgatgcagagcaccacagaggtgagaggccgggcaagagtaattccctcctggtcccagacagtctaagaggcacagataaacgcagaaatggacctgaattttccaatgacatcaagaaaaggaaggtggatgataaggactccagccactatgacagtgatggtgacaaaagcgatgacaacttagttgtggatgtgtctaatgaggacccttcttctccgcgagcaagccctgcccactcgccccgggaaaatggaatcgacaaaaatcgcctgctaaagaaggatgcttctagcagtccagcttccacggcctcctcggcaagttccacttctttgaaatccaaagaaatgagcttgcatgaaaaagccagcacgcctgttctgaaatccagcacaccaacgcctcggagcgacatgccaacgccgggcaccagcgccactccaggcctccgtccaggtctcggcaagcctccagccatagaccccctcgttaaccaagcggcagctggcttgaggacacccctggcagtgcccggcccatatcctgctccttttgggatggtcccccacgctggcatgaacggcgagctgaccagcccaggcgctgcctacgccagtttacacaacatgtcgccccagatgagcgccgcagccgccgcggccgccgtggtggcctacgggcgctcccccatggtggggtttgatcctccccctcacatgagagtacctaccattcctccaaacctggcaggaatccctggggggaaacctgcatactccttccacgttactgcagacggtcagatgcagcctgtcccttttccccccgacgccctcatcggacccggaatcccccggcatgctcgccagatcaacaccctcaaccacggggaggtggtgtgcgctgtgaccatcagcaaccccacgagacacgtgtacacaggcgggaagggctgcgtcaaggtctgggacatcagccaccctggcaataagagccctgtctcccagctcgactgtctgaacagagacaattatatccgttcctgtaaattgctacccgatggctgcactctcatagtgggaggggaagccagtactttgtccatttgggacctggcggctccaaccccgcgcatcaaggcggagctgacgtcctcggcccccgcctgctacgccctggccatcagccccgattccaaggtctgcttctcatgctgcagcgacggcaacatcgctgtgtgggatctgcacaaccagacactagtgaggcaattccagggccacacagacggagccagctgtattgacatttctaatgatggcaccaagctctggacgggtggtttggacaacacagtcaggtcctgggacctgcgcgaggggcggcagctgcagcagcacgacttcacctcccagatcttctccctggggtactgccccaccggggagtggctggcagtgggcatggagagcagcaatgtggaggtgctgcacgtgaacaagcctgacaagtaccagctgcacctgcatgagagctgcgtgctgtccctgaaatttgcttactgtggtaaatggtttgtgagtactggaaaagataacctcctcaatgcttggcggaccccctatggagccagcatattccagtccaaagagtcctcgtcagtgcttagctgtgacatctctgtggatgataagtacatagtcactggctcgggggacaagaaggctacagtctatgaagtcatctactgaaaacattatgtggt

SEQ ID NO: 2708 - DNA, 2745 bp, Homo sapiens
cggcagtctcgcgcggctactgcagcactggggtgtcagttgttggtccgacccagaacgcttcagttctgctctgcaaggatatataataactgattggtgtgcccgtttaataaaagaatatggaaactgaacagccagaagaaaccttccctaacactgaaaccaatggtgaatttggtaaacgccctgcagaagatatggaagaggaacaagcatttaaaagatctagaaacactgatgagatggttgaattacgcattctgcttcagagcaagaatgctggggcagtgattggaaaaggaggcaagaatattaaggctctccgtacagactacaatgccagtgtttcagtcccagacagcagtggccccgagcgcatattgagtatcagtgctgatattgaaacaattggagaaattctgaagaaaatcatccctaccttggaagagggcctgcagttgccatcacccactgcaaccagccagctcccgctcgaatctgatgctgtggaatgcttaaattaccaacactataaaggaagtgactttgactgcgagttgaggctgttgattcatcagagtctagcaggaggaattattggggtcaaaggtgctaaaatcaaagaacttcgagagaacactcaaaccaccatcaagcttttccaggaatgctgtcctcattccactgacagagttgttcttattggaggaaaacccgatagggttgtagagtgcataaagatcatccttgatcttatatctgagtctcccatcaaaggacgtgcacagccttatgatcccaatttttacgatgaaacctatgattatggtggttttacaatgatgtttgatgaccgtcgcggacgcccagtgggatttcccatgcggggaagaggtggttttgacagaatgcctcctggtcggggtgggcgtcccatgcctccatctagaagagattatgatgatatgagccctcgtcgaggaccacctccccctcctcccggacgaggcggccggggtggtagcagagctcggaatcttcctcttcctccaccaccaccacctagagggggagacctcatggcctatgacagaagagggagacctggagaccgttacgacggcatggttggtttcagtgctgatgaaacttgggactctgcaatagatacatggagcccatcagaatggcagatggcttatgaaccacagggtggctccggatatgattattcctatgcagggggtcgtggctcatatggtgatcttggtggacctattattactacacaagtaactattcccaaagatttggctggatctattattggcaaaggtggtcagcggattaaacaaatccgtcatgagtcgggagcttcgatcaaaattgatgagcctttagaaggatccgaagatcggatcattaccattacaggaacacaggaccagatacagaatgcacagtatttgctgcagaacagtgtgaagcagtatgcagatgttgaaggattctaatgcaagatattttttcttttttatagtgtgaagcagtattctggaaagtttttctaagactagtgaagaactgaaggagtcctgcatctttttttttttatctgcttctgtttaaaaagccaacattcctctgcttcataggtgttctgcatttgaggtgtagtgaaatctttgctgttcaccagatgtaatgttttagttccttacaaacagggttgggggggggaagggcgtgcaaaaactaacattgaaattttgaaacagcagcagagtgagtggattttatttttcgttattgttggtggtttaaaaaattccccccatgtaattattgtgaacaccttgctttgtggtcactgtaacatttggggggtgggacagggaggaaaagtaacaatagtccacatgtccctggcatctgttcagagcagtgtgcagaatgtaatgctcttttgtaagaaacgttttatgatttttaaaataaatttagtgaacctatttttggtggtcattttttttttaagacagtcattttaaaatggtggctgaatttcccaacccacccccaaactaaacactaagtttaattttcagctcctctgttggacatataagtgcatctcttgttggacataggcaaaataacttggcaaacttagttctggtgatttcttgatggtttggaagtctattgctgggaagaaattccatcatacatattcatgcttataataagctggggattttttgtttgtttttgcaaatgcttgcccctacttttcaacaattttctatgttagttgtgaagaactaaggtggggagcagtactacaagttgagtaatggtatgagtatataccagaattctgattggcagcaagtttattaatcagaataacacttggttatggaagtgactaatgctgaaaaaattgattatttttattagataatttctcacctatagacttaaactgtcaatttgctctagtgtcttattagttaaactttgtaaaatatatatatacttgtttttccattgtatgcaaattgaaagaaaaagatgtaccatttctctgttgtatgttggattatgtaggaatgtttgtgtacaattcaaaaaaaaaaaagatgaaaaaagttcctgtggatgttttgtgtagtatcttggcatttgtattgatagttaaaattcacttccaaataaataaaacacccatgatgctag

SEQ ID NO: 2709 - protein, 464 aa, Homo sapiens
METEQPEETFPNTETNGEFGKRPAEDMEEEQAFKRSRNTDEMVELRILLQSKNAGAVIGKGGKNIKALRTDYNASVSVPDSSGPERILSISADIETIGEILKKIIPTLEEGLQLPSPTATSQLPLESDAVECLNYQHYKGSDFDCELRLLIHQSLAGGIIGVKGAKIKELRENTQTTIKLFQECCPHSTDRVVLIGGKPDRVVECIKIILDLISESPIKGRAQPYDPNFYDETYDYGGFTMMFDDRRGRPVGFPMRGRGGFDRMPPGRGGRPMPPSRRDYDDMSPRRGPPPPPPGRGGRGGSRARNLPLPPPPPPRGGDLMAYDRRGRPGDRYDGMVGFSADETWDSAIDTWSPSEWQMAYEPQGGSGYDYSYAGGRGSYGDLGGPIITTQVTIPKDLAGSIIGKGGQRIKQIRHESGASIKIDEPLEGSEDRIITITGTQDQIQNAQYLLQNSVKQYADVEGF

SEQ ID NO: 2710 - DNA, 3416 bp, Homo sapiens
aaaaaggaactgggagcgcgccgcggcggttcctgtccttacagttgcgctgcccagggaccgatgttgcgcgaggaaaatgcgggacgcccaggtcggtgctcggcccagacttatgcccgtgttttcacagcccacactcgtgcccgaagccccttaccccgccccgggctgtggtctgtgggctgtgggacgagctgcggcgcgggccatttctgagcagtggaggtttcaagtaatccactaacaaccagttccaaattctgtcatcaaatcctgtgctgctgttcctcgtggtaatagatgcatattatttcttttatttaaaagaaatgaatgtgactagtattgcattaagagctgaaacttggcttttagctgcatggcatgttaaagtacctccgatgtggctggaagcttgtattaactggattcaagaagaaaataataatgttaacttgagtcaggcccaaatgaataaacaagtgtttgagcagtggctccttactgatctgagggatttggagcatcctcttttacccgatggcattttagaaattccaaaaggagaattaaatggattttatgctctgcagattaattccttggttgatgtaagtcagcctgcatactcccagatacagaagttgagaggaaagaatacaacaaatgatctagttacagctgaagcacaagtaaccccaaaaccttgggaagcaaagccttcacgaatgttgatgctgcagctaactgatggaatcgtacaaatacagggaatggaatatcagcctattccaattcttcatagtgatcttcctccaggtacaaaaattttgatttatggaaatatatctttccgtcttggtgttctcttattgaaaccagaaaacgtgaaagtgttaggaggtgaagtagatgctcttttagaagaatatgcccaagaaaaagtacttgcaagattaataggggaacctgatcttgtagtttcagtcataccaaacaattctaacgaaaacattcccagagttacagatgttctagatcctgcattaggtccttctgatgaagaactcttggcaagtcttgatgaaaatgatgagcttacagcaaataatgacacttcctcagaacgatgtttcaccacaggtagttcctcaaataccattcccacaagacagtcaagttttgagccagaatttgttatttctccaagaccaaaagaggaaccatcaaacctatctatacatgtaatggatggagaattagatgacttttcactggaggaggccttgcttttagaagaaactgtccagaaagaacagatggaaactaaggaattgcaaccattgacttttaacagaaatgccgatcgaagtatagagagattttcacataatcctaatactacgaataacttttctttgacttgcaaaaatggaaacaataattggagtgaaaaaaatgtatctgaacaaatgactaatgaagacaaatcatttggttgtccatctgttagagaccaaaacaggagtattttttcagttcattgtaatgtacccttagcccatgattttacaaataaagaaaagaacttagagacagataataaaataaaacaaaccagcagttcagatagccattccttaaataataaaatattaaatagagaggtggtcaactatgtacagaaaaggaattcacaaatttctaatgaaaatgattgtaatttacagagttgttctttaagatcatcagagaatagcattaatctttctattgccatggatttgtattctccaccctttgtctatttgtctgttctaatggccagcaaaccaaaggaagttacaacagtgaaagtgaaagcatttattgtaaccttaactggaaatctctcaagttctggtggtatttggagtataactgcaaaggtgtctgatggtactgcatatctagatgtagactttgtggatgaaatacttactagcttgatagggttctcagtaccagaaatgaaacagtcaaaaaaggatcctcttcaataccaaaagttcctggaagggttgcagaaatgtcaaagagatctaatagatttgtgctgtctaatgactatttcatttaatccttccttgtctaaagcaatggtactggcattacaagatgttaatatggaacaccttgagaatctaaagaagcggttaaataaataattaaactaaaatagtattaggaacaattaaaaacaacaaggaaatatttagaatttgttcacaattttacttatgatactttgtgtaaaaaggaaaaatgaaatttcatagcttatttcagtttaattttaaagtgtttaatcatgtttgttatatgtggagcttttgaaaataagttaatctttttttttttttttttaatgtcagggtattgctctgttgcccaggctagagtgcagtggcatgatcataggttattgcatcaacctcttgagctcaagcgatcctcctgccttagcctcttgagttgctgggactataggcatgtaccaccatgcccagctaatttataattactattattgttttgtagggacagagttttgctatgttgcccagattggtctcaaactcctggcctctcactcctgccgtcatggcctccaaagtttactttttttaaaagtaactgttagatggaggaatatggtgacccactattgttgagaaatttgttttccacttgtcacgtcacataagatgattgctaaaatattgtactggtgttcggtggtgagtcatatttttgaaagttaataattataaataggtaatttccttctaatatgttggtactgtctatggccataccaccctgaacatgcctgagcttgtcataatatgttgagtacccaaaagatttgtttatattgttaatcttagggaaaaaaaattaaaatccagtagatcagaacatcaggctttcagatacaaattgatttactggtttttattttgctgattataatatttggtatatttaaggtaatctagttaactagatgctatttcatagattatattgaatgatttaaaactttattttcaaggatagtttattttaaatggcatattgaaaacatcattattaagatccagtaggtaggacatttattggattaaaatgaagcatttatctatgtctttaggtgtcattgttccctttctgaattagctgtacatataagccttcctttggttttaagtactgatttttttttaaaaaaaagagggactgtttaccattcttccactgtgctgttataaagttgtatttgaaaggtaatgttgtttttattaatcttttgtcttaaaataatttaaagtgctttgaattttaaaacattaaacaaatccttaaataac

SEQ ID NO: 2711 - DNA, 1621 bp, Homo sapiens
tgctccggagggcacgggctccgtagtcaccaactgcaaggccccctccccctgcgggcgctcccctggcacaattcgcgttcgagagtgacctgcactcgctgcttcaactggatgcacccatccccaatgcaccccctgctcgctggcagcgcaaagccaagaaagccacaggcccggccccctcacccatgcgggccgccaaccgatcccacagcgccagcaggactccgggccgaactcctggcaaatccagttccaaggttcagaccactcctagcaaacctggcggtgaccgctatatcccccatcgcagtgctgcccagatggaggttgccagcttcctcctgagcaaggagaaccagcctgaaaacagccagacgcccaccaagaaggaacatcagaaagcctggactttgaacctgaacggttttgatgtagaggaagccaagatccttcggctcagtggaaaaccacaaaatgcgccagagggttaccagaacagactgaaagtactctacagccaaaaggccactcctggctccagccggaagacctaccattacattccttccctgccagaccataacctggatgcccctgaaatccgaaatgactactacctgaatcttgtggactggagctctgggaatgtattggccgtggcgctggacaacagtgtgtacctgtggagcgcaagctctggtgacatcctgcagcttttgcaaatggagcagactgggaaatatgtatcctctgcggcctggatcaaagagggcaactacttggctgtgggcatcagcagtgctgaggtgcagctttgggatgtgcagcagcagaaacggcttcgaaatatgaccattcactctgcccgagtgggctccctaagctggaacagctatatcctatccagtggttcacattctggccacatccaccaccatgatgttcgggtagcagaacaccacgtggccacactgagtggccacagccaggaagtgtgtgggctgcgctgggtcccagatggacgacatttggccagtggtggcaatgataacttggtcaaagtgtggcctagtgctcttggagagggtggctgggttcctctgcagacattcacccttcaaggggctgtcaaggccgtagcatggtgtccctggaagtccaatgtcccggcaacaggagggggcaccagtgatcgacacatttgcatctggaacgtgtgctctggggcctgtctgagtgccgtggatgccctttcccaggtgtgctccaccctctggtctccccactacaaggagctcatctcaggccatggctttgcacagaaccagctggttatttggaagtacccaaccatggccaaggtggctgaactcaaaggtcacacatcccgggtcctgactctgaccatgagcccagatggggccacagtggcatctgcagcagcagatgagaccccgaggctatggcactgttttgagttggaccctgtgtggcggcgggagcgggagaaggccagtgcagccaaaagcagcttcatccaccaaggcatccgctgaagaccaacccctcgcctcagttgttttttatttttctaataaagtcatgtctcccttca

SEQ ID NO: 2712 - DNA, 588 bp, Homo sapiens
ctttcccagccccagcccggcccttgcagctgcagagatgttgatgcctaagaagaaccggattgccatttatgaactcctttttaaggagggagtcatggtggccaagaaggatgtccacatgcctaagcacccggagctggcagacaagaatgtgcccaaccttcatgtcatgaaggccatgcagtttctcaagtcccgaggctatgtgaaggaacagtttgcctggagacatttctactggtatcttaccaatgagggtatccagtatctccgtgattaccttcatctgcccccagagattgtgcctgccaccctatgccgtagccgtccagagactggcaggcctcggcctaaaggtctggagattgagcgacctacgagactcgcaagaggggaagctgacagagatacccacagatgagtgctgtgccacctggtgccggcaagaaagctgaggctggggctgggtcagcaaccgaattccagtttagaggcggatttggtcatggacgtggtcagccacctcagtaaaattggagaggattcttttgcattgaataaacttacagccaaaaatccttaaaa

SEQ ID NO: 2713 - protein, 128 aa, Homo sapiens
MLMPKKNRIAIYELLFKEGVMVAKKDVHMPKHPELADKNVPNLHVMKAMQFLKSRGYVKEQFAWRHFYWYLTNEGIQYLRDYLHLPPEIVPATLCRSRPETGRPRPKGLEIERPTRLARGEADRDTHR

SEQ ID NO: 2714 - DNA, 627 bp, Homo sapiens
agtctccggcgagttgttgcctgggctggacgtggttttgtctgctgcgcccgctcttcgcgctctcgtttcattttctgcagcgcgccacgaggatggcccacaagcagatctactactcggacaagtacttcgacgaacactacgagtaccggcatgttatgttacccagagaactttccaaacaagtacctaaaactcatctgatgtctgaagaggagtggaggagacttggtgtccaacagagtctaggctgggttcattacatgattcatgagccagaaccacatattcttctctttagacgacctcttccaaaagatcaacaaaaatgaagtttatctggggatcgtcaaatctttttcaaatttaatgtatatgtgtatataaggtagtattcagtgaatacttgagaaatgtacaaatctttcatccatacctgtgcatgagctgtattcttcacagcaacagagctcagttaaatgcaactgcaagtaggttactgtaagatgtttaagataaaagttcttccagtcagtttttctcttaagtgcctgtttgagtttactgaaacagtttacttttgttcaataaagtttgtatgttgcatttaaaaaaaaaaaaaaa

SEQ ID NO: 2715 - protein, 79 aa, Homo sapiens
MAHKQIYYSDKYFDEHYEYRHVMLPRELSKQVPKTHLMSEEEWRRLGVQQSLGWVHYMIHEPEPHILLFRRPLPKDQQK

SEQ ID NO: 2716 - DNA, 4335 bp, Homo sapiens
cgggcagcgtggaccccggatgagttgcttttaggcttgctggcccgcggggctgtccaggcacgcgaggcccctcaacaaaatgcttcaacaagttccagaaaacataaattttcctgctgaagaagagaaaatcttggagttttggactgaatttaattgttttcaggaatgcttaaagcaatcaaaacataaaccaaaatttaccttctatgatggtcctccttttgcaactggactgcctcactatggacatatacttgcgggtacaattaaagatatagttacaagatatgctcaccagagtgggtttcatgttgacagaagatttggatgggattgccatggcttacctgtggaatatgaaattgataagacactgggaatcagaggaccagaggatgtggccaaaatggggattacagagtataacaatcagtgccgagcaattgtgatgagatattctgctgagtggaagtctactgttagcagacttggccgatggattgactttgacaatgactataaaactctgtatccacaattcatggaatcagtctggtgggtcttcaaacaactctatgataaaggccttgtttatagaggtgtgaaagtcatgcccttctctacggcatgtaacactccactttccaacttcgagtcacaccagaattataaggatgttcaagatccttcagtatttgtaactttccctttggaagaagatgaaactgtatctttagttgcttggacaaccactccctggactctacctagtaaccttgctgtgtgtgttaatccagaaatgcaatatgtgaaaattaaagatgttgccagaggacgattactcattttaatggaagccagattgtcagccctctataaattggagagtgactatgagatccttgaaagatttcctggtgcctatcttaaaggcaagaagtacaggcccctgtttgactatttcctgaagtgtaaagagaatggcgctttcactgtgcttgttgacaactatgtgaaggaagaagaaggcacaggggttgtccaccaagctccttacttcggtgctgaggactatcgggtctgtatggactttaacattattcggaaagactcactccctgtttgccctgtggatgcttcaggctgcttcacaacggaggtgacagatttcgcaggacagtatgtgaaggatgctgacaaaagtatcatcaggactttgaaggaacaaggccgacttctggttgccaccaccttcactcacagctaccctttttgctggagatcagacactcctctaatttacaaagcagtgcccagctggtttgtgcgagtggagaacatggtggaccagctcctaaggaacaatgacctgtgctactgggtcccagagttggtacgagaaaaacgatttggaaattggctgaaagatgcacgtgactggacaatttccagaaacagatactggggcacccccatcccactgtgggtcagcgatgactttgaggaggtggtatgcattgggtcagtggcggaacttgaagaactgtcaggagcaaagatctcagatctccacagagagagtgttgaccacctgaccattccttcacgctgtgggaagggatccttgcaccgcatctctgaagtgtttgactgttggtttgagagtggcagcatgccctatgctcaggttcattacccgtttgaaaacaagagggagtttgaggatgcttttcctgcagatttcattgccgagggcatcgaccaaaccagaggatggttttataccctgctggtgctggccacggccctctttggacaaccgcctttcaagaacgtaattgtgaatgggcttgtcctggcaagtgatggccaaaaaatgagcaaacggaaaaagaattatccagatccagtttccatcatccagaagtatggtgctgatgccctcagattatatctgattaactcccctgtggtgagagcagaaaacctccgctttaaagaagagggtgtgcgggacgtccttaaggatgtactgctcccatggtacaatgcctatcgcttcttaatccagaacgttctgaggctccagaaggaggaagaaatagaatttctctacaatgagaacacggttagagaaagccccaacattacagaccggtggatcctgtccttcatgcagtctctcattggcttctttgagactgaaatggcagcttataggctttatactgtggtgcctcgcctggtcaagtttgtagatattctgaccaattggtatgttagaatgaaccgcagaagattaaagggtgaaaatgggatggaggattgtgtcatggccctagaaaccttgtttagtgttctgctttctctttgcagacttatagctccctacacaccttttctcactgaattgatgtaccagaatctaaaggtgctgattgaccctgtttctgttcaggacaaggacacactcagcattcactacctcatgctgccccgtgttcgagaagaattgattgacaagaaaacagagagtgcagtatctcagatgcagtctgtgattgaacttggaagagtgatcagagaccgaaaaactattcccataaagtatcctttgaaagaaattgtggttatccatcaagatccagaagctcttaaagatatcaagtctttggagaagtatatcattgaggaactcaatgttcgaaaagttacactgtctacagataaaaacaagtatggcattcggctaagggcagaaccagatcacatggtcctggggaagcgtctgaagggagcctttaaggcagtgatgacgtccatcaagcagttgagcagtgaggagctggagcagttccagaagactgggaccattgttgtggaaggccatgaattgcacgatgaagacatccgcctcatgtacacctttgatcaggccacaggtgggactgcgcaatttgaagcacactcagatgctcaggctttggtcctcttagatgtcactcctgaccagtcaatggtagatgaaggaatggctcgggaagtcatcaatcgcatacagaaacttcgcaaaaagtgcaatctggttccaactgatgaaatcacagtgtactataaagcaaagtctgaaggaacatatctgaatagtgttattgaaagccacacagagttcatatttaccaccataaaggctcccttgaaaccatatccagtttctccatcggataaagtccttattcaagaaaaaacacagttgaagggatctgaactggaaattacactcaccagaggatcttcccttcctggtcctgcttgtgcatatgtcaatcttaacatttgtgcaaatggcagtgaacaaggtggagtattgctcctggaaaatccaaaaggtgacaataggttggaccttttaaagctgaagagtgttgtcactagcatttttggtgtgaaaaatacagagctggctgtcttccatgatgaaacagaaatacaaaaccaaactgacttactgagtcttagtggaaaaacactttgtgtgactgcaggatcggctccctctctgatcaacagttctagtactcttctttgtcagtatatcaacctacagctcctgaatgcaaagccacaagagtgtttaatggggacagtgggcactctcctgcttgaaaacccacttgggcagaatggactcacccaccaaggtcttctgtatgaagcagccaaggtgtttggccttcggagcaggaagctaaagctgtttctgaatgagacccaaacgcaggaaattacagaagacatccccgtgaagactttgaatatgaagactgtgtatgtttctgtgttaccaacaacagcagacttctagcatgtacttatcaatgttgttcggtcagcccttccctaattacacctatcccctacacatacatgcacatagacacacacatgaacacactgaagatatttccttcaggtgtgtgtaaaatatgctgcttggattgaaattcaaatgggattgattagtcaagtaacttgagacctcacagtaatcttcacacttaaccttagacacctatgcagtcatgttgggagcaggttacaatgttacttcagcccacagtttatttctattcttgagttcttaagtacagaagatagaagtgatttaaatggcatagtatatatatcattttctggccttttaaaatttatttgagacctcttgatgaaatggacatattatatatttctgccacctggattttcctggataatttgatggaatattttaagtttcagtaaatcagaacaataaacaaactcagatat

SEQ ID NO: 2717 - protein, 1262 aa, Homo sapiens
MLQQVPENINFPAEEEKILEFWTEFNCFQECLKQSKHKPKFTFYDGPPFATGLPHYGHILAGTIKDIVTRYAHQSGFHVDRRFGWDCHGLPVEYEIDKTLGIRGPEDVAKMGITEYNNQCRAIVMRYSAEWKSTVSRLGRWIDFDNDYKTLYPQFMESVWWVFKQLYDKGLVYRGVKVMPFSTACNTPLSNFESHQNYKDVQDPSVFVTFPLEEDETVSLVAWTTTPWTLPSNLAVCVNPEMQYVKIKDVARGRLLILMEARLSALYKLESDYEILERFPGAYLKGKKYRPLFDYFLKCKENGAFTVLVDNYVKEEEGTGVVHQAPYFGAEDYRVCMDFNIIRKDSLPVCPVDASGCFTTEVTDFAGQYVKDADKSIIRTLKEQGRLLVATTFTHSYPFCWRSDTPLIYKAVPSWFVRVENMVDQLLRNNDLCYWVPELVREKRFGNWLKDARDWTISRNRYWGTPIPLWVSDDFEEVVCIGSVAELEELSGAKISDLHRESVDHLTIPSRCGKGSLHRISEVFDCWFESGSMPYAQVHYPFENKREFEDAFPADFIAEGIDQTRGWFYTLLVLATALFGQPPFKNVIVNGLVLASDGQKMSKRKKNYPDPVSIIQKYGADALRLYLINSPVVRAENLRFKEEGVRDVLKDVLLPWYNAYRFLIQNVLRLQKEEEIEFLYNENTVRESPNITDRWILSFMQSLIGFFETEMAAYRLYTVVPRLVKFVDILTNWYVRMNRRRLKGENGMEDCVMALETLFSVLLSLCRLIAPYTPFLTELMYQNLKVLIDPVSVQDKDTLSIHYLMLPRVREELIDKKTESAVSQMQSVIELGRVIRDRKTIPIKYPLKEIVVIHQDPEALKDIKSLEKYIIEELNVRKVTLSTDKNKYGIRLRAEPDHMVLGKRLKGAFKAVMTSIKQLSSEELEQFQKTGTIVVEGHELHDEDIRLMYTFDQATGGTAQFEAHSDAQALVLLDVTPDQSMVDEGMAREVINRIQKLRKKCNLVPTDEITVYYKAKSEGTYLNSVIESHTEFIFTTIKAPLKPYPVSPSDKVLIQEKTQLKGSELEITLTRGSSLPGPACAYVNLNICANGSEQGGVLLLENPKGDNRLDLLKLKSVVTSIFGVKNTELAVFHDETEIQNQTDLLSLSGKTLCVTAGSAPSLINSSSTLLCQYINLQLLNAKPQECLMGTVGTLLLENPLGQNGLTHQGLLYEAAKVFGLRSRKLKLFLNETQTQEITEDIPVKTLNMKTVYVSVLPTTADF

SEQ ID NO: 2718 - DNA, 4508 bp, Homo sapiens
cgggcagcgtggaccccggatgagttgcttttaggcttgctggcccgcggggctgtccaggcacgcgaggcccctcaggtacgccctctcttccctgcaggatccggccctcaaagacgagggtcacgcacgcgttacaaccccgaaacagtagcacaagatttaatttttaaaagagcgtgtttcttcggggcttgccgttcgttcgtttccagcctcaggaatttatggtcgcctttttgaatgagcaacaaaatgcttcaacaagttccagaaaacataaattttcctgctgaagaagagaaaatcttggagttttggactgaatttaattgttttcaggaatgcttaaagcaatcaaaacataaaccaaaatttaccttctatgatggtcctccttttgcaactggactgcctcactatggacatatacttgcgggtacaattaaagatatagttacaagatatgctcaccagagtgggtttcatgttgacagaagatttggatgggattgccatggcttacctgtggaatatgaaattgataagacactgggaatcagaggaccagaggatgtggccaaaatggggattacagagtataacaatcagtgccgagcaattgtgatgagatattctgctgagtggaagtctactgttagcagacttggccgatggattgactttgacaatgactataaaactctgtatccacaattcatggaatcagtctggtgggtcttcaaacaactctatgataaaggccttgtttatagaggtgtgaaagtcatgcccttctctacggcatgtaacactccactttccaacttcgagtcacaccagaattataaggatgttcaagatccttcagtatttgtaactttccctttggaagaagatgaaactgtatctttagttgcttggacaaccactccctggactctacctagtaaccttgctgtgtgtgttaatccagaaatgcaatatgtgaaaattaaagatgttgccagaggacgattactcattttaatggaagccagattgtcagccctctataaattggagagtgactatgagatccttgaaagatttcctggtgcctatcttaaaggcaagaagtacaggcccctgtttgactatttcctgaagtgtaaagagaatggcgctttcactgtgcttgttgacaactatgtgaaggaagaagaaggcacaggggttgtccaccaagctccttacttcggtgctgaggactatcgggtctgtatggactttaacattattcggaaagactcactccctgtttgccctgtggatgcttcaggctgcttcacaacggaggtgacagatttcgcaggacagtatgtgaaggatgctgacaaaagtatcatcaggactttgaaggaacaaggccgacttctggttgccaccaccttcactcacagctaccctttttgctggagatcagacactcctctaatttacaaagcagtgcccagctggtttgtgcgagtggagaacatggtggaccagctcctaaggaacaatgacctgtgctactgggtcccagagttggtacgagaaaaacgatttggaaattggctgaaagatgcacgtgactggacaatttccagaaacagatactggggcacccccatcccactgtgggtcagcgatgactttgaggaggtggtatgcattgggtcagtggcggaacttgaagaactgtcaggagcaaagatctcagatctccacagagagagtgttgaccacctgaccattccttcacgctgtgggaagggatccttgcaccgcatctctgaagtgtttgactgttggtttgagagtggcagcatgccctatgctcaggttcattacccgtttgaaaacaagagggagtttgaggatgcttttcctgcagatttcattgccgagggcatcgaccaaaccagaggatggttttataccctgctggtgctggccacggccctctttggacaaccgcctttcaagaacgtaattgtgaatgggcttgtcctggcaagtgatggccaaaaaatgagcaaacggaaaaagaattatccagatccagtttccatcatccagaagtatggtgctgatgccctcagattatatctgattaactcccctgtggtgagagcagaaaacctccgctttaaagaagagggtgtgcgggacgtccttaaggatgtactgctcccatggtacaatgcctatcgcttcttaatccagaacgttctgaggctccagaaggaggaagaaatagaatttctctacaatgagaacacggttagagaaagccccaacattacagaccggtggatcctgtccttcatgcagtctctcattggcttctttgagactgaaatggcagcttataggctttatactgtggtgcctcgcctggtcaagtttgtagatattctgaccaattggtatgttagaatgaaccgcagaagattaaagggtgaaaatgggatggaggattgtgtcatggccctagaaaccttgtttagtgttctgctttctctttgcagacttatagctccctacacaccttttctcactgaattgatgtaccagaatctaaaggtgctgattgaccctgtttctgttcaggacaaggacacactcagcattcactacctcatgctgccccgtgttcgagaagaattgattgacaagaaaacagagagtgcagtatctcagatgcagtctgtgattgaacttggaagagtgatcagagaccgaaaaactattcccataaagtatcctttgaaagaaattgtggttatccatcaagatccagaagctcttaaagatatcaagtctttggagaagtatatcattgaggaactcaatgttcgaaaagttacactgtctacagataaaaacaagtatggcattcggctaagggcagaaccagatcacatggtcctggggaagcgtctgaagggagcctttaaggcagtgatgacgtccatcaagcagttgagcagtgaggagctggagcagttccagaagactgggaccattgttgtggaaggccatgaattgcacgatgaagacatccgcctcatgtacacctttgatcaggccacaggtgggactgcgcaatttgaagcacactcagatgctcaggctttggtcctcttagatgtcactcctgaccagtcaatggtagatgaaggaatggctcgggaagtcatcaatcgcatacagaaacttcgcaaaaagtgcaatctggttccaactgatgaaatcacagtgtactataaagcaaagtctgaaggaacatatctgaatagtgttattgaaagccacacagagttcatatttaccaccataaaggctcccttgaaaccatatccagtttctccatcggataaagtccttattcaagaaaaaacacagttgaagggatctgaactggaaattacactcaccagaggatcttcccttcctggtcctgcttgtgcatatgtcaatcttaacatttgtgcaaatggcagtgaacaaggtggagtattgctcctggaaaatccaaaaggtgacaataggttggaccttttaaagctgaagagtgttgtcactagcatttttggtgtgaaaaatacagagctggctgtcttccatgatgaaacagaaatacaaaaccaaactgacttactgagtcttagtggaaaaacactttgtgtgactgcaggatcggctccctctctgatcaacagttctagtactcttctttgtcagtatatcaacctacagctcctgaatgcaaagccacaagagtgtttaatggggacagtgggcactctcctgcttgaaaacccacttgggcagaatggactcacccaccaaggtcttctgtatgaagcagccaaggtgtttggccttcggagcaggaagctaaagctgtttctgaatgagacccaaacgcaggaaattacagaagacatccccgtgaagactttgaatatgaagactgtgtatgtttctgtgttaccaacaacagcagacttctagcatgtacttatcaatgttgttcggtcagcccttccctaattacacctatcccctacacatacatgcacatagacacacacatgaacacactgaagatatttccttcaggtgtgtgtaaaatatgctgcttggattgaaattcaaatgggattgattagtcaagtaacttgagacctcacagtaatcttcacacttaaccttagacacctatgcagtcatgttgggagcaggttacaatgttacttcagcccacagtttatttctattcttgagttcttaagtacagaagatagaagtgatttaaatggcatagtatatatatcattttctggccttttaaaatttatttgagacctcttgatgaaatggacatattatatatttctgccacctggattttcctggataatttgatggaatattttaagtttcagtaaatcagaacaataaacaaactcagatat

SEQ ID NO: 2719 - protein, 1262 aa, Homo sapiens; identical to SEQ ID NO: 2717

SEQ ID NO: 2720 - DNA, 6408 bp, Homo sapiens
tgaggagggcccggcctgcgagagcctcagtgggagccggctcagccctcggccaccatgtcggcgccgtcggaggaggaggagtacgcgcggctggtgatggaggcgcagccggagtggctgcgcgccgaggtgaagcggctgtcccacgagctggccgagaccacgcgtgagaagatccaggcggccgagtacgggctggcggtgctcgaggagaagcaccagctcaagctgcagttcgaggagctcgaggtggactatgaggctatccgcagcgagatggagcagctcaaggaggcctttggacaagcacacacaaaccacaagaaggtggctgctgacggagagagccgggaggagagcctgatccaggagtcggcctccaaggagcagtactacgtgcggaaggtgctagagctgcagacggagctgaagcagttgcgcaatgtcctcaccaacacgcagtcggagaatgagcgcctggcctctgtggcccaggagctgaaggagatcaaccagaatgtggagatccagcgtggccgcctgcgggatgacatcaaggagtacaaattccgggaagctcgtctgctgcaggactactcggaactggaggaggagaacatcagcctgcagaagcaagtgtctgtgctcagacagaaccaggtggagtttgagggcctcaagcatgagatcaagcgtctggaggaggagaccgagtacctcaacagccagctggaggatgccatccgcctcaaggagatctcagagcggcagctggaggaggcgctggagaccctgaagacggagcgcgaacagaagaacagcctgcgcaaggagctgtcacactacatgagcatcaatgactccttctacaccagccacctgcatgtctcgctggatggcctcaagttcagtgacgatgctgccgagcccaacaacgatgccgaggccctggtcaatggctttgagcacggcggcctggccaagctgccactggacaacaagacctccacgcccaagaaggagggcctcgcaccgccctcccccagcctcgtctccgacctactcagtgagctcaacatctctgagatccagaagctgaagcagcagctgatgcagatggagcgggaaaaggcgggcctgctggcaacgctgcaggacacacagaagcagctggagcacacgcggggctccctgtcagaacagcaggagaaggtgacccgcctcacagagaatctgagtgccctgcggcgcctgcaggccagcaaggagcggcagacagccctggacaacgagaaggaccgtgacagccatgaggatggggactactacgaggtggacatcaacgggcctgagatcttggcctgcaagtaccatgtggctgtggctgaggctggcgagctccgcgagcagctcaaggcactgcgcagcacgcacgaggctcgtgaggcccagcacgccgaggagaagggccgctatgaggctgagggccaggcactcacggagaaggtctccctgctagagaaggccagccgccaggaccgcgagctgctggcccggctggagaaggagctaaagaaggtgagcgacgtcgccggcgagacacagggcagcctgagtgtggcccaggatgagctggtgaccttcagtgaggagctggccaatctctaccaccacgtgtgcatgtgcaacaatgagacacccaaccgtgtcatgctggactactaccgcgagggccagggcggggccggccgcaccagtcccgggggccgcaccagccccgaggcgcgtggccggcgctcacccatcctcctacccaaggggctgctggctcctgaggcgggccgagcagatggtgggacgggggacagcagcccctcgcctggctcctcactgccatcacccctgagtgacccacgccgggagcccatgaacatctacaacctgatcgctatcatccgtgaccagatcaagcacctgcaggcagccgtggaccgcaccacggagctgtcacgccagcgcattgcctctcaggagctgggccccgccgtggacaaggacaaggaagcgcttatggaggagatcctcaagctgaagtcgctgctcagcaccaagcgggagcagatcaccacgctgcgcactgtgctcaaggccaacaagcagacggccgaggtggcccttgccaacctgaagagcaagtatgagaatgagaaggccatggttaccgagaccatgatgaagctgcgcaatgagctcaaggccctcaaggaggacgcagccaccttctcctcgctgcgtgctatgtttgccaccaggtgtgacgagtacattacacagctggatgagatgcagcggcagctggcggctgctgaggacgagaagaagacgctgaactcgctgctgcgcatggccatccagcagaagctggcgctgacccagcggctggagctgctcgagctggaccatgagcagacccggcgtggccgtgccaaagccgccccgaagaccaagccagccacaccgagcgtaagtcacacctgtgcctgtgccagcgacagggccgagggcaccgggctggccaaccaggtgttctgcagcgagaagcacagcatttactgtgattaggggctgtggggcgccgcacgctgcagctaacatctgcttcacctcaactaacccagcagcagcgggacggcggtgctaggtcaatcttaacgtgactaatgcacagagggtaggagtctagccgaggcgccatggggcgttgcatcagcaggacacttgtgagagctttgtgtcgcttctcactcctcaaagccccctcaggagcacccagtcctcagctgctctcttaggtgggggtcagaggtggggatagagctgcacattcttgcagcagatgtgtgatgaaagcatcttctaagccctgcgcacccgtggggaaacccaagggaggagtcctggtcctgctccctcagcacccaaaaggggcagaacctgagttgagacttgcatgttcctcgcatgtgtctaatgtcagcactagaaagcagttttaggaggttccagcctgcagcataggtacgacctcagaggatggctttgcacttggcatagtttcatggaaaggagtacgttgtagtttatgcagtatctgactgcaaatcatattcaggaaagaagtgcagaatttcttccccaagcccagagaagagcagccctgagcccctgtattctgctggccagacacacatggcacagacacagctgaccataacccaggaatccagagctcggtttctcatttctgagatcaggatgcttgtatagtggcctgtgaggtgacagattggcagggcccaaggccccaggttttcatttttcatgagaaaagctttccaagtgcctggccagaccttggtccttagtgcagagcccgtccttttgtacttggggtgaccccagcagccaattatccggccttccatagggggttcagtcccaaagacatggggctttgaaaaccctagcctgaagtctgagccaccaagggcttggctgggttggacacccacaggtgtatccagagcccagcccggtgctgggaaagctttgcatagggccagggccacttgtcaggattcacaggtaggagatgtttaggtctctttatttagtgcaatctgggggatggcaacagagaaagaggaaaggtagctgtagggttctcccatttccagaggctccatccacacctgccttcccacattctgagcagaacttttctcagtacttttttcccgatcaccctgtgggaccagctggacctgaggctgcagtcttctctcctgcaggctgcttgccttgtctctcatgcggaagaggcattcgagttacctggtgagagaccgtgttgccccctcccacagctctctgccctgcgcgttcttccctttggtgccgagtatgtttcggtcccctccagactccaggacacgcccatgtatgtcccctgcgtgttcatcctgggcccagatccccctgccccagcaagactcgcagtgggatggctgctggcatgcccaccctgcatgcgctttgccctctccttgcaagcctggcacatagcttctctccatactcctaagggactttgcagacacccaagccactgggacccctgctaacacatgcaggtcttctcttctgccaactaacgtgctcgcgccctcccagcacgtggagagcttcaattgtcagataaacaggaagcgacagatgaccgctttctaacgctctcttttctcccgttttcagctgtagagtagctgccaggaggacttggccacccggccctgtcacactgcagccccttccccttccctctcgtggcccacaaggaggaaggaagggcaacctaaaagcccacttagaaactttttggatatgccactgcaattcttttcaaaatagcattccccaggtttttaatgggaggaaaaaaagctttaatgttgagcatgctgcgagctgctgcgtggaaaggcctctgtatgggccgaagacccttcttccctggctgccaggctcgccaggagcccactggaaacgcccaccacgggggctccttgttacacatgttctttttttatccgatcaacctgtgcacttttgatattttgatattatatttgcttccttaattcctcgcgtagagacggtctcaggtgccgtggtctatgctcgtggtcctgtagctgtccgcctcagctcccaccgtgtttgtctggtgtcagcacgaggcagagctgtgtgctccatagcgtgtagctttagactcggagatgagtgctttgacccagcgaggagctcagctaagtgtatccacgctgtggttcagcagcctttagatcatacggcattgtggttcatgtttgaaattacagattttaaatgccatgttcattaagaaatccagggtattcagattctggggtttttcatattgtattattattattcttaggaatagttcaatgtaacaagaagaaaacttgacctttgctctggttaaaacagtaataggcacttgaaaaaaaaagataaattattgaatgagtagtattacctacaaattccagaattttctgggttttaggacgttgtgaagcatgactgattaacagaattttatacaactgtaccaataaaattccaaattggaattgttttgttactctggttgttgtgccaaattgtggtacacttagaaaattctacagtcgtcgatttttagggtgttctctttcaacacctttttgttagtaatcattgccagtagtgccttcatcagttaagggaggtgtcccagcacagatcattctcaaaagcgagcagggaagagctagtgggcatgctgaaggccagcgtggacagcaggtgaggcaggtgctcctcacacccagacctgggcatcttcattgagggaaagaaaacagtcattgtgcaaaattctgttagtcagtgattctttacttgcaaattcaggggcttagaaaatgaaagcaaacacaaaaccttgagtgtgctttgggaaccaaatggaccttctgggacaagctgagcaagctgtatgaacgccacgtttgtgaagagctgagggtatcaggagggccgacgctgtgttggcatgcgcagtaggggatgagggttagccatagtattctttgcaaatgtgaaagcgagacattatatcttctcttgcttggtgtaactaatcactgttaatttcaggaaacagaactcattaaaactccttagcaaaccaggtctacatcctgttttgtttgctgagtgaggttagtgggagtggtcaaattggtactcttggaggaagaaaaactgtccttccttctccaaaaaaggaaaaattataataatataaatgacaaaaataaaagaattctgtttcctggaataagcatttcttattcctagttgtagggactcctatttttaccttccgttacagtgttgattcataagaaatattgttacatttgagataacttcatctgtatggggtatttatttgcaatgatgtctgagtactgtattttttctgtgcattaccttagtgtcagaatgttggtctttattttaaagtcatatgcatgttctcctgccaaggaacctttacacagacccaaacaaaaaaataataatcaaatgccttcaatttctgagaaaatgaggcagagcatggaaaaggaataggaaggagaaattaattgagattttcaggacacagacatatgatgtgaatgcctacaaagccagtgcgcataggaacagtgggcctgggtaaagagtcacattggtaggaccaataaagaataataaaaagac

SEQ ID NO: 2721 - protein, 855 aa, Homo sapiens
MSAPSEEEEYARLVMEAQPEWLRAEVKRLSHELAETTREKIQAAEYGLAVLEEKHQLKLQFEELEVDYEAIRSEMEQLKEAFGQAHTNHKKVAADGESREESLIQESASKEQYYVRKVLELQTELKQLRNVLTNTQSENERLASVAQELKEINQNVEIQRGRLRDDIKEYKFREARLLQDYSELEEENISLQKQVSVLRQNQVEFEGLKHEIKRLEEETEYLNSQLEDAIRLKEISERQLEEALETLKTEREQKNSLRKELSHYMSINDSFYTSHLHVSLDGLKFSDDAAEPNNDAEALVNGFEHGGLAKLPLDNKTSTPKKEGLAPPSPSLVSDLLSELNISEIQKLKQQLMQMEREKAGLLATLQDTQKQLEHTRGSLSEQQEKVTRLTENLSALRRLQASKERQTALDNEKDRDSHEDGDYYEVDINGPEILACKYHVAVAEAGELREQLKALRSTHEAREAQHAEEKGRYEAEGQALTEKVSLLEKASRQDRELLARLEKELKKVSDVAGETQGSLSVAQDELVTFSEELANLYHHVCMCNNETPNRVMLDYYREGQGGAGRTSPGGRTSPEARGRRSPILLPKGLLAPEAGRADGGTGDSSPSPGSSLPSPLSDPRREPMNIYNLIAIIRDQIKHLQAAVDRTTELSRQRIASQELGPAVDKDKEALMEEILKLKSLLSTKREQITTLRTVLKANKQTAEVALANLKSKYENEKAMVTETMMKLRNELKALKEDAATFSSLRAMFATRCDEYITQLDEMQRQLAAAEDEKKTLNSLLRMAIQQKLALTQRLELLELDHEQTRRGRAKAAPKTKPATPSVSHTCACASDRAEGTGLANQVFCSEKHSIYCD

SEQ ID NO: 2722 - DNA, 1219 bp, Homo sapiens
gcggcctgggcggccgcaccatggactcgggaaccgaggagtacgagctcaacggcggcctgcctccgggcacacccggctccccggacgcctcgccggcccgctggggctggaggcacgggcccatcaacgtgaaccattacgccagcaagaagagcgcagccgagagcatgctggacatcgcgctgctgatggccaacgcgtcccagctgaaggccgtcgtggaacagggccccagcttcgccttctatgtgcccctggtggtcctcatctccatctcccttgtgctgcagatcggcgtgggggtgctgctcatcttccttgtcaagtacgaccttaacaacccggccaagcacgccaagctggacttcctcaacaacctggccacgggcctggtgttcatcatcgtggtagtcaacatcttcatcacggccttcggggtccagaagcccttgatggacatggcaccccagcagtaggacacccaggaccctggatgttgcctgccctgcaactcagctgcccgaccccaggagtcgccatacctgtgaggtgtccacctccctgcacatggcactacccagactgccagagcccaggctggcctcatctgcaccatgtccccggaccagcccttgctctgactgcggccaagcaccacgcaggaggccactcttgtctctcagcagctgttcccaggaggcagctccctcctggcacatgggggctggccacaatagcccagagggtcagaactggacagctgcagagacctgtgcccagagaagggtctcgacccactcaaggacacacagcaggtccgtggatgggctggatgagtgaccagggccagcctctgtctcaggacattccagaaggacaaggagatgtctctccctctcccaaagcaccagcgtccctgcctcccgtgggccctgtccgggttgccctggtgaccccagcctctgtccacttcctaacccagggaccctgcacagccagaactgcctttggccctacggatggccactggctctggtcttaagtgcctgggcttggtggccatcaagagggagccagtcaggcctgtgagggccgtagaccttgtatataccctgcaccagcagtgaccgggcagagcccaaccccctccacgggggtcccagcacccacttttctaatcatgaatgaacaataaagcccacgctctttgtcaggc

SEQ ID NO: 2723 - DNA, 1332 bp, Homo sapiens
gctgcagccctcagaagtaagcaaggtttcctgccgggagaaaaggatttgaagcattccagccaaaatgacggacagaagccccttcgaaaccgacatgctcaccctgacccgctacgttatggaaaaggggcgtcaggccaaagggactggggagctcacccagctgctgaactcaatgctgacggccatcaaagccatctcctcggctgtgcgcaaggccggtctggcccacctgtatggaatcgcaggaagcgttaacgtgacgggagatgaggtgaagaaactggatgtgctatccaattccctggtgatcaacatgctccaatcctcctatagtacctgcgtcctggtctcagaagagaataaggacgccatcatcaccgccaaggagaagcgggggaaatacgtggtctgctttgacccactggatggatcttccaatattgactgcctggcctccatcggaaccatctttgccatctatagaaagacctcagaggatgagccttctgaaaaggatgccctgcagtgtggccgcaatattgtggccgcaggttatgcgctgtacggtagtgcaaccctggtggctctctccacagggcaaggcgtggacctcttcatgcttgacccggctcttggtgaatttgtcctggtggaaaaagatgtcaagattaagaagaaaggaaagatttacagcctgaatgagggctatgccaagtattttgatgcggccaccactgaatatgtgcagaaaaagaaattccctgaggatggcagtgctccctatggggccaggtatgtgggctccatggtggctgacgtgcaccgcaccctggtctatggaggaatcttcctgtacccagccaaccagaagagccctaagggcaagctccggctcctgtatgaatgcaatcccgtggcctacatcattgagcaggcaggaggcttggcgaccacggggacccagcctgtactggacgtgaagcccgaggcaattcaccagcgagtccccctcattctggggtcaccagaggatgtgcaggaatatctcacctgtgtgcagaaaaatcaggcaggcagctagcgagtttgaccccacatgccctcttctgtttgttttgcaccttgtctaaggaccctaaatgaacgataaacagagatggtagctatgagtatgcaaaaggtaaatccacttaatcacatacagaagagcaacaacaaactgcttacgacaggtttggaagccacaggcgattctatggtcaatgtgaaggactagaaataaaaacccacatgtggaaaaaaaaaaaaaaaaaaaaaaaaaaaaaa

SEQ ID NO: 2724 - protein, 339 aa, Homo sapiens
MTDRSPFETDMLTLTRYVMEKGRQAKGTGELTQLLNSMLTAIKAISSAVRKAGLAHLYGIAGSVNVTGDEVKKLDVLSNSLVINMLQSSYSTCVLVSEENKDAIITAKEKRGKYVVCFDPLDGSSNIDCLASIGTIFAIYRKTSEDEPSEKDALQCGRNIVAAGYALYGSATLVALSTGQGVDLFMLDPALGEFVLVEKDVKIKKKGKIYSLNEGYAKYFDAATTEYVQKKKFPEDGSAPYGARYVGSMVADVHRTLVYGGIFLYPANQKSPKGKLRLLYECNPVAYIIEQAGGLATTGTQPVLDVKPEAIHQRVPLILGSPEDVQEYLTCVQKNQAGS

SEQ ID NO: 2725 - DNA, 4364 bp, Homo sapiens
ccgaatagttagccaagactacccgcagcatcaatagtcggctccctggcccagggcctggagagtaactggccaagtgggtgctgggctggtatgggagccccgggtccctggagcaccttgcctggctgtggcagtcaccgggaagcagaggctgtccacctggaggcacagcggcactccttggcactattttggccacttcaggttttataatctgttgaaacaaaaattgtgggggaacatcttgagtaggtttagagatggaatgggaagcctggcagaagcgctggtccagtcttcagggtcacggctgatacaggagtttaagcggccgtgtgactccaaagcctagcttctgcaagcagatgttttcttctagccatgtgtgaattggaggttccttgggctgtccacgcctggtcatcggctggcaggaggctctccaggcacacgcagcacacacagcacatgcaccacacgtagcacacacactgcatgcagcacacacacaccagaggacgcaccacacagagcacgcacagcacacaccacacagcgcacgcaccacacagagcacacgcggcacacacagcacacacagcgcacgcaccacgcagagcacacacggcacatgcagcatacacaccaaacagcgcacgcaccacacagagcacacgcggcacacgcagcacacacaccacacagagcacctggagcacccacagcacacacaccacgcagagtacacgcggcacacacaccacacacagcgcatgcacaacacagagcacacacagcacatgcaccacacgtagcgcgcacactgcatgcagcacacacaccacacacagcgcgtgcaccacacagagcacctgcggcacacacagcacacaccgcacgcaccacacagagcacatgtggcacacacagtgcacgcaccacacagcacccgcggcgcacacagcacacgtggcatatggcctccatgaccctgtgtcttgagggcaggtcctactttttgctttgttgtgttggagcggaatttctcccctggcttctattggagtcctagattatttaaatcacttcctctgttaattgtgcctggaattaacctgttagatttacttcctagcagttagttgctcagtatgggtttctacactattaaagcaacctagcggtagtacacaaggttttgttaggatagctgtgagattttttttctctaacaatcatcattatttctgtgtctgctccgtttttcttcagtgttttatatgatattaataggggatgtctaattttgtatctttaaaaaaactttatcaaatctgaagcatttttcgtgttatagcttctctataatttttcatggatattgaatatttggtgttgatattcttcactcagttttgaacattgagttttcttctaatgttttgtgcttatgaaaaccatttctgtgtaacgtgtttaagtagcttatttatctgaaagaactctaataatgaaaagaaataaaaagtttttcagaagcatgatcatattcttccagaagagtcaggaaccatgtgtgccaggaaagggaaacgggactgagcgtctcgtagcgaaacgcctgctgcagacttgacgcggctcccctccaggacgggctggcggcacacagactgtgcacttacctcactgccggcctcataatagtaatcagtgtaaatggtgtttctctttcgttttgttatttcgtggcgtacgtgttaaagtgtgtgaaactacaaggccagctagtcctttcatcattccctttggtgcaggttttggagcagcaccacagggcacacccctcgccactctttatggggaatttttgcccaggcaggcaaaggagtcatcttggtcacaagtctcccttttccccctccccagcatcttcgatcctgtccccacccctccagatgcatccaggggttgcaagcctgccccccaaccagtccccgtgaggaacagtggccgggattgtcccagggccccttccagcagggggacctcctgacttgagagtccccaaagccttcccagggcagctagaatctgcctggagagaagggatcttgtccccaagggttagaggcagtaaactaatagcaaggacagctgcctttagcaattgtgtgtgtcgcatggccggtccctgcatttttcttcagttccaaagctgcactggcatttttatggtcatctctggagtccctttgattcaagaaattatacctctaggatgccaactaaacgaacaacaaacagaaactccacctgtttgctagcataacaggcgtgaaggcggcagtgtcgccggcgtccttccgcggaagcccagtgtgtgcagacagcacggggtggcgctgctctcaggtgctctggctgcttgggttcctggcatgctgatttgtgacttaagattaaaatcacattgccagggattaccacgcaaccacgaccttggctgctcctccagaaaccgtggtcgcgctcactgcagattggagaacaggtgcatctcgtagctcttctttggaaacaaaagaagccaccagctgaggaagatgctcaccggtcaccgtccctttatttatgcccagcgatgacctctctaacaaggtgcagagcttagctgattggtgaacagtgattggtttccgctttgttcacagtggctaagttctgcacctgaagagaaggtgagatggggacagttaagttggagccgctggggcagaggccgttgctgacgggccggccgctgctgcacagtcagcttgggtgcggagcgcgatcctggaggatgagagaccacttgaccccaaggatgcactgtctcctgctgggaatgctagccatgtactgagtccttaagtctgtccacagaaacatgcactaatcggacatctgtctgaaaggtcaaatgtattgaaagttgcaaaaattcttcttacaaaaaactaaaaccaaatgcatcacctaagtcgtgtgaaatcatgtggtagctcatggctgtgagcggggcggggcggggctttcggaggagctcctgttgttctgggcgcggtgaactctctcttgtatttgcagtccaggccttcgcgtctcctgcgccagcagacggtgcccacggagctcccagctgaggcgctgcttctccgggctgtcgattggacccgccctccggtgcctactgagctgatatcagttctcattttacacactggctcagttcagcaggaacaggagtcgagcccttgagcaaaaagccttcgtgtctgtaagtgcccgaggctcaggagagctggggctcccactcgcggcagacaggcccgcgtccaccctgcgtccaccccggcccggcggcagcacggtgccagtcatctgcatgtgctcctgcggcgtgggggtttgtagacttggaaaaccctgttggcagaaagttaagagctcccaggcctgaaggcaggacacagtgccagcagggggccgtttgcccccatgtgtaagggaggcagggcccagctctcccacggcgaggtgagctgagactttctgagaacagttagagtgggtgcgtgtctgaaatgggtactcctagcagctattgtgtacgcaaagcctgagtacagcctgctggtgtcatggccacgtgtgagcaggccagcgtcacacggctcgctgtgacccgtcccggagactgaaatgggcctgggtcttctccttgtcctgtgattaaagtcctctcttgaaagtggagagcaaaggcacacagaggtgcgcgctcacaagaattcctcccggtgactgggtaatcaatgttactgctgtttcctttgcaggaaagaccacagcaagattctttcattcgtctcctcctagcctgggggaccaggctcgaactgaccctggacatcaaaggagggattatgtggctgctaaagccatcggcccacagccctgttcacatcttggtgcttctctttcccagaggctggtcccagccaggcacacacaaaaggcagattctcgtaaacgcagcctccctccctggaggctgcctcctgccctggatctggagtggagctgctctgagattttgagttcttctgcagagatgattaaatatatccaagagacattggaaaacctgctgaacattttacattggtctgctcagcacatggctggatgcggatatttctataattccagaaagtcacacagctcctctgtatgagaccagtgggcgccatttaaaagaacaggatgagaatctaagatatattattaataaatgtaatggattttttttttgt

SEQ ID NO: 2726 - DNA, 1848 bp, Homo sapiens
ggcggcctcagcaaaaaagaagaagaagaaggggaagactatctccctaacagactttctggctgaggatgggggtactggtggaggaaggacctatgtttccaaaccagtcagctgagctgatgaaacggatgacctggaaggagatgtttcgacaacttggcacagtaacgatgacgatgtgtatagggcgtctccaattgaccgttccatccttcccactgctccacgggctgctcgggaacccaatatcgaccggagccatcttcccaaatcgccaccctacactgcttttctaggaaacctaccctatgatgttacagaagagtcaattaaggaattctttcgaggattaaatatcagtgcagtgcgtttaccatgtgaacccagcaatccagtgaggttgaaaggttttggttatgctgaatttgaggacctggattccctgcttagtgccctgagtctcaaggaagagtctctaggtaacaggagaattcgagtggacgttgctgatcaagcacaggataaagacagggatgattgttcttttggccgtgatagaaatcgggattctgacaaaacaggtacagactggagggctcgtcctgctacagacagctttgatgactacccacctagaagaggtgatgatagctttggagacaagtatcgagatcgttatgattcagaccggtatcgggatgggtatcgggatgggtatcgggatggccaacgccgggatatggatccatatggtggccgggatcgctatgatgaccgaggcagcagagactatgatagaggctatgattcccggataggcagtggcagaagagcatttggcagtgggtatcgcagggatgatgtctcagaggaggcggggaccactatgaagaccgatatgacagacgggatgatcggtcttggagctccagagatgattactctctggatgattataggcgtgatggtagaggtcccccccaaagacccaaactgaatctaaaccctcggagtactcctaaggaagatgattcctctgctagtacctcccagtccactcgagctgcttctatctttggaggggcaaagcccgttgacacagctgctagagaaagagaagtagaagaacggctacagaaggaacaagagaagttgcagcatcagctggatgagccaaaactagaacgacggcctccggagagacacccaagctggcgaagtgaagaaactcaggaacgggaacggtcgaggacaggaagtgagtcatcacagactgggacctccaccacatctggcagaagtaagtcagcccaggatgcacgaaggagagagaatgagaagtctctagaaaatgaaacactcaataaggaggaagattgccactctccaacttctaaacctcccaaacctgatcagcccctaaaggtaatgccagcccctccaccaaaggagaatgcttgggtgaagcgaagttctaaccctcctgctcgatctcagagctcagacacagagcagcaatcccctacaagtggtgagggaaaagtagctccagctcaaccatctgaggaaggaccagcaaggaaagatgaaaacaaagtagatgggatgaatgtcccaaaaggccaaactgggaactctagccgtggtccaggagatggagggaacaaagaccactggaaggagtcagataggaaagatggcaaaaaggatcaagactccagatctgcacctgagccaaagaaacctgaggaaaatccagcttccaagttcagttctgcaagcaagtatgctgctctctctgttgatggtgaagatgaaaatgagggagaagattatgccgaatag

SEQ ID NO: 2727 - DNA, 3186 bp, Homo sapiens
cctttgggaagctgcccgccgagtctccgagatttgtccctggtggtcccgcggacccctcgtccctccgcagtctccggctggcagcgatggagggcgctggggagaacgccccggagtccagctcctctgcccctgggtccgaagagtctgccagggatccacaggtgccgcctccggaggaagaatcgggggactgcgcccggtccctggaggcggtccccaagaaactctgtgggtatttaagtaagttcggcggcaaagggcccatccggggctggaaatcccgctggttcttctacgacgaaaggaaatgtcagctgtattactcgcggaccgctcaggatgccaatcccttggacagcatcgacctctccagtgcagtgtttgactgtaaggcggacgctgaggaggggatcttcgaaatcaagactcccagccgggttattaccctgaaggccgccaccaagcaagcgatgctgtactggctgcagcagctgcagatgaagcgctgggaattccacaacagcccgccggcacctcctgccacccctgatgccgccctggctgggaatgggcccgtcctgcacctcgagctagggcaagaagaggcagagctggaggagttcctgtgccctgtgaaaacaccccctgggctagtgggcgtggcagctgccttgcagcccttccctgcccttcagaatatttccctcaagcacctggggactgaaatacagaacacaatgcacaacatccgtggcaacaagcaggcccagggaacaggccatgaacctccaggggaagattctccacagagtggggagcctcagagggaggagcagcccttggcctctgacgccagcaccccagggagagagccagaggattctccaaagcctgcacccaagccttctctgaccatcagtttcgctcagaaagccaagcgccagaacaacaccttcccattcttttctgaaggaatcacacggaaccgaactgcccaggagaaagtggcagccttggagcaacaggttctgatgctcaccaaggagttaaagtctcagaaggagctagtgaagatcctgcacaaggcactggaggccgcccagcaggagaagcgggcgtccagcgcatacctggcggcggctgaggacaaggaccggctggagctggtgcggcacaaagtgcggcagatcgcggagctgggccggcgggtggaggccctggagcaggagcgggagagcctggcgcacacagcgagcctgcgggagcagcaggtgcaggagctacagcagcacgtgcagctgcttatggacaagaaccacgccaagcagcaggtcatctgcaagctctctgagaaggtcacccaggacttcacgcacccccctgaccagtctcctttgcgccccgacgctgccaacagggacttcctgagccagcaggggaagatagagcacctgaaggatgacatggaagcttaccggacccagaactgcttcctcaactccgagatccaccaggtcacaaagatctggagaaaggtggctgagaaggagaaggcccttctgacgaaggtgcgcctacctccaagccagaaactgccaggtggaaagcaagtacctggccggtctgagaaggctgcaggaggccctgggggacgaagccagcgagtgctcagagctgctgaggcagcttgtccaggaggcactgcagtgggaagctggggaggcctcatctgacagcatcgagctgagccccatcagtaagtatgatgagtacggcttcctgacggtgcccgactatgaggtggaagacctgaagctgctggccaagatccaggcattggagtcacgatcccaccacctgctgggcctcgaggctgtggatcggccgctgagggagcgctgggctgccctgggcgatcttgtgccctcagccgagctcaagcagctactgcgggcaggagtaccccgtgaacaccggcctcgtgtctggaggtggctggtccacctccgtgtccagcacctgcacactccaggctgctaccaggaactgctgagccggggccaggcccgcgagcaccctgctgcccgccagattgagctggacctgaaccggaccttccccaacaacaaacacttcacctgccccacctccagcttccccgacaagctccgccgggtgctgctggccttctcctggcagaaccccaccatcggctactgccagggcctgaacaggctggcggccattgccctgctggtcctagaggaggaggagagcgccttctggtgcctggtggccattgtggagaccatcatgcccgctgattactactgcaacacgctgacggcatcccaggtggaccagcgggtgctccaggacctgctctcggagaagctgcccaggctgatggcccatctggggcagcaccacgtggatctctccctcgtcaccttcaactggttcctcgtggtctttgcggacagtctcattagcaacatcctccttcgggtctgggatgccttcctgtacgaggggacgaagtacaacgagaaggagatcttgaggctacagaatggcctggaaatctaccagtacctgcgcttcttcaccaagaccatctccaacagccggaagctgatgaacatcgccttcaatgacatgaaccccttccgcatgaaacagctgcggcagctgcgcatggtccaccgggagcggctggaggctgagctgcgggagctggagcagcttaaggcagagtacctggagaggcgggcatcccggcgcagagctgtgtccgagggctgtgccagcgaggacgaggtggagggggaagcctgacttggccacctcccctccccacagccttcctcacccttggctggcagacccactggaggtcaggcacggaccagtggcccagccctgggtgtcccatcaccatgtgaccttggacatgtcccttcccctctctggccctcagtttccccactgggacattgtgtgctgcaaagccattggttgggctacttcttcataggcacttacttacccagggatgccaccctttcgtcacctcttccacagagcactttggcatgtaaacaagcaagagcactgcctctatagggtaacctggaacattctctaggttatatcaatataaaacaatgtaaatggtgg

SEQ ID NO: 2728 - DNA, 2427 bp, Homo sapiens
cacaggggcactgacatctttgctggactcttttaatcctcataaacccaggctgctggcacttgaaatttgagaagggcaatcagtctggcctcctgcctttctggcctgcaggcccagcctggacaaacaatttaggtggagctcctggaggctggaagcagagaggaggtacctcaccatcctctcctgccagctgttgcagactctgcctggggaactgattaagggtgagcagaggcatttatctccatgttaacaagcagatgtcatggcacccccagtaccggagctccaagttccgtcatgtctttggcaaaccagccagcaaggagaactgctacgactccgtgcctatcacccgcagcgttcacgacaaccacttctgtgccgtgaacccccacttcattgcagttgtgactgagtgtgctggtggaggggccttcctcgtcatccccctgcaccagacagggaagttggacccccactacccaaaagtctgcgggcacagaggcaacgttttggatgtcaagtggaacccttttgatgattttgagatcgcctcctgttctgaagatgccacaattaagatctggagcatccccaagcagctgctgaccaggaacctcacggcctacaggaaggaactcgtgggccacgcgcgcagagtaggcctggtggagtggcaccccacggccgccaacatcctcttcagtgctggctatgactacaaggtgatgatctggaacctggatacaaaggagtctgtcatcacaagccccatgagtacgattagctgtcaccaagatgtgatcctctccatgtccttcaacaccaacggcagcctgttggccaccacctgcaaagaccgcaagattcgggttattgacccccgagcagggaccgtcctccaggaggccagctacaaagggcaccgggccagcaaagtgctgtttctggggaacctgaagaagctgatgtccacaggcacatcccgatggaacaaccggcaggtggccttgtgggaccaggataacctctctgtgcctctgatggaggaggacctggacggctcctcgggcgtgctgtttcccttctatgacgcggacaccagcatgctctacgtggtggggaagggagatggcaacatccgctactacgaggtgagcgccgacaagcctcacctgagctacctgactgagtaccgctcctataacccacagaaggggatcggtgtcatgccaaagagaggactcgacgtgtcctcctgcgagatcttccgcttctacaagctgatcacaaccaaaagcctcatcgagcccatctccatgattgtgccccggcagtcagaatcctaccaagaggacatataccctccaacagcaggggcccagccctccctgacggcccaggagtggctcagcgggatgaatcgagacccaatcctggtgtcccttaggcctggctctgagctgctgagaccccacccactgcctgcagagagacctatcttcaattccatggccccagcctcaccccggctcttgaatcagacagaaaagctggctgcagaagatggctggaggtcttcctccctgttggaggagaagatgccaaggtgggcagcagaacacaggctggaggagaagaaaacctggctgacaaatggctttgacgttttcgaatgccccccaccaaagacagagaatgagttgctgcagatgttctaccggcaacaggaggagatccgaaggctccgggagctgttgacccagcgagaggtccaggccaaacagttggaactggagatcaaaaacttgcggatgggctcagagcagctctgagcagagacctctgccctcctcaccctcagggacaccactcggctccatggggaggtttagaaccaaaccacaagtcccctcaaggacaaccactatttctatattttttaccagaaaacaaaactctccatcgctgaaagagattccagtgggacatggtgccgtttttctgtttgccttcttgcaacaacagtttctgaattgactttgttttcagatgatgccttctgttgaattctgttattaagggcccatgatgagctgtaacttctcaagaggaaagaacacagtagaaaactagagctggaaggatctaggttgacctgtctgtgattttcaaactgtggtccagagaataggggaagactgggccagacgcagtggctcatgcctgtaatcccagcactctgggaggctgaggtgggcggattgcttgaggtcgggagtttgaaaccagtctcaccaggcgcagtggctcacgcctgtaattccagcatgttgggaggccgaggctggtggatcacgaggtcagcagttcgagaccagcctgaccaacatggtgaaaccccatctctactaaaaa

SEQ ID NO: 2729 - protein, 525 aa, Homo sapiens
MSWHPQYRSSKFRHVFGKPASKENCYDSVPITRSVHDNHFCAVNPHFIAVVTECAGGGAFLVIPLHQTGKLDPHYPKVCGHRGNVLDVKWNPFDDFEIASCSEDATIKIWSIPKQLLTRNLTAYRKELVGHARRVGLVEWHPTAANILFSAGYDYKVMIWNLDTKESVITSPMSTISCHQDVILSMSFNTNGSLLATTCKDRKIRVIDPRAGTVLQEASYKGHRASKVLFLGNLKKLMSTGTSRWNNRQVALWDQDNLSVPLMEEDLDGSSGVLFPFYDADTSMLYVVGKGDGNIRYYEVSADKPHLSYLTEYRSYNPQKGIGVMPKRGLDVSSCEIFRFYKLITTKSLIEPISMIVPRQSESYQEDIYPPTAGAQPSLTAQEWLSGMNRDPILVSLRPGSELLRPHPLPAERPIFNSMAPASPRLLNQTEKLAAEDGWRSSSLLEEKMPRWAAEHRLEEKKTWLTNGFDVFECPPPKTENELLQMFYRQQEEIRRLRELLTQREVQAKQLELEIKNLRMGSEQL

SEQ ID NO: 2730 - DNA, 1479 bp, Homo sapiens
gtggagatgaatggcgggcgcggcgaccgggagccggacccctgggaggtcggagcttgtcgagggatgcggctggcgctgcccggagcatggcgaccgcgtggctgagctcttctgtcgccgctgccgccgctgcgtgtgcgcgctttgcccggtgctgggcgcgcaccgtggccaccctgtgggcctggcgctggaggcagcggtgcacgtgcagaaactcagccaagaatgtttaaagcagctggcaatcaagaagcagcagcacattgacaacataacccagatagaagatgccaccgagaagctcaaggctaatgcagagtcaagtaaaacctggctgaaggggaaattcactgaactcagattactacttgacgaagaggaagcgctggccaagaaattcattgataaaaacacgcagcttaccctccaggtgtacagggaacaagctgactcttgcagagagcaacttgacatcatgaatgatctctccaacagggtctggagtatcagccaggagcccgatcctgtccagaggcttcaggcatacacggccaccgagcaggagatgcagcagcagatgagcctcggggagctgtgccatcccgtgcccctctcttttgagcccgtcaagagcttctttaagggcctcgtggaagccgtggagagtacattacagacgccattggacattcgccttaaggaaagcataaactgccagctctcagacccttccagcaccaagccaggtaccttgttgaaaaccagcccctcaccagagcgatcgctattgctgaaatacgcgcgcacgcccacgctggatcctgacacgatgcacgcgcgcctgcgcctgtccgccgatcgcctgacggtgcgctgcggcctgctgggcagcctggggcccgtgcccgtgctgcggttcgacgcgctctggcaagtgctggctcgtgactgcttcgccaccggccgccactactgggaggttgacgtgcaggaggcgggcgccggctggtgggtgggcgcggcctacgcctcccttcggcgccgcggggcctcggccgccgcccgcctgggctgcaaccgccagtcctggtgcctcaagcgctacgaccttgagtactgggccttccacgacggccagcgcagccgcctgcggccccgcgacgacctcgaccggctcggcgtcttcctggactacgaggccggcgtcctcgccttctacgacgtgacgggcggcatgagccacctgcataccttccgcgccacgttccaggagccgctctacccggccctgcggctctgggagggggccatcagcatcccccggctgccctaggggccaggaccggcgtgacagcctccagacttgaatctgtagacatttctttattgatatggcaaattgcttgcagatatttttaaatgacagcaattttctaatatttggtttaataaaatgtgaataatgtccctttt

SEQ ID NO: 2731 - protein, 442 aa, Homo sapiens
MAGAATGSRTPGRSELVEGCGWRCPEHGDRVAELFCRRCRRCVCALCPVLGAHRGHPVGLALEAAVHVQKLSQECLKQLAIKKQQHIDNITQIEDATEKLKANAESSKTWLKGKFTELRLLLDEEEALAKKFIDKNTQLTLQVYREQADSCREQLDIMNDLSNRVWSISQEPDPVQRLQAYTATEQEMQQQMSLGELCHPVPLSFEPVKSFFKGLVEAVESTLQTPLDIRLKESINCQLSDPSSTKPGTLLKTSPSPERSLLLKYARTPTLDPDTMHARLRLSADRLTVRCGLLGSLGPVPVLRFDALWQVLARDCFATGRHYWEVDVQEAGAGWWVGAAYASLRRRGASAAARLGCNRQSWCLKRYDLEYWAFHDGQRSRLRPRDDLDRLGVFLDYEAGVLAFYDVTGGMSHLHTFRATFQEPLYPALRLWEGAISIPRLP

SEQ ID NO: 2732 - DNA, 1475 bp, Homo sapiens
gtcgacgcggccgcgctccgctcccgtgagtaacttggctccgggggctccgctcgcctgcccgcacgccgcccgccacccaggaccgcgccgccggcctccgccgctagcaaacccttccgacggccctcgctgcgcaagccgggacgcctctcccccctccgcccccgccgcggaaagttaagtttgaagaggggggaagaggggaacatggacatgaagaggaggatccacctggagctgaggaaccggaccccggcagctgttcgagaacttgtcttggacaattgcaaatcaaatgatggaaaaattgagggcttaacagctgaatttgtgaacttagagttcctcagtttaataaatgtaggcttgatctcagtttcaaatctccccaagctgcctaaattgaaaaagcttgaactcagtgaaaatagaatctttggaggtctggacatgttagctgaaaaacttccaaatctcacacatctaaacttaagtggaaataaactgaaagatatcagcaccttggaacctttgaaaaagttagaatgtctgaaaagcctggacctctttaactgtgaggttaccaacctgaatgactaccgagagagtgtcttcaagctcctgccccagcttacctacttggatggctatgaccgagaggaccaggaagcacctgactcagatgccgaggtggatggtgtggatgaagaggaggaggacgaagaaggagaagatgaggaagacgaggacgatgaggatggtgaagaagaggagtttgatgaagaagatgatgaagatgaagatgtagaaggggatgaggacgacgatgaagtcagtgaggaggaagaagaatttggacttgatgaagaagatgaagatgaggatgaggatgaagaggaggaagaaggtgggaaaggtgaaaagaggaagagagaaacagatgatgaaggagaagatgattaagaccccagatgacctgcagaaacagaactgttcagtattggttggactgctcatggattttgtagctgtttaaaaaaaaaaaaaaggtagctgtgatacaaaccccaggacacccacccacccaaagagccaaagaatagttcctgtgacattccgccttccttccatgtagtccctcttggtaatctaccaccaagcttgtggacttcaccccaacaaaattgtaagcgttgttaggtttttgtgtaagattcttgctgtagcgtggatagctgtgattggtgagtcaaccgtctgtggctaccagttacactgagattgtaacagcatttttactttctgtacaacaaaaaagctttgtaaataaaatcttaacattttgggtctgttttttcatgctttgctttttaattattattattattttttttacattaggacattttatgtgacaactgccaaaaaagtatttttaagaatttaagcgaaataaacagttactctttggc

SEQ ID NO: 2733 - protein, 251 aa, Homo sapiens
MDMKRRIHLELRNRTPAAVRELVLDNCKSNDGKIEGLTAEFVNLEFLSLINVGLISVSNLPKLPKLKKLELSENRIFGGLDMLAEKLPNLTHLNLSGNKLKDISTLEPLKKLECLKSLDLFNCEVTNLNDYRESVFKLLPQLTYLDGYDREDQEAPDSDAEVDGVDEEEEDEEGEDEEDEDDEDGEEEEFDEEDDEDEDVEGDEDDDEVSEEEEEFGLDEEDEDEDEDEEEEEGGKGEKRKRETDDEGEDD

SEQ ID NO: 2734 - DNA, 2828 bp, Homo sapiens
cctcggttccgcggcgcaccggagggcagcatgtcgcggcggcggcacagcgacgagaacgacggtgggcagcctcacaaaaggagaaagacctctgatgcaaatgaaactgaagatcatttggaatctttaatatgtaaagtaggagaaaagagtgcctgctctttggagagcaacctagaaggcttggctggtgttttggaagctgatcttcctaactacaagagcaagatcttaaggcttctttgtacagttgcacgcctattacctgagaagctgacaatttatacaacattagttggactactgaatgccaggaattacaattttggtggagaatttgtagaagccatgattcgtcaacttaaagaatcattgaaagcaaacaattataatgaagccgtgtatttggtccgttttttatctgatcttgtgaattgtcatgtgattgccgccccatcaatggttgctatgtttgaaaattttgtaagcgtaactcaggaagaagatgtacctcaggtgcgacgagattggtatgtgtatgcatttctgtcatctttgccctgggttggaaaggagttgtacgaaaagaaagatgcagagatggaccgcatctttgccaacactgaaagctatcttaaaagacgccaaaagactcatgtacccatgttacaggtatggactgctgataaaccacatccacaagaagagtatttagattgcctgtgggcccagattcagaaattgaaaaaggatcgctggcaggaacggcacatcctaagaccttatcttgcctttgacagcatcctgtgtgaagcactgcagcacaatctgcctccttttacaccacctcctcacactgaagattcagtgtacccaatgccaagggtcatcttcagaatgtttgattacacagatgatcccgagggtcctgtcatgccagggagtcattcagtggaaagatttgtaatagaagagaatcttcactgcatcattaagtcccactggaaggaaaggaagacttgtgctgcacagttagtgagctatccagggaagaacaagatccccttgaactaccacatagttgaggtgatctttgcagagctgtttcaacttccagcaccccctcacattgatgtgatgtacacaacactcctcattgaactgtgcaaacttcaacctggctctctaccccaagttcttgcacaggcaactgaaatgctatacatgcgtttggacacaatgaacactacctgtgtagacaggtttattaattggttttctcatcatctaagtaacttccagttccgttggagctgggaagattggtcagattgtcttagtcaagatcctgaaagtcccaaaccgaagtttgtaagagaagttctagaaaaatgtatgaggttgtcttaccatcagcgtatattagatattgttcctcctaccttctcagctctgtgtcctgcaaacccaacctgcatttacaagtatggagatgaaagtagcaattctcttcctggacattctgttgccctctgtttagctgttgcctttaaaagtaaggcaaccaatgatgaaatcttcagcattctgaaagatgtaccaaatcctaaccaggatgatgacgacgatgaaggattcagttttaacccattgaaaatagaagtctttgtacagactctgctacacttggcagccaaatcattcagccactccttcagtgctcttgcaaagtttcatgaagtcttcaaaaccctagctgaaagtgatgaaggaaagttacatgtgctaagagttatgtttgaggtctggaggaaccatccacagatgattgctgtactagtggataagatgattcgtacacaaatagttgattgtgctgccgtagcaaattggatcttctcttcagaactatctcgtgactttaccagattgtttgtttgggaaattttgcactctacaattcgtaagatgaacaaacatgtcctgaagatccagaaagagctggaagaagctaaagagaaacttgctaggcaacacaaacggcgaagtgatgatgacgacagaagcagtgacaggaaagacggggttcttgaggaacaaatagaacgacttcaggaaaaagtggaatctgctcagagtgaacaaaagaatcttttcctcgttatatttcagcggtttatcatgatcttgaccgagcacctagtacgatgcgaaactgatgggaccagtgtattaacaccatggtataagaactgtatagagaggctgcagcagatcttcctacagcatcaccaaataatccagcagtacatggtgaccctggagaaccttctcttcactgctgaattagaccctcatatcttggccgtgttccagcagttctgtgccctgcaggcctaagggtcattttttcctcatgtcaaggttttttttgatatcttaaaataatttgtcttattttttgatggtttgaatgcttgctttcttgtagtatcctttcacttcttaaaggaaacaaaggggaagaggacagtgaatgaacatggcattacttttaattgccctgaaaagcaaatacttcctaacggcagtaatgtgactatgaccatgatatattatatatgtgacagatacaaattctctgtgatcagtttgttattttttttctccttaaggcaacaaaataattggtttgaggtatgtgaaacactagaggtcaaccttacatagtatatagaactgatgggtttacccagctacccagtagcataacttttcacagctcggggatgaattaacatggctgaaataaaactaaaagtatg

SEQ ID NO: 2735 - protein, 790 aa, Homo sapiens
MSRRRHSDENDGGQPHKRRKTSDANETEDHLESLICKVGEKSACSLESNLEGLAGVLEADLPNYKSKILRLLCTVARLLPEKLTIYTTLVGLLNARNYNFGGEFVEAMIRQLKESLKANNYNEAVYLVRFLSDLVNCHVIAAPSMVAMFENFVSVTQEEDVPQVRRDWYVYAFLSSLPWVGKELYEKKDAEMDRIFANTESYLKRRQKTHVPMLQVWTADKPHPQEEYLDCLWAQIQKLKKDRWQERHILRPYLAFDSILCEALQHNLPPFTPPPHTEDSVYPMPRVIFRMFDYTDDPEGPVMPGSHSVERFVIEENLHCIIKSHWKERKTCAAQLVSYPGKNKIPLNYHIVEVIFAELFQLPAPPHIDVMYTTLLIELCKLQPGSLPQVLAQATEMLYMRLDTMNTTCVDRFINWFSHHLSNFQFRWSWEDWSDCLSQDPESPKPKFVREVLEKCMRLSYHQRILDIVPPTFSALCPANPTCIYKYGDESSNSLPGHSVALCLAVAFKSKATNDEIFSILKDVPNPNQDDDDDEGFSFNPLKIEVFVQTLLHLAAKSFSHSFSALAKFHEVFKTLAESDEGKLHVLRVMFEVWRNHPQMIAVLVDKMIRTQIVDCAAVANWIFSSELSRDFTRLFVWEILHSTIRKMNKHVLKIQKELEEAKEKLARQHKRRSDDDDRSSDRKDGVLEEQIERLQEKVESAQSEQKNLFLVIFQRFIMILTEHLVRCETDGTSVLTPWYKNCIERLQQIFLQHHQIIQQYMVTLENLLFTAELDPHILAVFQQFCALQA

SEQ ID NO: 2736 - DNA, 1342 bp, Homo sapiens
cggctgtaatctcagaggcttgtttgctgagggtgcctgcgcacgtgcgacggctgctggttttgaaacatgaatctttcgctcgtcctggctgccttttgcttgggaatagcctccgctgttccaaaatttgaccaaaatttggatacaaagtggtaccagtggaaggcaacacacagaagattatatggcgcgaatgaagaaggatggaggagagcagtgtgggaaaagaatatgaaaatgattgaactgcacaatggggaatacagccaagggaaacatggcttcacaatggccatgaatgcttttcctgacatgaccaatgaagaattcaggcagatgatgggttgctttcgaaaccagaaattcaggaaggggaaagtgttccgtgagcctctgtttcttgatcttcccaaatctgtggattggagaaagaaaggctacgtgacgccagtgaagaatcagaaacagtgtggttcttgttgggcttttagtgcgactggtgctcttgaaggacagatgttccggaaaactgggaaacttgtctcactgagcgagcagaatctggtggactgttcgcgtcctcaaggcaatcagggctgcaatggtggcttcatggctagggccttccagtatgtcaaggagaacggaggcctggactctgaggaatcctatccatatgtagcagtggatgaaatctgtaagtacagacctgagaattctgttgctaatgacactggcttcacagtggtcgcacctggaaaggagaaggccctgatgaaagcagtcgcaactgtggggcccatctccgttgctatggatgcaggccattcgtccttccagttctacaaatcaggcatttattttgaaccagactgcagcagcaaaaacctggatcatggtgttctggtggttggctacggctttgaaggagcaaattcgaataacagcaagtattggctcgtcaaaaacagctggggtccagaatggggctcgaatggctatgtaaaaatagccaaagacaagaacaaccactgtggaatcgccacagcagccagctaccccaatgtgtgagctgatggatggtgaggaggaaggacttaaggacagcatgtctggggaaattttatcttgaaactgaccaaacgcttattgtgtaagataaaccagttgaatcattgaggatccaagttgagattttaattctgtgacatttttacaagggtaaaatgttaccactactttaattattgttatacacagctttatgatatcaaagactcattgcttaattctaagacttttgaattttcattttttaaaaagatgtacaaaacagttt

SEQ ID NO: 2737 - protein, 334 aa, Homo sapiens
MNLSLVLAAFCLGIASAVPKFDQNLDTKWYQWKATHRRLYGANEEGWRRAVWEKNMKMIELHNGEYSQGKHGFTMAMNAFPDMTNEEFRQMMGCFRNQKFRKGKVFREPLFLDLPKSVDWRKKGYVTPVKNQKQCGSCWAFSATGALEGQMFRKTGKLVSLSEQNLVDCSRPQGNQGCNGGFMARAFQYVKENGGLDSEESYPYVAVDEICKYRPENSVANDTGFTVVAPGKEKALMKAVATVGPISVAMDAGHSSFQFYKSGIYFEPDCSSKNLDHGVLVVGYGFEGANSNNSKYWLVKNSWGPEWGSNGYVKIAKDKNNHCGIATAASYPNV

SEQ ID NO: 2738 - DNA, 471 bp, Homo sapiens
atgaagatcaagatcgtgacaggcagtggcgcgaggcttgagttgggaaaccagttctcccacttcattaataatgatgtcgatgttcctggcagtgtttataccaaatgctactttgacctttgcgccttggcacacgacagtagcctatatttgccattttgtcttcttgacatagaaagagcatgggaactgaaggtaataaagctggaatttatgcagctctttcggtctccacagctcggggtcttgccacagacacagcgcccacgagttctggcactttggtcaacgtttataaacgggctctcctctgccgccgcgggcatgcgctttccccaagactctgaggccacttttgctctcagaggcacacagaagagacatcgggcgcatggcaagcgggcagctgaagatgatgaggatgatgatgtcgataccaagaagcagaagaccgacaaggatgactag

SEQ ID NO: 2739 - protein, 156 aa, Homo sapiens
MKIKIVTGSGARLELGNQFSHFINNDVDVPGSVYTKCYFDLCALAHDSSLYLPFCLLDIERAWELKVIKLEFMQLFRSPQLGVLPQTQRPRVLALWSTFINGLSSAAAGMRFPQDSEATFALRGTQKRHRAHGKRAAEDDEDDDVDTKKQKTDKDD

SEQ ID NO: 2740 - DNA, 583 bp, Homo sapiens
gccagctgccggtctttcgggggctccgtaactttctatccgtccgcgtcagcgccttgccaccctcatctccaatatgcctggtccgacccccagtggcactaacgtgggatcctcagggcgctctcccagcaaagcagtggccgcccgggcggcgggatccactgtccggcagaggaaaaatgccagctgtgggacaaggagtgcaggccgcacaacctcggcaggcaccggggggatgtggcgattctacacagaagattcacctgggctcaaagttggccctgttccagtattggttatgagtcttctgttcatcgcttctgtatttatgttgcacatttggggcaagtacactcgttcgtagattcagttacatccatctgtcatctgaagaaggaggaaaaaacccaacatttcttggaccaaaagtatagtgactatctgttcatgagagaaattttctgtaagcttgctgttttacaggggatttatcaataattgattttgaggaatcagtttttttctatggctaataaactttttaattcacttatactgaaaaaaaaaaaaaaaaaaaaaa

SEQ ID NO: 2741 - protein, 96 aa, Homo sapiens
MPGPTPSGTNVGSSGRSPSKAVAARAAGSTVRQRKNASCGTRSAGRTTSAGTGGMWRFYTEDSPGLKVGPVPVLVMSLLFIASVFMLHIWGKYTRS

SEQ ID NO: 2742 - DNA, 1500 bp, Homo sapiens
atgtctactccttctggaatatccacctggctcagcctgcctgtttcgactcctgcctccatcacatccatcagagtgacccagaagtcctctggcccctgggccttcagcagctgcacctacgtgagtgggcctggcgtctgcatcagctccttgagctgctcccgagtggggagcagcagctttcggggtggcctgggtggaggctatggtggggccagtggcatgggaggcatcatcgccatcatggtcaaccagagcctgttgagcccccttaacctggaggtggaccccaacatccaggccgtgtgtacccaggagaaggagcagatcaagaccctcaacaacaagtttgcctccttcatcgacaaggtatggttcctggagcagcagaacaaggtgctggagaccaagtggagcctcctgcagcagcagaagatggctcggagtaacatggacaacatgttggagagctacatcaacaaccttaggcggcagctggagactctgggccaggagaagctgaagctggaagcagagcttggcaacatgcaggggctgggggaggacttcaagaacaagtatgaggatgagatcaataagcatacggaggtggagaatgaatttgtcctcatcaagaaggatgttgatgaagcttacatgaacaaggcagaactggagtccctcctggaagggctgactgacgagatcaacttcctcaggcagctgtatgaagaggagatccgggagctgcagtcccagatctccgacatgtctatggtgctgtccatggactacagctgctctcgggacatggacagcatcatccctgaggtcaaggtgcagtatgaggagattgccaactgcagccgggctgaggctgagagcatgtaccagatcaagtatgaggagctgcagacgctggctgggaagtacggggatgacctaagccgcacaaagactgagatctccgagatgaaccggaacatcagctggctccaggctgagaccgagggcctcaaaggccagagggcttccctggaggccgccatcacagatgccgagcagcgtggggagctggctgttaaggatgccaacgccaagctgtccgagctggaggccgccctgcagcgggccaagcaggacatgatggggcagctgcgtgagtaccaggagctgatgaacgtcgggcttaccctggacatcgagattgccacctacaggaagctgctggagggcgaggagagccggctggaatctgggatgcagaacgtgagtatccatacgaagaccaccagcagctatgcaggtgggctgagctcggcctatgggggcctcacaagccccggcatcatctaccgcctgggctccagctttggctctgccgcgggctccagctccttcagccgcaccagctccaccagggccgtggttgtgaggaagatcgagacccatgatggcaagctggagtccgagtcctctgacgtcctgtccaagtga

SEQ ID NO: 2743 - protein, 499 aa, Homo sapiens
MSTPSGISTWLSLPVSTPASITSIRVTQKSSGPWAFSSCTYVSGPGVCISSLSCSRVGSSSFRGGLGGGYGGASGMGGIIAIMVNQSLLSPLNLEVDPNIQAVCTQEKEQIKTLNNKFASFIDKVWFLEQQNKVLETKWSLLQQQKMARSNMDNMLESYINNLRRQLETLGQEKLKLEAELGNMQGLGEDFKNKYEDEINKHTEVENEFVLIKKDVDEAYMNKAELESLLEGLTDEINFLRQLYEEEIRELQSQISDMSMVLSMDYSCSRDMDSIIPEVKVQYEEIANCSRAEAESMYQIKYEELQTLAGKYGDDLSRTKTEISEMNRNISWLQAETEGLKGQRASLEAAITDAEQRGELAVKDANAKLSELEAALQRAKQDMMGQLREYQELMNVGLTLDIEIATYRKLLEGEESRLESGMQNVSIHTKTTSSYAGGLSSAYGGLTSPGIIYRLGSSFGSAAGSSSFSRTSSTRAVVVRKIETHDGKLESESSDVLSK

SEQ ID NO: 2744 - DNA, 1652 bp, Homo sapiens
aaaaacatgatgagaagtctataaaaattgtgtgctaccaaagatctgtcttatttggcagctgctgcctcacccacagcttttgatatctaggaggactcttctctcccaaactacctgtcaccatggcccaccgatttccagccctcacccaggagcagaagaaggagctctcagaaattgcccagagcattgttgccaatggaaaggggatcctggctgcagatgaatctgtaggtaccatggggaaccgcctgcagaggatcaaggtggaaaacactgaagagaaccgccggcagttccgagaaatcctcttctctgtggacagttccatcaaccagagcatcgggggtgtgatccttttccacgagaccctctaccagaaggacagccagggaaagctgttcagaaacatcctcaaggaaaaggggatcgtggtgggaatcaagttagaccaaggaggtgctcctcttgcaggaacaaacaaagaaaccaccattcaagggcttgatggcctctcagagcgctgtgctcagtacaagaaagatggtgttgactttgggaagtggcgtgctgtgctgaggattgccgaccagtgtccatccagcctcgctatccaggaaaacgccaacgccctggctcgctacgccagcatctgtcagcagaatggactggtacctattgttgaaccagaggtaattcctgatggagaccatgacctggaacactgccagtatgttactgagaaggtcctggctgctgtctacaaggccctgaatgaccatcatgtttacctggagggcaccctgctaaagcccaacatggtgactgctggacatgcctgcaccaagaagtatactccagaacaagtagctatggccaccgtaacagctctccaccgtactgttcctgcagctgttcctggcatctgctttttgtctggtggcatgagtgaagaggatgccactctcaacctcaatgctatcaacctttgccctctaccaaagccctggaaactaagtttctcttatggacgggccctgcaggccagtgcactggctgcctggggtggcaaggctgcaaacaaggaggcaacccaggaggcttttatgaagcgggccatggctaactgccaggcggccaaaggacagtatgttcacacgggttcttctggggctgcttccacccagtcgctcttcacagcctgctatacctactagggtccaatgcccgccagcctagctccagtgcttctagtaggagggctgaaagggagcaacttttcctccaatcctggaaattcgacacaattagatttgaactgctggaaatacaacacatgttaaatcttaagtacaagggggaaaaaataaatcagttattgaaacataaaaatgaataccaaggacctgatcaaatttcacacagcagtttccttgcaacactttcagctccccatgctccagaatacccacccaagaaaataataggctttaaaacaatatcggctcctcatccaaagaacaactgctgattgaaacacctcattagctgagtgtagagaagtgcatcttatgaaacagtcttagcagtggtaggttgggaaggagatagctgcaaccaaaaaagaaataaatattctataaaccttc

SEQ ID NO: 2745 - protein, 364 aa, Homo sapiens
MAHRFPALTQEQKKELSEIAQSIVANGKGILAADESVGTMGNRLQRIKVENTEENRRQFREILFSVDSSINQSIGGVILFHETLYQKDSQGKLFRNILKEKGIVVGIKLDQGGAPLAGTNKETTIQGLDGLSERCAQYKKDGVDFGKWRAVLRIADQCPSSLAIQENANALARYASICQQNGLVPIVEPEVIPDGDHDLEHCQYVTEKVLAAVYKALNDHHVYLEGTLLKPNMVTAGHACTKKYTPEQVAMATVTALHRTVPAAVPGICFLSGGMSEEDATLNLNAINLCPLPKPWKLSFSYGRALQASALAAWGGKAANKEATQEAFMKRAMANCQAAKGQYVHTGSSGAASTQSLFTACYTY

SEQ ID NO: 2746 - DNA, 2110 bp, Homo sapiens
gccgctttgggggccgcggtctctccgcagctcgcgggtcacatggcccgcctgagcaaggggagccctgcgcctgagctgcgaggcgggaggaggtgaggctccggcgcacacccaaaccgcgctgcgcccgctccttccgggccccggagatggcgcctccaccgggatgagctagccagcctgggcaataccagaggcggccctcggcgcgcgcaggggaccgagctggtcgccccaaccgggtttgatttctgatgactctggcctgagttccaggatggttttttcttgggaccagacatgaacaaaagttgacctcatgagcacttcaacctctccagctgccatgctcctccggaggctgcggcgactgtcctggggcagcactgctgtccagctcttcatcctaacagtggtgacgtttggcctgctggcccccctggcctgtcaccgacttctacactcttacttctatctgcgccattggcatctgaaccaaatgagccaagagttcctgcagcaaagcttgaaagagggtgaggctgccctccactattttgaggagcttccctctgccaatggctcagtgcccattgtctggcaggccaccccccggccctggctggtgatcaccatcatcactgtggacaggcagcctggcttccactacgtcctgcaggttgtgtcccagttccaccggcttcttcagcaatgtggcccccagtgcgaggggcaccaactcttcctgtgcaacgtggagcgtagtgtgagccattttgatgccaagttgctctccaagtatgtccctgtggccaatcgctatgagggcactgaggatgattatggtgatgacccttcgaccaactcgtttgagaaagagaagcaggactatgtctattgcctggagtcatccctgcagacctacaacccagactacgtcctgatggtagaagacgatgctgtaccagaagagcagatcttcccagtcttggagcaccttctgcgggctcgcttctctgagccacatctcagagatgccctttatctcaagctgtatcaccccgagaggctccagcactacatcaatccagagcccatgcggatcctggaatgggttggtgtaggcatgttgctggggcccttactaacctggatatacatgaggtttgccagccgcccagggtttagctggcctgtaatgctcttcttctccctgtatagcatgggtctggtggagctggtgggtcggcactatttcctggaactgcggcggctgagtccttccctgtacagtgtggttcctgcctctcagtgttgcaccccagccatgctcttcccggcacctgcggcccgccggaccctcacctacctgtcccaagtgtactgccacaagggctttggcaaggacatggcactgtactcgctgttgagggccaagggagagagggcctatgtagtggagccgaacctcgtgaaacacatcgggctcttctccagtctccggtacaactttcatcccagtctcctctagggtgccaagagatgcctttctgaagttggccacttcttgaagattcaaatatttatctctttatttagacatggttgcctgcaggtatttcactgtttactgttgttagagatataggcactggggcagctgaggaacctcaatatgttaagagccttggctttggtagcctcctggcaggagcagcagtttgccacaggtccggacctctccctccacacagccacactgcctcatgcagtctgacccacccagtgagggtgcatttgaacactgattatattctccatttgtttttaagctctgctttgtgttagagcttgtgactgccaaaaattttgtgcacagtgatatgactgttttaggatcttaagggtagaattttgtgaaaggtgagatcctttggaattgagttctttctcattgggtatgaaaatggatgtatgtttagaatatatgcccaacgaggcaggaccatgtggatagattccatttgtttccttgacctgatgtaataaaaactgataaaagccgtgcagtgcccggcatcttggaaaaaaaaaaaaaaaaaaaaaa

SEQ ID NO: 2747 - protein, 403 aa, Homo sapiens
MSTSTSPAAMLLRRLRRLSWGSTAVQLFILTVVTFGLLAPLACHRLLHSYFYLRHWHLNQMSQEFLQQSLKEGEAALHYFEELPSANGSVPIVWQATPRPWLVITIITVDRQPGFHYVLQVVSQFHRLLQQCGPQCEGHQLFLCNVERSVSHFDAKLLSKYVPVANRYEGTEDDYGDDPSTNSFEKEKQDYVYCLESSLQTYNPDYVLMVEDDAVPEEQIFPVLEHLLRARFSEPHLRDALYLKLYHPERLQHYINPEPMRILEWVGVGMLLGPLLTWIYMRFASRPGFSWPVMLFFSLYSMGLVELVGRHYFLELRRLSPSLYSVVPASQCCTPAMLFPAPAARRTLTYLSQVYCHKGFGKDMALYSLLRAKGERAYVVEPNLVKHIGLFSSLRYNFHPSLL

SEQ ID NO: 2748 - DNA, 1368 bp, Homo sapiens
gagatacgcgcacacacacacacaaacgcactcagatttcccggaccctggttttcctcctgtgaccctttcggggccgggctctcaccctaaagaagcagccccgccctggggtggccccaccctctcttgggacctgtcataagtcggaccccgggcgcccggctgcgcagtcccagccgccttccccaggcagtggaaccttcgggctcctgagcttcaggatggttcgtactaagacatggaccctgaagaagcactttgttggctatcctactaatagtgactttgagttgaagacagctgagctcccacccttaaaaaatggagaggtcctgcttgaagctttgttcctcaccgtggatccctacatgagagtggcagccaaaagattgaaggaaggtgatacaatgatggggcagcaagtggccaaagttgtggaaagtaaaaatgtagccctaccaaaaggaactattgtactggcttctccaggctggacaacgcactccatttctgatgggaaagatctggaaaagctgctgacagagtggccagacacaataccactgtctttggctctggggacagttggcatgccaggcctgactgcctactttggcctacttgaaatctgtggtgtgaagggtggagaaacagtgatggttaatgcagcagctggagctgtgggctcagtcgtggggcagattgcaaagctcaagggctgcaaagttgttggagcagtagggtctgatgaaaaggttgcctaccttcaaaagcttggatttgatgtcgtctttaactacaagacggtagagtctttggaagaaaccttgaagaaagcgtctcctgatggttatgattgttattttgataatgtaggtggagagttttcaaacactgttatcggccagatgaagaaatttggaaggattgccatatgtggagccatctctacatataacagaaccggcccacttcccccaggcccacccccagagattgttatctatcaggagcttcgcatggaagcttttgtcgtctaccgctggcaaggagatgcccgccaaaaagctctgaaggacttgctgaaatgggtcttagagggtaaaatccagtacaaggaatatatcattgaaggatttgaaaacatgccagctgcatttatgggaatgctgaaaggagataatttggggaagacaatagtgaaagcatgaaaaagaggacacatggaatctggaggccatttagatgattagttaatttgtttttcaccatttagcaaaaatgtatactaccttaaatgtcttaagaaatagtactcataatgagtttgagctacttaataaaatacatttaagtggtatgtaa

SEQ ID NO: 2749 - protein, 294 aa, Homo sapiens
MVRTKTWTLKKHFVGYPTNSDFELKTAELPPLKNGEVLLEALFLTVDPYMRVAAKRLKEGDTMMGQQVAKVVESKNVALPKGTIVLASPGWTTHSISDGKDLEKLLTEWPDTIPLSLALGTVGMPGLTAYFGLLEICGVKGGETVMVNAAAGAVGSVVGQIAKLKGCKVVGAVGSDEKVAYLQKLGFDVVFNYKTVESLEETLKKASPDGYDCYFDNVGGEFSNTVIGQMKKFGRIAICGAISTYNRTGPLPPGPTPRDCYLSGASHGSFCRLPLARRCPPKSSEGLAEMGLRG

SEQ ID NO: 2750 - DNA, 551 bp, Homo sapiens
gaacctccatcttccagtaattcgccaaaatgacgaacacaaagggaaagaggagaggctcccgacatatgttctctaggccttttagaaaacatggagttgttcctttggccacgtatatgcgaatctataagaaaggtgatattgtagacatcaagggaatgggtactgttcaaaaaggaatgccccacaagtgttaccatggcaaaactggaagagtctacaatgttacccagcatgctgttggtattgtaaacaaacaagttaagggcaagattcttgccaagagaattaatgtgcatattgagcacattaagcactctgagccgagatagcttcctgaaatgtgtgaaggaaaatgatcagaaaaagaaagaagccaaagagaaaggtacctgggttcaactgaagtgccagcctgctccacccagagaagcacactttgtgagaaccaatgggaaggagcctgaactgctggaacctattccctatgaattcatggcataataggtgtttaaaaaataaataaataaaagacctctgggctgtta

SEQ ID NO: 2751 - DNA, 2187 bp, Homo sapiens
tggacggtctgaaagggagtgttcgggtttcgctggggcctcgcggctccagagcccagcatggcttcctcgcgagcctcttccacgcaggcaaccaaaactaaagcacccgacgacttagttgctccggtcgtgaagaaaccacacatctattatggaagtttggaagagaaggagagggagcgtctggccaaaggagagtctgggattttggggaaagacggacttaaagcagggatcgaagctggaaatattaatataacctctggagaagtgtttgaaattgaagagcgtatcagcgagcgacaggcagaagtattggctgagtttgagagaaggaagcgagcccggcagatcaatgtttccacagatgactcagaggtcaaagcttgccttagagccttgggggaacccatcacactttttggagagggtcctgctgaaagaagagaaaggttaagaaatatcctctcagttgtcggtactgatgccttgaaaaagaccaaaaaggatgatgagaagtctaaaaagtccaaagaagagtatcagcaaacctggtatcatgaaggaccaaatagcttgaaggtggcaagactatggattgctaattattcgttgcccagggcaatgaaacgcttggaagaggcccgactccataaggagattcctgagacaacaaggacctcccagatgcaagagctgcacaagtctctccggtctttgaataatttttgcagtcagattggggatgatcggcctatctcctactgtcactttagtcccaattccaagatgctggccacagcttgttggagtgggctttgcaagctctggtctgttcctgattgcaacctccttcacactcttcgagggcataacacaaatgtaggagcaattgtattccatcccaaatccactgtctccttggacccaaaagatgtcaacctggcctcttgtgcggctgatggctctgtgaagctttggagtctcgacagtgatgaaccagtggcagatattgaaggccatacagtgcgtgtggcgcgggtaatgtggcatccttcaggacgtttcctgggcaccacctgctatgaccgttcatggcgcttatgggatttggaggctcaagaggagatcctgcatcaggaaggccatagcatgggtgtgtatgacattgccttccatcaagatggctctttggctggcactgggggactggatgcatttggtcgagtttgggacctacgcacaggacgttgtatcatgttcttagaaggccacctgaaagaaatctatggaataaatttctcccccaatggctatcacattgcaaccggcagtggtgacaacacctgcaaagtgtgggacctccgacagcggcgttgcgtctacaccatccctgctcatcagaacttagtgactggtgtcaagtttgagcctatccatgggaacttcttgcttactggtgcctatgataacacagccaagatctggacgcacccaggctggtccccgctgaagactctggctggccacgaaggcaaagtgatgggcctagatatttcttccgatgggcagctcatagccacttgctcatatgacaggaccttcaagctgtggatggctgaatagatgacaatgggaaaaggacttgaacctcaagctctctctaaggagctgttttcctcaaacgagaagaattgaagtgtttagttctatcatgttttctgccaattaccatgcatagaccctcagtagaattggatttccatgtcagcccccactccaggaaggcagcccaatccctaggtgatggggaacccctctcacggttgaaaatttattacctttttacgccctgccacgaactgtgtagacattgtttttattaatcttttgtttggccgggcgtggtggctcacgcctgtaatcctagcactttgggaggccgaggtgggtagatcgcttgagctcaggagttcaagacgagcctgggcaacatggcaaatgccgtctctgcaaaaaaatactaaaattagctggtcgcggtggcttctgcctgtgattccggctacttgggaggctgaggtgggagggattgcttaagcctgggaggcagaggttgcagtgagccgagattgcgccattgcactctagcctgtgtgacagagcaagaccctgtctcaaaaa

SEQ ID NO: 2752 - protein, 522 aa, Homo sapiens
MASSRASSTQATKTKAPDDLVAPVVKKPHIYYGSLEEKERERLAKGESGILGKDGLKAGIEAGNINITSGEVFEIEERISERQAEVLAEFERRKRARQINVSTDDSEVKACLRALGEPITLFGEGPAERRERLRNILSVVGTDALKKTKKDDEKSKKSKEEYQQTWYHEGPNSLKVARLWIANYSLPRAMKRLEEARLHKEIPETTRTSQMQELHKSLRSLNNFCSQIGDDRPISYCHFSPNSKMLATACWSGLCKLWSVPDCNLLHTLRGHNTNVGAIVFHPKSTVSLDPKDVNLASCAADGSVKLWSLDSDEPVADIEGHTVRVARVMWHPSGRFLGTTCYDRSWRLWDLEAQEEILHQEGHSMGVYDIAFHQDGSLAGTGGLDAFGRVWDLRTGRCIMFLEGHLKEIYGINFSPNGYHIATGSGDNTCKVWDLRQRRCVYTIPAHQNLVTGVKFEPIHGNFLLTGAYDNTAKIWTHPGWSPLKTLAGHEGKVMGLDISSDGQLIATCSYDRTFKLWMAE

SEQ ID NO: 2753 - DNA, 2115 bp, Homo sapiens
ggcacgagggacgcgggaagtccggacgcagtagctccctgaagcggaggcgaaggggagtttaagccccagcggcggcaatggcggagaggcccgaggacctaaacctgcccaatgccgtgatcaccaggatcatcaaggaggcgctcccggacggtgtcaacatctccaaggaggcccggagcgccatctcccgcgccgccagcgtcttcgtgctgtacgccacatcctgtgctaacaactttgcaatgaaaggaaagcggaagacgctgaatgccagtgatgtgctctcagccatggaagagatggagttccagcggttcgttaccccattgaaagaagctctggaagcatataggcgggagcagaaaggcaagaaggaggcctcagagcaaaagaagaaggacaaagacaaaaaaacagactcggaagagcaagacaagagcagggatgaggacaatgatgaagacgaagaaaggctggaagaagaagaacagaatgaagaggaagaagtagacaactgaaaagggcgggagactgtggcaccttggaaggtaccacttgaaatgagacgtgctacgtgtttctgtgaagcttttccatgctgggcagagtagtctcaggcaaaagtgcctgaaaagatcagaataaaaactgactagaaataccgtcaaaaccagcacttaccaaactcagagcatctgagtagcagaatcctgttttgcttcatcaatctgaaggttatggccttttgacaagagggattctgaacgactaaattagtcagtttgctcgcttttgtttacttaaatgtatggttagatggtttttgatctgcagtcttccctagtcccccaaataagtaataataacttccatgctgcctgctgtgttccagatcacagaggcagccaaggctcaggaaaaactggggctttgcttatggtcagcctatgtttgattgcacagtctttgacaatagtagcttactaagactgctcagaatgagtaagctttaggaaactactaaaatgctgtgggagaataacaaaatccgttctctctcttcacttgacagaagcattaactgaattttgtttttcatagacccacttggcccaaaacctttctatattgcctgtagatgatcggcctgctggtgtggtagtaatctgatcacagatattcttaaatcagcagtgtggaatggtattagtcaaacatggtgccagtgtcttttacaaaaacagatggcatagtgtcagatgtaccttactctctgctactgtacagctttaggatttgtcatcacctcccggaaggtgtaaaaccccaggcttcctcttcttgtagtccatctcccagacttgtgactatggcttttcattcttcaattcatgacgagtgccaaacttgattttctctaggcacagctttctccctctgtgcctcctgcttcctttctctcctgcctctcctctgctccccatcccactttctcatctgcctccttttctcacttctgtcagtctgtaagctttgataacctgcttaatactccaaagtgtgagttcctctgatctcttgattccttagttctaatctcacgttttgtttttaagagatggagtctctcactctgtggcccaggctggagtgcagtggcatgatcatagctcattgcatccttgaaatcctgggctcaggtgatcctcccgcctgagcctcctgagtatctgggactacagatgcgtgccaccaagcctggctaattttgtctcatgtcttctaaaaattattttgtgaagccccttcacaaaaaaccttaagggaaatctgatggtgctcaggaatctaactctccctaaaccatcctctttaactgcttctaaaatatctctgttggcctttcttagcctttttctgtttccattcagtgctccaagcgctttttgtttctaagttgagtgcttggggtttgacaggtagtgacgtgtagtttgacactgttaacttgttaaatacagtgaaaagtttgtgagtgaagaatgctgagaagattgtaatgctttgtacaaataaaagtcttgttaaaaaaaaaaaaaaaaaaaaaaa

SEQ ID NO: 2754 - protein, 147 aa, Homo sapiens
MAERPEDLNLPNAVITRIIKEALPDGVNISKEARSAISRAASVFVLYATSCANNFAMKGKRKTLNASDVLSAMEEMEFQRFVTPLKEALEAYRREQKGKKEASEQKKKDKDKKTDSEEQDKSRDEDNDEDEERLEEEEQNEEEEVDN

SEQ ID NO: 2755 - DNA, 7543 bp, Homo sapiens
accggccacagcctgcctactgtcacccgcctctcccgcgcgcagatacacgcccccgcctccgtgggcacaaaggcagcgctgctggggaactcgggggaacgcgcacgtgggaaccgccgcagctccacactccaggtacttcttccaaggacctaggtctctcgcccatcggaaagaaaataattctttcaagaagatcagggacaactgatttgaagtctactctgtgcttctaaatccccaattctgctgaaagtgagataccctagagccctagagccccagcagcacccagccaaacccacctccaccatgggggccatgactcagctgttggcaggtgtctttcttgctttccttgccctcgctaccgaaggtggggtcctcaagaaagtcatccggcacaagcgacagagtggggtgaacgccaccctgccagaagagaaccagccagtggtgtttaaccacgtttacaacatcaagctgccagtgggatcccagtgttcggtggatctggagtcagccagtggggagaaagacctggcaccgccttcagagcccagcgaaagctttcaggagcacacagtggatggggaaaaccagattgtcttcacacatcgcatcaacatcccccgccgggcctgtggctgtgccgcagcccctgatgttaaggagctgctgagcagactggaggagctggagaacctggtgtcttccctgagggagcaatgtactgcaggagcaggctgctgtctccagcctgccacaggccgcttggacaccaggcccttctgtagcggtcggggcaacttcagcactgaaggatgtggctgtgtctgcgaacctggctggaaaggccccaactgctctgagcccgaatgtccaggcaactgtcaccttcgaggccggtgcattgatgggcagtgcatctgtgacgacggcttcacgggcgaggactgcagccagctggcttgccccagcgactgcaatgaccagggcaagtgcgtaaatggagtctgcatctgtttcgaaggctacgccggggctgactgcagccgtgaaatctgcccagtgccctgcagtgaggagcacggcacatgtgtagatggcttgtgtgtgtgccacgatggctttgcaggcgatgactgcaacaagcctctgtgtctcaacaattgctacaaccgtggacgatgcgtggagaatgagtgcgtgtgtgatgagggtttcacgggcgaagactgcagtgagctcatctgccccaatgactgcttcgaccggggccgctgcatcaatggcacctgctactgcgaagaaggcttcacaggtgaagactgcgggaaacccacctgcccacatgcctgccacacccagggccggtgtgaggaggggcagtgtgtatgtgatgagggctttgccggtgtggactgcagcgagaagaggtgtcctgctgactgtcacaatcgtggccgctgtgtagacgggcggtgtgagtgtgatgatggtttcactggagctgactgtggggagctcaagtgtcccaatggctgcagtggccatggccgctgtgtcaatgggcagtgtgtgtgtgatgagggctatactggggaggactgcagccagctacggtgccccaatgactgtcacagtcggggccgctgtgtcgagggcaaatgtgtatgtgagcaaggcttcaagggctatgactgcagtgacatgagctgccctaatgactgtcaccagcacggccgctgtgtgaatggcatgtgtgtttgtgatgacggctacacaggggaagactgccgggatcgccaatgccccagggactgcagcaacaggggcctctgtgtggacggacagtgcgtctgtgaggacggcttcaccggccctgactgtgcagaactctcctgtccaaatgactgccatggccagggtcgctgtgtgaatgggcagtgcgtgtgccatgaaggatttatgggcaaagactgcaaggagcaaagatgtcccagtgactgtcatggccagggccgctgcgtggacggccagtgcatctgccacgagggcttcacaggcctggactgtggccagcactcctgccccagtgactgcaacaacttaggacaatgcgtctcgggccgctgcatctgcaacgagggctacagcggagaagactgctcagaggtgtctcctcccaaagacctcgttgtgacagaagtgacggaagagacggtcaacctggcctgggacaatgagatgcgggtcacagagtaccttgtcgtgtacacgcccacccacgagggtggtctggaaatgcagttccgtgtgcctggggaccagacgtccaccatcatccaggagctggagcctggtgtggagtactttatccgtgtatttgccatcctggagaacaagaagagcattcctgtcagcgccagggtggccacgtacttacctgcacctgaaggcctgaaattcaagtccatcaaggagacatctgtggaagtggagtgggatcctctagacattgcttttgaaacctgggagatcatcttccggaatatgaataaagaagatgagggagagatcaccaaaagcctgaggaggccagagacctcttaccggcaaactggtctagctcctgggcaagagtatgagatatctctgcacatagtgaaaaacaatacccggggccctggcctgaagagggtgaccaccacacgcttggatgcccccagccagatcgaggtgaaagatgtcacagacaccactgccttgatcacctggttcaagcccctggctgagatcgatggcattgagctgacctacggcatcaaagacgtgccaggagaccgtaccaccatcgatctcacagaggacgagaaccagtactccatcgggaacctgaagcctgacactgagtacgaggtgtccctcatctcccgcagaggtgacatgtcaagcaacccagccaaagagaccttcacaacaggcctcgatgctcccaggaatcttcgacgtgtttcccagacagataacagcatcaccctggaatggaggaatggcaaggcagctattgacagttacagaattaagtatgcccccatctctggaggggaccacgctgaggttgatgttccaaagagccaacaagccacaaccaaaaccacactcacaggtctgaggccgggaactgaatatgggattggagtttctgctgtgaaggaagacaaggagagcaatccagcgaccatcaacgcagccacagagttggacacgcccaaggaccttcaggtttctgaaactgcagagaccagcctgaccctgctctggaagacaccgttggccaaatttgaccgctaccgcctcaattacagtctccccacaggccagtgggtgggagtgcagcttccaagaaacaccacttcctatgtcctgagaggcctggaaccaggacaggagtacaatgtcctcctgacagccgagaaaggcagacacaagagcaagcccgcacgtgtgaaggcatccactgaacaagcccctgagctggaaaacctcaccgtgactgaggttggctgggatggcctcagactcaactggaccgcagctgaccaggcctatgagcactttatcattcaggtgcaggaggccaacaaggtggaggcagctcggaacctcaccgtgcctggcagccttcgggctgtggacataccgggcctcaaggctgctacgccttatacagtctccatctatggggtgatccagggctatagaacaccagtgctctctgctgaggcctccacaggggaaactcccaatttgggagaggtcgtggtggccgaggtgggctgggatgccctcaaactcaactggactgctccagaaggggcctatgagtactttttcattcaggtgcaggaggctgacacagtagaggcagcccagaacctcaccgtcccaggaggactgaggtccacagacctgcctgggctcaaagcagccactcattataccatcaccatccgcggggtcactcaggacttcagcacaacccctctctctgttgaagtcttgacagaggaggttccagatatgggaaacctcacagtgaccgaggttagctgggatgctctcagactgaactggaccacgccagatggaacctatgaccagtttactattcaggtccaggaggctgaccaggtggaagaggctcacaatctcacggttcctggcagcctgcgttccatggaaatcccaggcctcagggctggcactccttacacagtcaccctgcacggcgaggtcaggggccacagcactcgaccccttgctgtagaggtcgtcacagaggatctcccacagctgggagatttagccgtgtctgaggttggctgggatggcctcagactcaactggaccgcagctgacaatgcctatgagcactttgtcattcaggtgcaggaggtcaacaaagtggaggcagcccagaacctcacgttgcctggcagcctcagggctgtggacatcccgggcctcgaggctgccacgccttatagagtctccatctatggggtgatccggggctatagaacaccagtactctctgctgaggcctccacagccaaagaacctgaaattggaaacttaaatgtttctgacataactcccgagagcttcaatctctcctggatggctaccgatgggatcttcgagacctttaccattgaaattattgattccaataggttgctggagactgtggaatataatatctctggtgctgaacgaactgcccatatctcagggctaccccctagtactgattttattgtctacctctctggacttgctcccagcatccggaccaaaaccatcagtgccacagccacgacagaggccctgccccttctggaaaacctaaccatttccgacattaatccctacgggttcacagtttcctggatggcatcggagaatgcctttgacagctttctagtaacggtggtggattctgggaagctgctggacccccaggaattcacactttcaggaacccagaggaagctggagcttagaggcctcataactggcattggctatgaggttatggtctctggcttcacccaagggcatcaaaccaagcccttgagggctgagattgttacagaagccgaaccggaagttgacaaccttctggtttcagatgccaccccagacggtttccgtctgtcctggacagctgatgaaggggtcttcgacaattttgttctcaaaatcagagataccaaaaagcagtctgagccactggaaataaccctacttgcccccgaacgtaccagggacataacaggtctcagagaggctactgaatacgaaattgaactctatggaataagcaaaggaaggcgatcccagacagtcagtgctatagcaacaacagccatgggctccccaaaggaagtcattttctcagacatcactgaaaattcggctactgtcagctggagggcacccacagcccaagtggagagcttccggattacctatgtgcccattacaggaggtacaccctccatggtaactgtggacggaaccaagactcagaccaggctggtgaaactcatacctggcgtggagtaccttgtcagcatcatcgccatgaagggctttgaggaaagtgaacctgtctcagggtcattcaccacagctctggatggcccatctggcctggtgacagccaacatcactgactcagaagccttggccaggtggcagccagccattgccactgtggacagttatgtcatctcctacacaggcgagaaagtgccagaaattacacgcacggtgtccgggaacacagtggagtatgctctgaccgacctcgagcctgccacggaatacacactgagaatctttgcagagaaagggccccagaagagctcaaccatcactgccaagttcacaacagacctcgattctccaagagacttgactgctactgaggttcagtcggaaactgccctccttacctggcgacccccccgggcatcagtcaccggttacctgctggtctatgaatcagtggatggcacagtcaaggaagtcattgtgggtccagataccacctcctacagcctggcagacctgagcccatccacccactacacagccaagatccaggcactcaatgggcccctgaggagcaatatgatccagaccatcttcaccacaattggactcctgtaccccttccccaaggactgctcccaagcaatgctgaatggagacacgacctctggcctctacaccatttatctgaatggtgataaggctgaggcgctggaagtcttctgtgacatgacctctgatgggggtggatggattgtgttcctgagacgcaaaaacggacgcgagaacttctaccaaaactggaaggcatatgctgctggatttggggaccgcagagaagaattctggcttgggctggacaacctgaacaaaatcacagcccaggggcagtacgagctccgggtggacctgcgggaccatggggagacagcctttgctgtctatgacaagttcagcgtgggagatgccaagactcgctacaagctgaaggtggaggggtacagtgggacagcaggtgactccatggcctaccacaatggcagatccttctccacctttgacaaggacacagattcagccatcaccaactgtgctctgtcctacaaaggggctttctggtacaggaactgtcaccgtgtcaacctgatggggagatatggggacaataaccacagtcagggcgttaactggttccactggaagggccacgaacactcaatccagtttgctgagatgaagctgagaccaagcaacttcagaaatcttgaaggcaggcgcaaacgggcataaattccagggaccactgggtgagagaggaataaggcccagagcgaggaaaggattttaccaaagcatcaatacaaccagcccaaccatcggtccacacctgggcatttggtgagagtcaaagctgaccatggatccctggggccaacggcaacagcatgggcctcacctcctctgtgatttctttctttgcaccaaagacatcagtctccaacatgtttctgttttgttgtttgattcagcaaaaatctcccagtgacaacatcgcaatagttttttacttctcttaggtggctctgggaatgggagaggggtaggatgtacaggggtagtttgttttagaaccagccgtattttacatgaagctgtataattaattgtcattatttttgttagcaaagattaaatgtgtcattggaagccatccctttttttacatttcatacaacagaaaccagaaaagcaatactgtttccattttaaggatatgattaatattattaatataataatgatgatgatgatgatgaaaactaaggatttttcaagagatctttctttccaaaacatttctggacagtacctgattgtattttttttttaaataaaagcacaagtacttttg

SEQ ID NO: 2756 - DNA, 419 bp, Homo sapiens
ttcagatgtatgtttatgtttctgaccttgcgctaccccagtgcaggctccaaacaggcatgcgaggtgcctttggaaagccccagggcactgtgaccagggttcacattggccaagttatcatgtccatccacaccaagctgcagaacaaggagcatgtaattgaggccctgcgcagggccaagttcaagtttcctggccaccagaagatccgcatctcaaagaagtggggcttcaccaagttcaatgttgatgaatttgaagacatggtggctgagaagcagctcatccctgatggctgtggggtcaagtacatccccagtcgtggccctctggacaagtggcgggccctgcactcatgagggcttccactgtgctgccccctcttaatactcaccaataaattctacttcctgtcc

SEQ ID NO: 2757 - DNA, 1075 bp, Homo sapiens
tcccttcagccgccatcatgattatctaccaggacctcatcagtcacaatgagatgttctccgacatctagaagatctgggagattgtggacgggctgtgctgggaggtggtggggaaaatggtcagtaggacagaaggtaacattgatgactcgctcattggtggaaatgtctccgctgaaggccccgagggtgaaggtaccgaaagcacagtaatcactgctgtcgatgttgtcatgaaccatcacctgcaggaaacaagtttcacaaaagaagcccacaagaagtacatcaaagattacatgaaatcaatcaaaggcaaacttgaagaactgagaccagaaagagtaaaaccttttatgacaggggctgcagaacaaatcaagcacatccttgctaatttcaaaaactaccatttctttattggtgaaaacatgaatccagatggcatggttgctctactggactacggtgaggatggtgtgaccccatatatgattttctttagggatggtttagaaacggaaaaatgttaacaaatttggcaattagtttggatctattacctgtcatcataactcgcttctaattgtcatccacacaacaccaggacctaagacaaatgggactaatatcatcttgagctcttcatttatttttaccataatttattcggagtggaggcattgtttttaagaaaaacatgtcatgtaggttgtctaaaaataaaatgcattttaactcatttgagagaataccttttcgtttaatgcatatttaaactaaattcatcctgttgtgttcctggagaagctacagcctggtcataagctactactagaaagagtaagactcatcaattaacttctacagtggaaactacttctgggactggaatatacaaaaaaaatcaaaggttttgattgtgtgttgcaataaagggaaagaccatgttcatagcagtgccaacatctgaagtggagctttacgcatttcatcacctacaatggaattagttaactggaagagattaccaagagaataaaaagagacgaattcagctggaaaaaaaaaa

SEQ ID NO: 2758 - protein, 138 aa, Homo sapiens [sequence omitted]

SEQ ID NO: 2759 - DNA, 5051 bp, Homo sapiens
aggttgaagaacttaactctgaaattgaaaagctcagtgctgcctttgctaaagccagagaggccctacagaaagcacagacccaggaatttcaggggtctgaagactatgagactgctctatcaggaaaggaagccctttcggctgcgctgcgctcacaaaacctcaccaagagtacagagaaccacagactgcgtagaagcattaagaagatcacccaggagctgagtgacttgcagcaggagagggagagactggagaaggacctggaggaagcccatcgagagaagagcaaaggagactgcaccatccgtgatcttagaaatgaagttgaaaaattacgcaatgaagtgaatgaaagagagaaagcaatggaaaatcgttacaagagtcttctgagtgaaagcaataaaaaattgcacaatcaagagcaagtgatcaaacatctaacagaaagtaccaatcagaaggacgtgttgcttcagaaattcaatgaaaaagatttggaagtaatacagcagaactgctatttaatggctgcagaggatcttgagctcaggagtgaaggcttaataacagaaaagtgctcttctcaacagccaccaggcagcaaaaccatcttctctaaggaaaagaaacaatcatcagactatgaagagctgattcaggtcttaaagaaagagcaggacatctatacccatctggtcaaatctctgcaggaatcagacagtatcaacaacctgcaggctgagttaaacaagatttttgccctgcggaagcaactggagcaggatgtgctttcatatcagaatttgcggaagaccttggaggagcagatcagcgaaattcggaggcgggaagaagaatcattttcactttatagtgatcaaacatcttatctaagtatttgccttgaagaaaacaatcggtttcaagtggaacatttttctcaagaagaacttaagaaaaaggtcagtgaccttatacagctagtgaaggagctgtatacagacaaccagcacctgaagaaaaccatttttgatctctcctgcatgggtttccagggaaatgggtttccagatagacttgcgtctacagaacaaacagagcttctggctagcaaggaggacgaggacacgatcaaaattggggaggatgacgagattaatttcctgagtgaccagcatttgcagcagagtaatgagattatgaaagacctttccaaaggaggctgcaaaaatggatacttaaggcacacggagtctaagatttcagattgtgatggggcccacgcacctggctgcctagaagaaggtgcattcataaacctgcttgcccctttgttcaatgagaaggccacattattactggaatccaggccagaccttctgaaagtggtacgggaactgcttctgggacaactattcttgacagagcaggaagtttctggagaacaccttgatggtaaaactgagaagacacctaagcaaaaaggtgaacttgtacattttgtccaaaccaactcattttccaagccacatgatgaactgaagttgtcttgtgaggcccagctagtaaaggcaggcgaagtgcccaaggtaggactgaaagatgcctcagtgcagactgtggccacggagggcgacctgctgagattcaagcatgaagcaacaagagaggcttgggaagagaaaccgatcaacactgcactcagcgcagagcatcggccagagaacctgcacggggtgcctgggtggcaggctgccctcctttccctccctggtattaccaacagagaggctaagaagtcccgcttgccaatcctaataaaaccatcccggtcattaggaaatatgtatcgtctccctgccacccaggaggtggtgacgcagctgcagagccagatcttggagctgcagggggagctgaaggagtttaaaacttgtaataagcaacttcaccaaaagttaattctggctgaagcagtgatggaggggaggccaacgcccgacaaaacgttgctgaatgctcagccccctgtgggagcagcctaccaggacagcccaggagagcagaaaggaattaaaaccacatcttctgtctggagagacaaggaaatggacagtgatcagcaaagaagctacgagattgactctgagatttgcccacctgatgaccttgccagcttgccatcatgcaaagaaaatcctgaagatgttctgagcccaacttcagtagctacttacctgagttccaagagtcagccttctgctaaagtcagtgtgatggggactgatcagtcagagagcattaatacctcaaatgagacagaatacttaaaacagaaaatccatgacttggaaactgagctggaaggctaccagaatttcatatttcagcttcaaaagcactcccagtgcagtgaggccataattacagttttgtgtgggacagaaggggcccaggatggcttgagcaagcccaagaatggttctgatggggaagaaatgaccttttcaagtttgcaccaagtgcgatacgtgaaacacgtgaaaatcctcggtccgctggccccagagatgattgacagcagggtgctggagaacctcaaacagcagctggaggaacaggaatacaagctgcagaaggagcagaatttgaacatgcaacttttcagtgagatccataatctgcagaataagttcagagatctctcacctcccagatacgattcattagttcagtcccaagccagggagctctcccttcaacggcagcagattaaggatggccatggcatctgtgtcatctcccgtcaacacatgaacaccatgattaaggcatttgaggagttgctgcaggccagtgatgtggattactgtgtggccgagggtttccaggaacagctgaatcaatgtgctgagctgctggagaaattggaaaagctatttctcaacggaaaatcagttggagtggaaatgaacacccagaatgaactgatggagaggattgaggaagacaacttaacctaccaacatcttctgcctgaatctcctgagccttcagcctctcatgcgctctctgattatgaaacatctgaaaagtccttcttctcacgagaccagaagcaagataatgagacagagaagacttcagttatggtgaacagtttttctcaagacttactaatggaacacatacaggaaattcgaactttgagaaagcgtttagaagaatctattaaaacaaatgagaagctacggaaacagttggaacggcaaggatctgaatttgttcaaggttctacaagcatttttgcttctggttcagagcttcatagttctctaacatcagaaattcatttcttgaggaagcagaaccaggccctcaatgcaatgctcattaaaggatccagagataaacagaaggagaatgacaaattacgagagtccctctccaggaagaccgtgagcctggagcaccttcagcgggagtatgccagcgtgaaggaagaaaatgaaaggctgcagaaagaaggcagcgagaaggagagacacaaccagcagctgatccaggaggtccgctgcagcggccaggagctgagcagggtgcaggaggaggtgaagttgaggcagcagctgctctcacagaatgacaagctattgcagtctctccgagtggagctgaaggcgtatgagaagctggatgaagagcacaggagactgagagaggcgtcgggagaaggctggaaggggcaggatcctttcagggacctgcacagcctcctgatggagatccaggctctgcgcttgcaactagaaaggagcatcgaaaccagcagcactctgcagagcaggctcaaggaacagctggcaaggggggcagagaaggcacaggaaggagccctcactctggctgtccaagccgtgtccatccctgaggtgccccttcagcctgacaaacacgatggtgacaaatatcccatggaaagtgataattcatttgatctgtttgattcctcccaggcagtgacaccaaaatcagtttcagagactcctccactctctgggaatgacacggactccctctcctgcgacagtggcagttcggcaactagcactccgtgtgtgtcccgcctggtcactggccaccacctgtgggccagcaagaatggccgccatgtcctgggcctgattgaggactatgaggccctgctcaaacagatcagccagggacagaggctccttgctgaaatggacattcaaacccaagaggctcccagctccacaagtcaagagctgggaacaaagggtccacacccagcaccactgagcaagtttgtgagcagtgtgagcacggccaagctgaccctggaagaggcctacaggcggctgaagcttctctggagagtctcactccccgaggatggccagtgcccccttcactgtgagcagattggagaaatgaaggcagaggtcaccaaactacataaaaaattgtttgaacaagaaaagaagttgcaaaacaccatgaagcttttgcagctgagcaagcgccaggaaaaagtcatctttgatcaattggtcgtaacccacaaaatccttcggaaggccagaggaaacctggagcttaggcctgggggagcccatccaggaacatgcagtcccagcagaccaggctcctgagaagaactttcagccaataaagcttgtgcttcccccaccgagctcacgctgtctctttgttccaagtgtggttcctatttattgaggaagaaagagctgtctggccaaaggaaatctattttttcccttcatgttttctctctgaaagttggcttgagagttgttgtcagaaaggtgcaggtgctccacaaacgggtggtaaaaaggcctcgagctcttggatgttgtatttcagatcaggggcaggcaccggagttgaggctgtgcgccttggtgggcttcacgtcttcccctggatttgcttagtactcagccagtgccacagtttgaagattctcattaaatgattcatttcatttcaccttg

SEQ ID NO: 2760 - DNA, 1236 bp, Homo sapiens
ggtgtgtgcggaacatggcggagcgcggcaggaagcggccgtgcggcccgggtgaacacggccaaaggattgagtggcgaaaatggaagcaacagaagaaagaggagaaaaaaaaatggaaggatctcaagctgatgaaaaaactggagcggcagcgggcacaggaggaacaggcaaagcgcctggaagaggaggaggcagcggcagagaaggaggaccgcgggcggccctacacactgagcgtagccctgccgggctccatcctggacaatgctcagtcgccggagcttcgcacctacttggccggtcagattgccagagcctgtgccatcttctgtgtggatgagatcgtggtgtttgatgaggagggccaggatgccaagactgtggagggggaattcacaggagttgggaagaaggggcaggcgtgcgtacagctggcccggatcctgcagtacctggagtgtccacagtacctgaggaaggcgttcttccccaagcaccaggatctacagtttgcagggctcctgaaccccctggacagcccccaccacatgcgtcaggatgaggaatccgagttccgagagggcatcgtggtggatcggcccacccggccaggccacggctcctttgtcaactgtggcatgaaaaaggaggtgaagattgacaagaacctggagcccgggcttcgggtgactgtgcgactgaaccagcagcagcacccagactgcaagacctaccatggcaaagtggtatcatcgcaggaccctcgcaccaaagctggtctctactggggctacaccgtccgactggcttcctgcctcagtgctgtgtttgctgaggcccccttccaagatgggtatgacctgaccatcgggacgtcagagcgcggctcagatgtggcctctgcccagcttcccaacttcaggcatgctcttgtggtgttcgggggcctccagggtctggaagctggagcggatgctgaccccaacctggaggtggctgaacccagtgtcctctttgacctgtacgtcaatacctgtcctggccagggtagccgtaccatccgcacggaggaagccatcctcatctccctggccgccctgcagcctggcctcatccaggcgggtgcccggcacacctgaaagttctaaggggccgaggacatcagtgaagcagcagtgaaaccaggggctctgcaggtcacttgggacggacgccaccagacttgtctcc

SEQ ID NO: 2761 - DNA, 1133 bp, Homo sapiens
ggcacgaggctgggttccgaggcccaagcccttggcagtgtttgtgagtggaagggaggtcacgctatcgtccgcggccccagcagccctgtgccctcgttggatcccgcgacgcggctcctttaagagcctcgcgggtcgcccgccgctaggtcgctccccggccatgcgggcgctgcgggccggcctgaccctggcgtcgggcgcggggctgggtgcggtcgtcgagggctggcggcggcggcgggaggacgcgcgggcggcgctgggactgctgggccggctgcccgtgctgcccgtggcggcggcagccgagttgccccctgtgcccgggggaccccgcggcccgggcgagttggccaagtacgggctgccggggctggcgcagctcaagagccgcgagtcgtacgtgctgtgctacgacccgcgcacccgcggcgcgctctgggtggtggagcagctgcgacccgagcgtctccgcggcgacggcgaccggcgcgagtgcgacttccgcgaggacgactcggtgcacgcgtaccaccgtgccaccaacgccgactaccgcggcagtggcttcgaccgcggtcacctggccgccgccgccaaccaccgctggagccagaaggccatggacgacacgttctacctgagcaaagtcgcgccccaggtgccccacctcaaccagaatgcctggaacaacctggagaaatatagccgcagcttgacccgcagctaccaaaacgtctatgtctgcacagggccactcttcctgcccaggacagaggctgatgggaaatcctacgtaaagtaccaggtcatcggcaagaaccacgtggcagtgcccacacacttcttcaaggtgctgatcctggaggcagcaggtgggcaaattgagctccgcacctacgtgatgcccaacgcacctgtggatgaggccatcccactggagcgcttcctggtgcccatcgagagcattgagcgggcttcggggctgctctttgtgccaaacatcctggcgcgggcaggcagcctcaaggccatcacggcgggcagtaagtgagggtggagcccagtgagactgtgggtgtgtgcaggccggggagtattaaaggtggtgatttttggaaaaaaaa

SEQ ID NO: 2762 - protein, 297 aa, Homo sapiens
MRALRAGLTLASGAGLGAVVEGWRRRREDARAALGLLGRLPVLPVAAAAELPPVPGGPRGPGELAKYGLPGLAQLKSRESYVLCYDPRTRGALWVVEQLRPERLRGDGDRRECDFREDDSVHAYHRATNADYRGSGFDRGHLAAAANHRWSQKAMDDTFYLSKVAPQVPHLNQNAWNNLEKYSRSLTRSYQNVYVCTGPLFLPRTEADGKSYVKYQVIGKNHVAVPTHFFKVLILEAAGGQIELRTYVMPNAPVDEAIPLERFLVPIESIERASGLLFVPNILARAGSLKAITAGSK

SEQ ID NO: 2763 - DNA, 1168 bp, Homo sapiens
ggcacgaggccgggccgaggcgatggcgccctgggcgctcctcagccctggggtcctggtgcggaccgggcacaccgtgctgacctggggaatcacgctggtgctcttcctgcacgataccgagctgcggcaatgggaggagcagggggagctgctcctgcccctcaccttcctgctcctggtgctgggctccctgctgctctacctcgctgtgtcactcatggaccctggctacgtgaatgtgcagccccagcctcaggaggagctcaaagaggagcagacagccatggttcctccagccatccctcttcggcgctgcagatactgcctggtgctgcagcccctgagggctcggcactgccgtgagtgccgccgttgcgtccgccgctacgaccaccactgcccctggatggagaactgtgtgggagagcgcaaccacccactctttgtggtctacctggcgctgcagctggtggtgcttctgtggggcctgtacctggcatggtcaggcctccggttcttccagccctggggtctgtggttgcggtccagcgggctcctgttcgccaccttcctgctgctgtccctcttctcgttggtggccagcctgctcctcgtctcgcacctctacctggtggccagcaacaccaccacctgggaattcatctcctcacaccgcatcgcctatctccgccagcgccccagcaaccccttcgaccgaggcctgacccgcaacctggcccacttcttctgtggatggccctcagggtcctgggagaccctctgggctgaggaggaggaagagggcagcagcccagctgtttagggttgctggaggccgggctaccgtcttgtgcctgaaaaccacggggcctgtccccagctggggtgagcgctcagagggcctggggccctcactcctgcccacgcctcccagaccccagaacggagcttcaagtcagacagatccctgccttggtgggcagttctgccttccaaggaagaaggggaagaaaaggacctgtgggtggctcaggcccaagcagaccccgggctccaccccagccccgcccaggctgctgccagtgcacacttttacaaatttaatataaagcaagtccagtcttaaaaagacaaaaaaaaaaaaaaaaaaaaaaaaaaaaaaaaa

SEQ ID NO: 2764 - protein, 267 aa, Homo sapiens
MAPWALLSPGVLVRTGHTVLTWGITLVLFLHDTELRQWEEQGELLLPLTFLLLVLGSLLLYLAVSLMDPGYVNVQPQPQEELKEEQTAMVPPAIPLRRCRYCLVLQPLRARHCRECRRCVRRYDHHCPWMENCVGERNHPLFVVYLALQLVVLLWGLYLAWSGLRFFQPWGLWLRSSGLLFATFLLLSLFSLVASLLLVSHLYLVASNTTTWEFISSHRIAYLRQRPSNPFDRGLTRNLAHFFCGWPSGSWETLWAEEEEEGSSPAV

SEQ ID NO: 2765 - DNA, 2559 bp, Homo sapiens
catgtcggcgccggcggccaaagtcagtaaaaaggagctcaactccaaccacgacggggccgacgagacctcagaaaaagaacagcaagaagcgattgaacacattgatgaagtacaaaatgaaatagacagacttaatgaacaagccagtgaggagattttgaaagtagaacagaaatataacaaactccgccaaccattttttcagaagaggtcagaattgatcgccaaaatcccaaatttttgggtaacaacatttgtcaaccatccacaagtgtctgcactgcttggggaggaagatgaagaggcactgcattatttgaccagagttgaagtgacagaatttgaagatattaaatcaggttacagaatagatttttattttgatgaaaatccttactttgaaaataaagttctctccaaagaatttcatctgaatgagagtggtgatccatcttcgaagtccaccgaaatcaaatggaaatctggaaaggatttgacgaaacgttcgagtcaaacgcagaataaagccagcaggaagaggcagcatgaggaaccagagagcttctttacctggtttactgaccattctgatgcaggtgctgatgagttaggagaggtcatcaaagatgatatttggccaaacccattacagtactacttggttcccgatatggatgatgaagaaggagaaggagaagaagatgatgatgatgatgaagaggaggaaggattagaagatattgacgaagaaggggatgaggatgaaggtgaagaagatgaagatgatgatgaaggggaggaaggagaggaggatgaaggagaagatgactaaatagaacactgatggattccaaccttcctttttttaaattttctccagtccctgggagcaagttgcagtcttttttttttttttttttttttttccctcttgtgctcagtcgccctgttcttgaggtctcttttctctactccatggttctcaatttatttggggggaaataccttgagcagaatacaatgggaaaagagtctctacccctttctgttcgaagttcatttttatcccttcctgtctgaacaaaaactgtatggaatcaacaccaccgagctctgtgggaaaaaagaaaaacctgctcccttcgctctgctggaagctggagggtgctaggcccctgtgtagtagtgcatagaattctagcttttttcctcctttctctgtatattgggctcagagagtacactgtgtctctatgtgaatatggacagttagcatttaccaacatgtatctgtctactttctcttgtttaaaaaaagaaaaaaaaacttaaaaaaatggggttatagaaggtcagcaaagggtgggtttgagatgtttgggtgggttaagtgggcattttgacaacatggcttctcctttggcatgtttaattgtgatatttgacagacatccttgcagtttaagatgacacttttaaaataaattctctcctaatgatgacttgagccctgccactcaatgggagaatcagcagaacctgtaggatcttatttggaattgacattctctattgtaattttgttcctgtttatttttaaattttctttttgtttcactggaaaggaaagatgatgctcagttttaaacgttaaaagtgtacaagttgctttgttacaataaaactaaatgtgtacacaaaggatttgatgcttttctctcagcataggtatgcttactatgaccttccaagtttgacttgtataacatcactgtcaaactttgtcaccctaacttcgtattttttgatacgcactttgcaggatgacctcagggctatgtggattgagtaatgggatttgaatcaatgtattaatatctccatagctgggaaacgtgggttcaatttgccattggtttctgaaagtattcacatcatttgggataccagatagctcaatactctctgagtacattgtgcccttgatttttatctccaagtggcagtttttaaaattggccttttacctggatataaattaattgtgcctgccaccaccatccaacagacctggtgctctaatgccaagttatacacgggacagttgctggcatgtcttcattggctatataaaatgtggccaagaagataggctctcagtaagaagtctgatggtgagcagtaactgtccctgctttctggtataaagctctcaaatgtgaccatgtgaatctgggtgggataatggactcagctctgtctgctcaatgccattgtgcagagaagcaccctaatgcataagctttttaatgctgtaaaatatagtcgctgaaattaaatgccactttttcagaggtgaattaatggacagtctggtgaacttcaaaagctttttgatgtataaaacttgataaatggaactattccatcaataggcaaaagtgtaacaacctatctagatggatagtatgtaatttctgcacaggtctctgtttagtaaatacatcactgtataccgatcaggaatcttgctccaataaaggaacataaagattt

SEQ ID NO: 2766 - DNA, 1755 bp, Homo sapiens
ggcggcgtaggggcggaggtcgcgcctgagtgcgtccgcacgagagggcggaaccgtctccatggcaacccgcgcgcagccggggccactcagccaggcgggaagcgctggtgttgcggcgctggcgacagtcggggttgcgagcggcccggggccggggcggccagggccgctgcaggacgagaccctgggtgtggcgtccgtgccctcgcagtggagggccgtccagggcatccgctgggagacgaaaagttgccagacggccagcattgccactgccagtgcatccgcccaggccaggaatcatgtggacgcccaggtgcagacggaggcccccgtgcctgtcagcgtgcagcccccgtcccagtatgacatacccaggctcgcagcctttcttcggagagtggaggccatggtcatccgagagctgaacaagaattggcagagccacgcgtttgatggcttcgaggtgaactggaccgagcagcagcagatggtgtcttgtctgtataccctgggctacccgccagcccaagcgcagggtctgcatgtgaccagcatctcctggaactccactggctctgtggtggcctgtgcctacggccggctggaccatggggactggagcacgcttaagtccttcgtgtgtgcctggaacctggaccggcgagacctgcgtccccagcagccgtcggccgtggtggaggtccccagcgctgtcctgtgtctggccttccaccccacgcagccctcccacgtcgcaggagggctgtacagtggtgaggtgttggtgtgggacctgagccgtcttgaggacccgctgctgtggcgcacaggcctgacggatgacacccacacagaccctgtgtcccaggtggtgtggctgcccgagcctgggcacagccaccgcttccaggtgctgagtgtggccaccgacgggaaggtgctactctggcagggcatcggggtaggccagctgcagctcacagagggcttcgccctggtcatgcagcagctgccacggagcaccaagctcaagaagcatccccgcggggagaccgaggtgggcgccacggcagtggccttctccagctttgaccctaggctgttcattctgggcacggaaggcggcttcccgctcaagtgttccctggcagctggagaggcagccctcacgcggatgcccagctccgtgcccctgcgggccccagcacagtttaccttctccccccacggcggtcccatctactctgtgagctgttcccccttccacaggaatctcttcctgagcgctgggactgacgggcatgtccacctgtactccatgctgcaggcccctcccttgacttcgctgcagctctccctcaagtatctgtttgctgtgcgctggtccccagtgcggcccttggtttttgcagctgcctctgggaaaggtgacgtgcagctgtttgatctccagaaaagctcccagaaacccacagttttgatcaagcaaacccaggatgaaagccctgtctactgtctggagttcaacagccagcagactcagctcttggctgcgggcgatgcccagggcacagtgaaggtgtggcagctgagcacagagttcacggaacaagggccccgggaagctgaggacctggactgcctggcagcagaggtggcggcctgaggggtcccgggaggcgggtgcaagccttcgctgtgccgagccttgtgtttctgacgcaagccaaatgaagaaaagcaaagctt

SEQ ID NO: 2767 - DNA, 1554 bp, Homo sapiens
atgctgcaggagtggctggcggctgtgggcgatgactatgctgctgtggtctggaggcctgagggcgagcccaggttctacccagatgaagagggtcccaagcactggaccaaagaaaggcaccagtttctgatggagctgaagcaggaagccctcacctttgccaggaactggggggccgactatatcctgtttgcagacacagacaacattctgaccaacaatcagactctgcggcttctcatggggcaggggcttccagtggtggccccaatgctggactcccagacctactactccaacttctggtgtgggatcaccccccagggctactaccgccgcacagccgagtacttccccaccaagaaccgccagcgccggggctgcttccgtgtccccatggtccactccaccttccttgcatccctgcgggctgaaggggcagaccagcttgctttctacccgccacatcccaactacacttggcctttcgacgacatcatcgtcttcgcctatgcctgccaggctgctggggtctccgtccacgtgtgcaatgagcaccgttatgggtacatgaatgtgccggtgaaatcccaccaggggctggaagacgagagggtcaacttcatccacctgatcttggaagcactagtggacggcccccgcatgcaggcctcagctcatgtgactcggccctctaagaggcccagcaagatagggtttgacgaggtctttgtcatcagcctggctcgcaggcctgaccgtcgggaacgcatgctcgcctcgctctgggagatggagatctctgggagggtggtggacgctgtggatgctggatggctcaacagcagtgccatcaggaacctcggcgtagacctgctcccgggctaccaggacccttactcgggccgcactctgaccaagggcgaggtgggctgcttcctcagccattactccatctgggaagaggtggttgccaggggcctggcccgggtcctggtgtttgaggatgacgtgcgctttgagagcaacttcagggggcggctggagcggctgatggaggatgtggaggcagagaaactgtcttgggacctgatctaccttggacggaaacaggtgaaccctgagaaggagacggccgtggaggggctgccgggcctggtggtggctgggtactcctactggacgctggcctatgccctgcgtctggcgggtgcccgcaagctgctggcctcacagcctctgcgccgcatgctgcccgtggacgagttcctgcccatcatgttcgaccagcaccccaacgagcagtacaaggcacacttctggccacgggacctggtggccttctccgcccagcccctgctcgctgcccctacccactatgccggggacgccgagtggctcagtgacacggagacatcctctccatgggatgatgacagcggccgcctcatcagctggagcggctcccaaaagaccctgcgcagcccccgcctggacctgactggcagcagcgggcacagcctccaaccccagccccgagatgagctctag

SEQ ID NO: 2768 - protein, 517 aa, Homo sapiens
MLQEWLAAVGDDYAAVVWRPEGEPRFYPDEEGPKHWTKERHQFLMELKQEALTFARNWGADYILFADTDNILTNNQTLRLLMGQGLPVVAPMLDSQTYYSNFWCGITPQGYYRRTAEYFPTKNRQRRGCFRVPMVHSTFLASLRAEGADQLAFYPPHPNYTWPFDDIIVFAYACQAAGVSVHVCNEHRYGYMNVPVKSHQGLEDERVNFIHLILEALVDGPRMQASAHVTRPSKRPSKIGFDEVFVISLARRPDRRERMLASLWEMEISGRVVDAVDAGWLNSSAIRNLGVDLLPGYQDPYSGRTLTKGEVGCFLSHYSIWEEVVARGLARVLVFEDDVRFESNFRGRLERLMEDVEAEKLSWDLIYLGRKQVNPEKETAVEGLPGLVVAGYSYWTLAYALRLAGARKLLASQPLRRMLPVDEFLPIMFDQHPNEQYKAHFWPRDLVAFSAQPLLAAPTHYAGDAEWLSDTETSSPWDDDSGRLISWSGSQKTLRSPRLDLTGSSGHSLQPQPRDEL

SEQ ID NO: 2769 - DNA, 1325 bp, Homo sapiens
gcgagctcggcttcctcaacatggctgcgcccttgtcagtggaggtggagttcggaggtggtgcggagctcctgtttgacggtattaagaaacatcgagtcactttgcctggacaggaggaaccctgggacatccggaacctgctcatctggatcaagaagaatttgctaaaagagcggccagagttgttcatccagggagacagcgtgcggccaggaattctggtgctgattaacgatgccgactgggagctactgggtgagctggactaccagcttcaggaccaggacagcgtcctcttcatctccactctgcacggcggctgagggcccttctctgggcctgggcacccttagaggggagaacgaagcaatcagacatccccttgggccctgcttccaggtctccctgtcccccttgcctgccttcttccctgctctgtcccctaagctccctccaggcagggaaaagaggccaggtgctaaaaatgagcctttctcaagcacgtgagcagcggaaggcagacaggcgccagagcccagcactcccttttccagcagctgtggtgggggagggttcccctccagtttgtcaagagttgaaggaggctctgtggccaggtgacctggctgccttccactccttgtacctcagtctaaacatggagtggccgctgacaaggcgctccagccccagagccagcgtcttcatggggaagatgaatggacctgagtagctgaaggaaggcccctccctacccaaagactggaggcttctcagcctcaatttccctgtctgtacagctgagggctctgcctgtcccccactgctatcagtatggaaccccagctggggtcccctattgagtgccgactccccccaccgccagcagctgctcctccagccacacccctcctgctccccccacccctagcccttgaccctggctggcctgccccgctccacaggccaccagatgggctcctgagaccctccccaggctgcttacagctcattctgctgggggtagagatgaggggagggagtaagttaaaccttggactagcaagtagaagcctggggggatgcgtgtgcctcagtttcctcctccacaactgaatatagtggctgaaaactggggagatacttgatggcgcgaatgtccgttttctctcccttcccacctcctgcaggaagcaggacggggcaggcagcacctggtaggcacagtgctttgcccctcctccccttcccttctggaagtcttggggcctcagtgcttgcaacagccggccttgggcaaataaaagactaggttgtttact

SEQ ID NO: 2770 - protein, 101 aa, Homo sapiens
MAAPLSVEVEFGGGAELLFDGIKKHRVTLPGQEEPWDIRNLLIWIKKNLLKERPELFIQGDSVRPGILVLINDADWELLGELDYQLQDQDSVLFISTLHGG

SEQ ID NO: 2771 - DNA, 2813 bp, Homo sapiens
cagcagcagcagcagctccagcaacagcagcagcagctccagcagttacagcagcagcagctccagcagcagcaattgcagcagcagcagttactgcagctccagcagctgctccagcagtccccaccacaggccccgttgcccatggctgtcagccgggggctccccccgcagcagccacagcagccgcttctgaatctccagggcaccaactcagcctccctcctcaacggctccatgctgcagagagctttgcttttacagcagttgcaaggactggaccagtttgcaatgccaccagccacgtatgacactgccggtctcaccatgcccacagcaacactgggtaacctccgaggctatggcatggcatccccaggcctcgcagcccccagcctcacacccccacaactggccactccaaatttgcaacagttctttccccaggccactcgccagtccttgctgggacctcctcctgttggggtccccatgaacccttcccagttcaacctttcaggacggaacccccagaaacaggcccggacctcctcctctaccacccccaatcgaaaggattcttcttctcagacaatgcctgtggaagacaagtcagaccccccagaggggtctgaggaagccgcagagccccggatggacacaccagaagaccaagatttaccgccctgcccagaggacatcgccaaggaaaaacgcactccagcacctgagcctgagccttgtgaggcgtccgagctgccagcaaagagattgaggagctcagaagagcccacagagaaggaacctccagggcagttacaggtgaaggcccagccgcaggcccggatgacagtaccgaaacagacacagacaccagacctgctgcctgaggccctggaagcccaagtgctgccacgattccagccacgggtcctgcaggtccaggcccaggtgcagtcacagactcagccgcggataccatccacagacacccaggtgcagccaaagctgcagaagcaggcgcaaacacagacctctccagagcacttagtgctgcaacagaagcaggtgcagccacagctgcagcaggaggcagagccacagaagcaggtgcagccacaggtacagccacaggcacattcacagggcccaaggcaggtgcagctgcagcaggaggcagagccgctgaagcaggtgcagccacaggtgcagccccaggcacattcacagcccccaaggcaggtgcagctgcagctgcagaagcaggtccagacacagacatatccacaggtccacacacaggcacagccaagcgtccagccacaggagcatcctccagcgcaggtgtcagtacagccaccagagcagacccatgagcagcctcacacccagccgcaggtgtcgttgctggctccagagcaaacaccagttgtggttcatgtctgcgggctggagatgccacctgatgcagtagaagctggtggaggcatggaaaagaccttgccagagcctgtgggcacccaagtcagcatggaagagattcagaatgagtcggcctgtggcctagatgtgggagaatgtgaaaacagagcgagagagatgccaggggtatggggcgccgggggctccctgaaggtcaccattctgcagagcagtgacagccgggcctttagcactgtacccctgacacctgtcccccgccccagtgactccgtctcctccacccctgcggctaccagcactccctctaagcaggccctccagttcttctgctacatctgcaaggccagctgctccagccagcaggagttccaggaccacatgtcggagcctcagcaccagcagcggctaggggagatccagcacatgagccaagcctgcctcctgtccctgctgcccgtgccccgggacgtcctggagacagaggatgaggagcctccaccaaggcgctggtgcaacacctgccagctctactacatgggggacctgatccaacaccgcaggacacaggaccacaagattgccaaacaatccttgcgacccttctgcaccgtttgcaaccgctacttcaaaacccctcgcaagtttgtggagcacgtgaagtcccaggggcataaggacaaagccaaggagctgaagtcgcttgagaaagaaattgctggccaagatgaggaccacttcattacagtggacgctgtgggttgcttcgagggtgatgaagaagaggaagaggatgatgaggatgaagaagagatcgaggttgaggaggaactctgcaagcaggtgaggtccagagatatatccagagaggagtggaagggctcggagacctacagccccaatactgcatatggtgtggacttcctggtgcccgtgatgggctatatctgccgcatctgccacaagttctatcacagcaactcaggggcacagctctcccactgcaagtccctgggccactttgagaacctgcagaaatacaaggcggccaagaaccccagccccaccacccgacctgtgagccgccggtgcgcaatcaacgcccggaacgctttgacagccctgttcacctccagcggccgcccaccctcccagcccaacacccaggacaaaacacccagcaaggtgacggctcgaccctcccagcccccactacctcggcgctcaacccgcctcaaaacctgatagagggacctccctgtccctggcctgcctgggtccagatctgctaatgctttttaggagtctgcctggaaactttgacatggttcatgtttttactcaaaatccaataaaacaaggtagtttggctg

SEQ ID NO: 2772 - DNA, 1831 bp, Homo sapiens
ggcacgaggggcgggcgtttcgaacttgggcgccgggcacacgcccagtcccgagagcgctgagggttcccttagcgtcgccctcaccccggccaacccgcggggcgccagagtcctggccctttaaacgccgcgcgtgcctcggcgtcttcgtttcgcgcgcccgcccgcggcgccggcggagcgaacatggacccggctgcgcgggtggtgcgggcgctgtggcctggtgggtgcgccttggcctggaggctgggaggccgcccccagccgctgctacccacgcagagccgggctggcttcgcgggggcggcgggcggcccgagccccgtggctgcagctcgtaaggggagcccgcggctgctgggagctgcggcgctggccctggggggagccctggggctgtaccacacggcgcggtggcacctgcgcgcccaggacctccacgcagagcgctcagccgcgcagctctccctgtccagccgcctgcagctgaccctgtaccagtacaagacgtgtcccttctgcagcaaggtccgagccttcctcgacttccatgccctgccctaccaggtggtggaggtgaaccctgtgcgcagggctgagatcaagttctcctcctacagaaaggtgcccatcctggtggcccaggaaggagaaagctcgcaacaactaaatgactcctctgtcatcatcagcgccctcaagacctacctggtgtcggggcagcccctggaagagatcatcacctactacccagccatgaaggctgtgaacgagcagggcaaggaggtgaccgagttcggcaataagtactggctcatgctcaacgagaaggaggcccagcaagtgtatggtgggaaggaggccaggacggaggagatgaagtggcggcagtgggcggacgactggctggtgcacctgatctcccccaatgtgtaccgcacgcccaccgaggctctggcgtcctttgactacattgtccgcgagggcaagttcggagccgtggagggtgccgtggccaagtacatgggtgcagcggccatgtacctcatcagcaagcgactcaagagcaggcaccgcctccaggacaacgtgcgcgaggacctctatgaggctgctgacaagtgggtggctgctgtgggcaaggaccggcccttcatggggggccagaagccgaatctcgctgatttggcggtgtatggcgtgctgcgtgtgatggaggggctggatgcattcgatgacctgatgcagcacacgcacatccagccctggtacctgcgggtggagagggccatcaccgaggcctccccagcgcactgaatgtccccgcgcagagcagagggaaggcagcggaagacgccagctgccagggcctggggccactgggccagcgcctggcgatactggttgggggcaggatcattctgccccttgtccacgcacccccaccagccctctcgcttctaacacagggcacctgctggggctcagggatgttagggacgagttccagccctgccactgccctggggcgacccctccctgtccctgcctccctgctctgccgcccctcttcctggaccctcagtggctgtcccatggctacatcctgtgggtgggggccctcgacaggacagcaggacggtttgttttcagtggaatcccatccctgggttcccctggttcccactcttcccaagcctcccgggactgggacatgtttgcaataaaggaaaggtttgtggcgcctgtcatggcaggcatctcatggaaaaaaaaaaaaaaaaaaaaaaaaaaaaaaaaaaaaaaaaaaaaaaaaaaaaaaaaa

SEQ ID NO: 2773 - protein, 377 aa, Homo sapiens
MDPAARVVRALWPGGCALAWRLGGRPQPLLPTQSRAGFAGAAGGPSPVAAARKGSPRLLGAAALALGGALGLYHTARWHLRAQDLHAERSAAQLSLSSRLQLTLYQYKTCPFCSKVRAFLDFHALPYQVVEVNPVRRAEIKFSSYRKVPILVAQEGESSQQLNDSSVIISALKTYLVSGQPLEEIITYYPAMKAVNEQGKEVTEFGNKYWLMLNEKEAQQVYGGKEARTEEMKWRQWADDWLVHLISPNVYRTPTEALASFDYIVREGKFGAVEGAVAKYMGAAAMYLISKRLKSRHRLQDNVREDLYEAADKWVAAVGKDRPFMGGQKPNLADLAVYGVLRVMEGLDAFDDLMQHTHIQPWYLRVERAITEASPAH

SEQ ID NO: 2774 - DNA, 1165 bp, Homo sapiens
cccagccctggagacagcagcccctagactactgagggacagcgacagcatgaaggctccgggtcggctcgtgctcatcatcctgtgctccgtggtcttctctgccgtctacatcctcctgtgctgctgggccggcctgcccctctgcctggccacctgcctggaccaccacttccccacaggctccaggcccactgtgccgggacccctgcacttcagtggatatagcagtgtgccagatgggaagccgctggtccgcgagccctgccgcagctgtgccgtggtgtccagctccggccaaatgctgggctcaggcctgggtgctgagatcgacagtgccgagtgcgtgttccgcatgaaccaggcgcccaccgtgggctttgaggcggatgtgggccagcgcagcaccctgcgtgtcgtctcacacacaagcgtgccgctgctgctgcgcaactattcacactacttccagaaggcccgagacacgctctacatggtgtggggccagggcaggcacatggaccgggtgctcggcggccgcacctaccgcacgctgctgcagctcaccaggatgtaccccggcctgcaggtgtacaccttcacggagcgcatgatggcctactgcgaccagatcttccaggacgagacgggcaagaaccggaggcagtcgggctccttcctcagcaccggctggttcaccatgatcctcgcgctggagctgtgtgaggagatcgtggtctatgggatggtcagcgacagctactgcagggagaagagccacccctcagtgccttaccactactttgagaagggccggctagatgagtgtcagatgtacctggcacacgagcaggcgccccgaagcgcccaccgcttcatcactgagaaggcggtcttctcccgctgggccaagaagaggcccatcgtgttcgcccatccgtcctggaggactgagtagcttccgtcgtcctgccagtcgccatgccgttgcgaggcctccgggatgtcccatcccaagccatcacactccacaaaaacatttaatttatggatcctgcctcctgccacgtgctgggtggacctaaggttcctttccactccctgagtaattcacggcatttgggggctcaccccacctccaggtctgtcaagtggcctttgtccc

SEQ ID NO: 2775 - DNA, 2158 bp, Homo sapiens
gcgcggcataacgacccaggtcgcggcgcggcggggcttgagcgcgtggccggtgccgcaggagccgagcatggagtaccaggatgccgtgcgcatgctcaataccctgcagaccaatgccggctacctggagcaggtgaagcgccagcggggtgaccctcagacacagttggaagccatggaactgtacctggcacggagtgggctgcaggtggaggacttggaccggctgaacatcatccacgtcactgggacgaaggggaagggctccacctgtgccttcacggaatgtatcctccgaagctatggcctgaagacgggattctttagctctccccacctggtgcaggttcgggagcggatccgcatcaatgggcagcccatcagtcctgagctcttcaccaagtacttctggcgcctctaccaccggctggaggagaccaaggatggcagctgtgtctccatgcccccctacttccgcttcctgacactcatggccttccacgtcttcctccaagagaaggtggacctggcagtggtggaggtgggcattggcggggcttatgactgcaccaacatcatcaggaagcctgtggtgtgcggagtctcctctcttggcatcgaccacaccagcctcctgggggatacggtggagaagatcgcatggcagaaagggggcatctttaagcaaggtgtccctgccttcactgtgctccaacctgaaggtcccctggcagtgctgagggaccgagcccagcagatctcatgtcctctatacctgtgtccgatgctggaggccctcgaggaaggggggccgccgctgaccctgggcctggagggggagcaccagcggtccaacgccgccttggccttgcagctggcccactgctggctgcagcggcaggaccgccatggtgctggggagccaaaggcatccaggccagggctcctgtggcagctgcccctggcacctgtgttccagcccacatcccacatgcggctcgggcttcggaacacggagtggccgggccggacgcaggtgctgcggcgcgggcccctcacctggtacctggacggtgcgcacaccgccagcagcgcgcaggcctgcgtgcgctggttccgccaggcgctgcagggccgcgagaggccgagcggtggccccgaggttcgagtcttgctcttcaatgctaccggggaccgggacccggcggccctgctgaagctgctgcagccctgccagtttgactatgccgtcttctgccctaacctgacagaggtgtcatccacaggcaacgcagaccaacagaacttcacagtgacactggaccaggtcctgctccgctgcctggaacaccagcagcactggaaccacctggacgaagagcaggccagcccggacctctggagtgcccccagcccagagcccggtgggtccgcatccctgcttctggcgccccacccaccccacacctgcagtgccagctccctcgtcttcagctgcatttcacatgccttgcaatggatcagccaaggccgagaccccatcttccagccacctagtcccccaaagggcctcctcacccaccctgtggctcacagtggggccagcatactccgtgaggctgctgccatccatgtgctagtcactggcagcctgcacctggtgggtggtgtcctgaagctgctggagcccgcactgtcccagtagccaaggcccggggttggaggtgggagcttcccacacctgcctgcgttctccccatgaacttacatactaggtgccttttgtttttggctttcctggttctgtctagactggcctaggggccagggctttgggatgggaggccgggagaggatgtcttttttaaggctctgtgccttggtctctccttcctcttggctgagatagcagaggggctccccgggtctctcactgttgcagtggcctggccgttcagcctgtctcccccaacaccccgcctgcctcctggctcaggcccagcttattgtgtgcgctgcctggccaggccctgggtcttgccatgtgctgggtggtagatttcctcctcccagtgccttctgggaagggagagggcctctgcctgggacactgcgggacagagggtggctggagtgaattaaagcctttgttttt

SEQ ID NO: 2776 - protein, 174 aa, Homo sapiens
MSRARSHLRAALFLAAASARGITTQVAARRGLSAWPVPQEPSMEYQDAVRMLNTLQTNAGYLEQVKRQRGDPQTQLEAMELYLARSGLQVEDLDRLNIIHVTGTKGKGSTCAFTECILRSYGLKTGFFRFGSGSASMGSPSVLSSSPSTSGASTTGWRRPRMAAVSPCPPTSAS

SEQ ID NO: 2777 - DNA, 2461 bp, Homo sapiens
tcacccggatggcggctgcgacgcgcggctgccggccctggggctcgctcctcgggctgctcgggctggtctcggccgcggccgccgcctgggacctggcttccctgcgctgcaccttgggcgccttttgcgaatgcgacttccggcccgacttgccgggtctggagtgtgacctggctcagcacctggccggccagcatctggccaaggcgctggtggtgaaggcgctgaaggcctttgtgcgggacccagcccccaccaagccgctggtcctctccctgcacggctggaccggcaccggcaaatcctatgtcagctccctgctggcgcactacctcttccagggcggcctccgcagcccccgcgtgcaccacttttctcccgtcctccacttcccccaccccagccacatcgagcgctacaagaaggatctgaagagctgggtccaagggaacctcactgcctgtggccgctccctcttcctcttcgatgagatggacaagatgcccccaggcctgatggaagtcctgcggcctttcctgggctcctcctgggtggtatacgggaccaattaccgcaaagccatcttcatcttcatcaggtggggcccggctttgcagtgggcacagtgggggggccacttctcagaggttcagctctacagccttagcctgtgctcccagcagaatccagttccccatgggcttagctgggctttcccagtgccctccgccactctcagagatgacattgtcattccgcctggttgatttccctttggacattctcagcaaattctgggctcagtctttttgatcgccacttctttgtggaagccctgccaggtcaagaagttttccctcttttgtggtgaggaggacacaggcctgggaaaaataggaacagagttcttgtcctttagtcccagctctcagaatcctcgctgtgtttcctcaggcagcatggctccgcctctctgagcctctgtctctgcttctgaacagcggggccaataatgatgccccgatgccttcctggaagttcagtgagggaaagtcagttgagggacacaaaagtgttttgtaaactataaagtacgtggcatgtgtaggtgaattacaggggccatggatgtggacaccatggagggggaagtggagcgttttcagtggagttggctcctccccgcactgagccatgttcctatgtcaggtggcagcggggaagcgagggtccaatcctgccctgcgctagtcctcatctgagtctcagcctgggtcccccatggttttagcaacacgggtggcaagcagatcaaccaggtggcattggaggcgtggcgcagccggcgggaccgcgaggagatcctcctgcaggagctggagccggtcatctcccgcgcggtgctggacaacccgcaccgtgagtctggctcagcagccccctcccgggcagcttcaccccacacccaggggccaggctctcccggggtctcatgctttgcccactgacccggcagttctgagcctggctttggcactcccagctttgtgactttgggtgagccttacagcccctgagtcctacacccagaaggcggctgagggaactgaggccagcatttttcctcctgcccctgggggtttggggccggcttctcccctcttgtgaagcacaaagtcccctccccacctacccttcctgcagatggcttctcaaactcgggcatcatggaagagcgcctcctagacgcagtggtgcccttcctcccgctccagcggcaccacgtccggcactgcgtgctcaacgagctggcccagctgggcctggagccaagggatgaggttgtccaggctgtgctggacagcaccaccttcttccctgaagacgagcagctcttctcctccaacggctgcaagaccgtggcctcccgaatcgccttcttcctctgactctctgagtggtgtcctcggcccccctgatggccaggccatgcaggaaaggccaggggcctctgtcacaggaacccagagcaccaagtgagatgaacggagtgtcggctaggccacgggacagatggccaggaagggccctggcctctaaactggctcgagagcatcttggccccggccaccttccccagggaaacccctggtcaccccagaacctcactgagccttgacctccccctgcagcctgagccttcttactgtgaattataactcagggactgtggctcgtggcggtgctccctcctcagtctgccacccttgccccttgcctccttggtcgggcaccatacctcctcccctccaccccacaccctgtgtccatatcaagccaggtggagccttctcagtttccagaaatggagggactcaagctgccacttgggcctggttttagatgtttttaattttgtaaaagaaaacaagtataataaactcagctgtgggaccag

SEQ ID NO: 2778 - DNA, 3817 bp, Homo sapiens
gcgccagcggcgtccgcctgagcagcgcgggcaacagcggcggcgtcggccggatcgggccgcgacacctcctggccatgggggacgtgctgtccacgcacctggacgacgcccggcgccagcacatcgcagaaaaaaccgggaagatcctgacggagttcctccagttctatgaagaccagtatggcgtggctctcttcaacagcatgcgccatgagattgagggcacggggctgccgcaggcccagctgctctggcgcaaggtgccactggacgagcgcatcgtcttctcggggaacctcttccagcaccaggaggacagcaagaagtggagaaaccgcttcagcctcgtgccccacaactacgggctggtgctctacgaaaacaaagcggcctatgagcggcaggtcccaccacgagccgtcatcaacagtgcaggctacaaaatcctcacgtccgtggaccaatacctggagctcattggcaactccttaccagggaccacggcaaagtcgggcagtgcccccatcctcaagtgccccacacagttcccgctcatcctctggcatccttatgcgcgtcactactacttctgcatgatgacagaagccgagcaggacaagtggcaggctgtgctgcaggactgcatccggcactgcaacaatggaatccctgaggactccaaggtagagggccctgcgttcacagatgccatccgcatgtaccgacagtccaaggagctgtacggcacctgggagatgctgtgtgggaacgaggtgcagatcctgagcaacctggtgatggaggagctgggccctgagctgaaggcagagctcggcccgcggctgaaggggaaaccgcaggagcggcagcggcagtggatccagatctcggacgccgtgtaccacatggtgtacgagcaggccaaggcgcgcttcgaggaggtgctgtccaaggtgcagcaggtgcagccggccatgcaggccgtcatccgaactgacatggaccaaattatcacctccaaggagcaccttgccagcaagatccgagccttcatcctccccaaggcagaggtgtgcgtgcggaaccatgtccagccctacatcccatccatcctggaggccctgatggtccccaccagccagggcttcactgaggtgcgagatgtcttcttcaaggaggtcacggacatgaacctgaacgtcatcaacgagggcggcattgacaagctgggcgagtacatggagaagctgtcccggctggcgtaccaccccctgaagatgcagagctgctatgagaagatggagtcgctgcgactggacgggctgcagcagcgatttgatgtgtccagcacgtccgtgttcaagcagcgagcccagatccacatgcgggagcaaatggacaatgccgtgtatacgttcgagaccctcctgcaccaggagctggggaaggggcccaccaaggaggagctgtgcaagtccatccagcgggtcctggagcgggtgctgaagaaatacgactacgacagcagctctgtgcggaagaggttcttccgggaggcgctgctgcagatcagcatcccgttcctgctcaagaagctggcccctacctgcaagtcggagctgccccggttccaggagctgatcttcgaggactttgccaggttcatcctggtggaaaacacgtacgaggaggtggtgctgcagaccgtcatgaaggacatcctgcaggctgtgaaggaggccgcggtgcagaggaagcacaacctctaccgggacagcatggtcatgcacaacagcgaccccaacctgcacctgctggccgagggcgcccccatcgactggggcgaggagtacagcaacagcggcgggggcggcagccccagccccagcaccccggagtcagccaccctctcggaaaagcgacggcgcgccaagcaggtggtctctgtggtccaggatgaggaggtggggctgccctttgaggctagccctgagtcaccaccacctgcgtccccggacggtgtcactgagatccgaggcctgctggcccaaggtctgcggcctgagagccccccaccagccggccccctgctcaacggggcccccgctggggagagtccccagcctaaggccgcccccgaggcctcctcgccgcctgcctcacccctccagcatctcctgcctggaaaggctgtggaccttgggccccccaagcccagcgaccaggagactggagagcaggtgtccagccccagcagccaccccgccctccacaccaccaccgaggacagtgcaggggtgcagactgagttctaggccagtgggtccctgactgctgcacatggcacaggccgttcccttccggacccaggcaggctcagctctggggagggcaccctggtctgtgccttgtgggtggaggcggggcagggctgtgtggcaccgccagggagcgggcccacctgagtcactttattgggttcagtcaacactttcttgctccctgttttctcttctgtgggatgatctcagatgcaggggctggttttggggttttcctgcttgtgccaagggctggacactgctggggggctggaaagcccctcccttcctgtccttctgtggcctccatcccctcatgggtgctgccatccttcctggagagagggaggtgaaagctggtgtgagcccagtgggttcccgcccactcacccaggagctggctgggccaggaccgggagagggagcactgctgccctcctggccctgctccttccgcagttaggggtggaccgagcctcgctttccccactgttctggagggaaggggaaggagggggtcttcaggctggagccaggctgggggtgctgggtggagagatgagatttagggggtgcctcatggggtgggcaggcctggggtgaaatgagaaaggcccagaacgtgcaggtctgcggaggggaagtgtcctgagtgaaggaggggacccccatcctgggggatgctgggagtgagtgagtgagatggctgagtgagggttatggggagcctgaggttttatgggcctgtgtatccccttctcccggccccagcctgcctccctcctgcccgcctggcccacaggtctccctctggtccctgtccctctggtggttggggatggagcggcagcaaggggtgtaatggggctgggttctgtcttctacaggccaccccgaggtcctcagtggttgcctggggagccggacggggctcctgaggggtacaggttgggtgggccctccctgagggtctggggtcaggctttggcctctgctgcctctcagtcaccaagtcacctccctctgaaaatccagtcccttctttggatgtccttgtgagtcactctgggcctggctgtcgtccctcctcagcttcttgttcctgggacaagggtcaagccaggatgggcccaggcctgggatcccccaccccaggacccccaggccccctcccctgctgctttgcggggggcagggcagaaatggactccttttgggtccccgaggtggggtcccctcccagccctgcatcctccgtgccctagacctgctccccagaggaggggccttgacccacaggacgtgtggtggcgcctggcactcagggacccccagctgccgcagccctggtctctggcgcatctcttccctcttgtcccgaagatctgcgcctctagtgccttttgaggggttcccatcatccctccctgatattgtattgaaaatattatgcacactgttcatgcttctactaatcaataaacgctttattt

SEQ ID NO: 2779 - protein, 746 aa, Homo sapiens
MGDVLSTHLDDARRQHIAEKTGKILTEFLQFYEDQYGVALFNSMRHEIEGTGLPQAQLLWRKVPLDERIVFSGNLFQHQEDSKKWRNRFSLVPHNYGLVLYENKAAYERQVPPRAVINSAGYKILTSVDQYLELIGNSLPGTTAKSGSAPILKCPTQFPLILWHPYARHYYFCMMTEAEQDKWQAVLQDCIRHCNNGIPEDSKVEGPAFTDAIRMYRQSKELYGTWEMLCGNEVQILSNLVMEELGPELKAELGPRLKGKPQERQRQWIQISDAVYHMVYEQAKARFEEVLSKVQQVQPAMQAVIRTDMDQIITSKEHLASKIRAFILPKAEVCVRNHVQPYIPSILEALMVPTSQGFTEVRDVFFKEVTDMNLNVINEGGIDKLGEYMEKLSRLAYHPLKMQSCYEKMESLRLDGLQQRFDVSSTSVFKQRAQIHMREQMDNAVYTFETLLHQELGKGPTKEELCKSIQRVLERVLKKYDYDSSSVRKRFFREALLQISIPFLLKKLAPTCKSELPRFQELIFEDFARFILVENTYEEVVLQTVMKDILQAVKEAAVQRKHNLYRDSMVMHNSDPNLHLLAEGAPIDWGEEYSNSGGGGSPSPSTPESATLSEKRRRAKQVVSVVQDEEVGLPFEASPESPPPASPDGVTEIRGLLAQGLRPESPPPAGPLLNGAPAGESPQPKAAPEASSPPASPLQHLLPGKAVDLGPPKPSDQETGEQVSSPSSHPALHTTTEDSAGVQTEF

SEQ ID NO: 2780 - DNA, 632 bp, Homo sapiens
ctctcggctttcggctcggaggaggccaaggtgcaacttccttcggtcgtcccgaatccgggttcatccgacaccagccgcctccaccatgccgccgaagttcgaccccaacgagatcaaagtcgtatacctgaggtgcaccggaggtgaagtcggtgccacttctgccctggcccccaagatcggccccctgggtctgtctccaaaaaaagttggtgatgacattgccaaggcaacgggtgactggaagggcctgaggattacagtgaaactgaccattcagaacagacaggcccagattgaggtggtgccttctgcctctgccctgatcatcaaagccctcaaggaaccaccaagagacagaaagaaacagaaaaacattaaacacagtgggaatatcacttttgatgagattgtcaacattgctcgacagatgcggcaccgatccttagccagagaactctctggaaccattaaagagatcctggggactgcccagtcagtgggctgtaatgttgatggccgccatcctcatgacatcatcgatgacatcaacagtggtgctgtggaatgcccagccagttaagcacaaaggaaaacatttcaataaaggatcatttgacaactggtga

SEQ ID NO: 2781 - protein, 165 aa, Homo sapiens [sequence omitted]

SEQ ID NO: 2782 - DNA, 1518 bp, Homo sapiens
aaccaccattttgcaaggaccatgaggccactgtgcgtgacatgctggtggctcggactgctggctgccatgggagctgttgcaggccaggaggacggttttgagggcactgaggagggctcgccaagagagttcatttacctaaacaggtacaagcgggcgggcgagtcccaggacaagtgcacctacaccttcattgtgccccagcagcgggtcacgggtgccatctgcgtcaactccaaggagcctgaggtgcttctggagaaccgagtgcataagcaggagctagagctgctcaacaatgagctgctcaagcagaagcggcagatcgagacactgcagcagctggtggaggtggacggcggcattgtgagcgaggtgaagctgctgcgcaaggagagccgcaacatgaactcgcgggtcacgcagctctacatgcagctcctgcacgagatcatccgcaagcgggacaacgcgttggagctctcccagctggagaacaggatcctgaaccagacagccgacatgctgcagctggccagcaagtacaaggacctggagcacaagtaccagcacctggccacactggcccacaaccaatcagagatcatcgcgcagcttgaggagcactgccagagggtgccctcggccaggcccgtcccccagccaccccccgctgccccgccccgggtctaccaaccacccacctacaaccgcatcatcaaccagatctctaccaacgagatccagagtgaccagaacctgaaggtgctgccaccccctctgcccactatgcccactctcaccagcctcccatcttccaccgacaagccgtcgggcccatggagagactgcctgcaggccctggaggatggccacgacaccagctccatctacctggtgaagccggagaacaccaaccgcctcatgcaggtgtggtgcgaccagagacacgaccccgggggctggaccgtcatccagagacgcctggatggctctgttaacttcttcaggaactgggagacgtacaagcaagggtttgggaacattgatggcgaatactggctgggcctggagaacatttactggctgacgaaccaaggcaactacaaactcctggtgaccatggaggactggtccggccgcaaagtctttgcagaatacgccagtttccgcctggaacctgagagcgagtattataagctgcggctggggcgctaccatggcaatgcgggtgactcctttacatggcacaacggcaagcagttcaccaccctggacagagatcatgatgtctacacaggaaactgtgcccactaccagaagggaggctggtggtataacgcctgtgcccactccaacctcaacggggtctggtaccgcgggggccattaccggagccgctaccaggacggagtctactgggctgagttccgaggaggctcttactcactcaagaaagtggtgatgatgatccgaccgaaccccaacaccttccactaagccagctccccctcc

SEQ ID NO: 2783 - protein, 493 aa, Homo sapiens
MRPLCVTCWWLGLLAAMGAVAGQEDGFEGTEEGSPREFIYLNRYKRAGESQDKCTYTFIVPQQRVTGAICVNSKEPEVLLENRVHKQELELLNNELLKQKRQIETLQQLVEVDGGIVSEVKLLRKESRNMNSRVTQLYMQLLHEIIRKRDNALELSQLENRILNQTADMLQLASKYKDLEHKYQHLATLAHNQSEIIAQLEEHCQRVPSARPVPQPPPAAPPRVYQPPTYNRIINQISTNEIQSDQNLKVLPPPLPTMPTLTSLPSSTDKPSGPWRDCLQALEDGHDTSSIYLVKPENTNRLMQVWCDQRHDPGGWTVIQRRLDGSVNFFRNWETYKQGFGNIDGEYWLGLENIYWLTNQGNYKLLVTMEDWSGRKVFAEYASFRLEPESEYYKLRLGRYHGNAGDSFTWHNGKQFTTLDRDHDVYTGNCAHYQKGGWWYNACAHSNLNGVWYRGGHYRSRYQDGVYWAEFRGGSYSLKKVVMMIRPNPNTFH

SEQ ID NO: 2784 - DNA, 4465 bp, Homo sapiens
caggatataattgatacagcatgtgaagtattggccgacccttctcttccggaactgttctggggaacagagccaacttctggccttgggatcattctggacagtgtgtgtggaatgtttccccaccttctctccccactcctgcaactgctccgagccctggtatcagggaagtccacagccaaaaaggtgtatagcttcttggataagatgtctttctacaatgaactttataaacacaagcctcatgatgtgatctcccatgaagatggaactctttggcggagacaaacacccaaactcctttatccccttgggggtcaaaccaaccttcgcatacctcaaggcactgtgggccaagtaatgttggatgatagggcatacctggtacgctgggaatactcctatagcagctggaccctctttacctgcgagattgaaatgttgcttcatgttgtttcaactgcagatgtgattcagcactgccagcgagtcaaacccatcattgatctcgtccataaggtcatcagtacagacctgtcgatagcagactgtctcctgcccatcacatctcgcatctacatgctgctgcagcggttaacgacagtgatctccccacctgtggatgtcattgcttcttgtgtcaactgcttaactgttttggctgcccgcaatccagcaaaggtctggactgatcttcgtcacacaggttttttaccatttgtggcccatcctgtctccagcctgagtcagatgattagtgcggaagggatgaatgctggagggtacggaaacctcttgatgaacagtgaacagcctcagggcgagtatggggttactattgcctttctgcgcttgatcaccacccttgtcaaggggcaacttggtagtacccagagccaaggacttgtaccctgtgtaatgtttgtgctgaaggagatgcttcccagctaccataagtggcgctacaactctcatggagtgagggaacagattggttgcctgatcttggagctgattcatgcgatactgaacctgtgccacgagacagacctgcacagcagtcatactcccagcctgcagtttctctgcatctgcagcctggcatacacagaagcaggacagacagttatcaatatcatgggcattggcgtggacaccattgacatggtgatggctgctcagcctcgaagtgatggggcagagggccaggggcagggccagctgctgatcaagacagtgaaactggcattctccgtcaccaacaatgttattcggctgaaacctccttctaatgtggtgtcccccctggaacaggctctctcacaacatggtgctcatggaaacaacctcattgctgttctagccaaatacatctaccacaaacatgaccctgctttgccacgtcttgccattcagctgctgaaacgtctggccacggtggccccaatgtcagtgtatgcttgtctgggcaatgatgcggctgccattcgtgatgccttcctgacccgattgcagagcaaaattgaggacatgcgcatcaaagtcatgattctagagttcctcactgttgcagtagagacccagccaggcctcatcgaactgtttctgaacctggaagttaaggatggcagtgatggctcaaaggaattcagccttgggatgtggagctgtctccatgcagtgctggagctgattgattcccaacagcaagatcgatactggtgcccacccctgctgcatcgtgccgccattgcctttttgcatgctctgtggcaggatcggagggacagtgccatgctggtcctccgaaccaaacccaagttttgggaaaatttaaccagtccgctgtttggaaccctttctcctccctctgaaacatcagagcccagcatcctggaaacctgtgccctaatcatgaagataatttgcttggagatatactatgtagtaaagggttcattagaccagtcattaaaggatacactgaagaaattttccatcgagaaacgctttgcctactggtcagggtatgtcaagtcattggcagttcacgtggccgaaacagaaggcagcagctgcacctccttgttagagtaccagatgctggtgtccgcctggaggatgcttctcatcattgccaccactcatgcagatataatgcacctgactgactctgtggtgcgtcgccagctctttcttgacgtgcttgatggaaccaaagcattactcctagttccagcctcagtgaactgccttcgccttggctccatgaagtgcactctgctgcttatcctcctccggcagtggaagagagagttaggttctgtggatgaaatccttggacccttgacggagatcctggagggagtgctgcaggccgaccagcaactcatggagaagaccaaggccaaggtgttctcagcattcatcacagtgttgcaaatgaaggagatgaaagtaagtgacatcccccagtactcccagctggtgctgaatgtctgtgagaccctccaagaggaagtgattgcactcttcgaccagacccgccacagtctggcattaggcagtgccacagaggacaaggacagcatggagactgacgactgttctcggtcccggcacagggaccagcgtgatggggtgtgtgtcctgggcctgcacctggccaaggagctgtgtgaggtagacgaggatggtgactcctggctgcaggtaacccgcaggctccccatcctacccaccctcctcaccactctagaggtgagccttcgcatgaagcagaacctgcatttcactgaggccacattgcatctgctcctcaccctggctcgcactcagcagggagccacagcagtggctggagctggcatcacccagagcatttgtttgccccttctgagtgtgtaccagctgagcaccaacggcacagcacagacacctagtgcctctcggaagtccctggatgccccctcttggccaggagtctaccgcctgtccatgtccctgatggagcagctgctcaaaactctgcgctacaacttcctgcctgaggccctggacttcgtgggtgtccaccaggagcggaccttacagtgcctcaacgcagtgaggacagtgcagagtctggcctgcctggaggaggcggaccacaccgtgggttttattctgcagctctctaacttcatgaaggagtggcacttccacctgcctcagctcatgcgtgatatccaggtcaacctgggttacttgtgccaggcatgtacctctctcctgcacagtcgaaagatgctgcagcattacttacagaacaaaaatggggatggcctcccctcagctgttgcccagcgagtccagaggccaccgtctgctgcttctgctgccccctcctcctcaaagcagcccgctgctgacacagaggcatcagagcagcaggccttgcacacagtccagtatggccttctcaagatcctcagcaagacgctggcagccctgcgccacttcaccccagatgtctgccagattctgctggatcagtccctggaccttgctgaatacaacttcctgtttgccctgagctttaccactcccacctttgactccgaagtggccccctccttcgggacccttctggccacagtgaatgtggccctcaacatgcttggagagctggacaagaaaaaggagcccctcacccaggcagtggggctcagcacacaggcagaagggaccaggacgttaaagtccctcctgatgtttaccatggaaaactgcttctacctgctcatctctcaggcgatgcggtaccttagggacccggctgtgcacccccgggacaaacagcggatgaagcaggagctcagctctgagttgagcacgctgctgtccagcctctcgcgctacttccgccggggagcccccagctcccctgccactggtgtcctcccctcgccgcagggcaagtccacctctctctccaaagccagccctgagagtcaggagcctctgatccagttggtgcaggcgtttgtccggcatatgcaaagatagggcagtgctgttctgcccacctacccctctccaccagcctacactgcaccctggctggcaggggtgctgctggctgctagggcctatacaatggagggcacctcctgtcacccccctcccggagtagccacgactccagccaccacccactgacgttatttttatactagatgaagaggtcaacagcaggcatggggagccgagtcttctgtgctcaggtcctcacgctgcagacgccccctagaggaactttccttcctttccagcattccccacagcactgccggccaggggagaggcggcagcccagcagagggctctatgcacgggtttcaaacctgttttccacactctgtctttgcagttttggtaattctgtggtctatttatacagatattaaaatcttgtttatag

SEQ ID NO: 2785 - protein, 1767 aa, Homo sapiens
MASGGGVRASGRAKMAAAAGGPCVRSSRELWTILLGRSALRELSQIEAELNKHWRRLLEGLSYYKPPSPSSAEKVKANKDVASPLKELGLRISKFLGLDEEQSVQLLQCYLQEDYRGTRDSVKTVLQDERQSQALILKIADYYYEERTCILRCVLHLLTYFQDERHPYRVEYADCVDKLEKELVSKYRQQFEELYKTEAPTWETHGNLMTERQVSRWFVQCLREQSMLLEIIFLYYAYFEMAPSDLLVLTKMFKEQGFGSRQTNRHLVDETMDPFVDRIGYFSALILVEGMDIESLHKCALDDRRELHQFAQDGLICQDMDCLMLTFGDIPHHAPVLLAWALLRHTLNPEETSSVVRKIGGTAIQLNVFQYLTRLLQSLASGGNDCTTSTACMCVYGLLSFVLTSLELHTLGNQQDIIDTACEVLADPSLPELFWGTEPTSGLGIILDSVCGMFPHLLSPLLQLLRALVSGKSTAKKVYSFLDKMSFYNELYKHKPHDVISHEDGTLWRRQTPKLLYPLGGQTNLRIPQGTVGQVMLDDRAYLVRWEYSYSSWTLFTCEIEMLLHVVSTADVIQHCQRVKPIIDLVHKVISTDLSIADCLLPITSRIYMLLQRLTTVISPPVDVIASCVNCLTVLAARNPAKVWTDLRHTGFLPFVAHPVSSLSQMISAEGMNAGGYGNLLMNSEQPQGEYGVTIAFLRLITTLVKGQLGSTQSQGLVPCVMFVLKEMLPSYHKWRYNSHGVREQIGCLILELIHAILNLCHETDLHSSHTPSLQFLCICSLAYTEAGQTVINIMGIGVDTIDMVMAAQPRSDGAEGQGQGQLLIKTVKLAFSVTNNVIRLKPPSNVVSPLEQALSQHGAHGNNLIAVLAKYIYHKHDPALPRLAIQLLKRLATVAPMSVYACLGNDAAAIRDAFLTRLQSKIEDMRIKVMILEFLTVAVETQPGLIELFLNLEVKDGSDGSKEFSLGMWSCLHAVLELIDSQQQDRYWCPPLLHRAAIAFLHALWQDRRDSAMLVLRTKPKFWENLTSPLFGTLSPPSETSEPSILETCALIMKIICLEIYYVVKGSLDQSLKDTLKKFSIEKRFAYWSGYVKSLAVHVAETEGSSCTSLLEYQMLVSAWRMLLIIATTHADIMHLTDSVVRRQLFLDVLDGTKALLLVPASVNCLRLGSMKCTLLLILLRQWKSILSRELGSVDEILGPLTEILEGVLQADQQLMEKTKAKVFSAFITVLQMKEMKVSDIPQYSQLVLNVCETLQEEVIALFDQTRHSLALGSATEDKDSMETDDCSRSRHRDQRDGVCVLGLHLAKELCEVDEDGDSWLQVTRRLPILPTLLTTLEVSLRMKQNLHFTEATLHLLLTLARTQQGATAVAGAGITQSICLPLLSVYQLSTNGTAQTPSASRKSLDAPSWPGVYRLSMSLMEQLLKTLRYNFLPEALDFVGVHQERTLQCLNAVRTVQSLACLEEADHTVGFILQLSNFMKEWHFHLPQLMRDIQVNLGYLCQACTSLLHSRKMLQHYLQNKNGDGLPSAVAQRVQRPPSAASAAPSSSKQPAADTEASEQQALHTVQYGLLKILSKTLAALRHFTPDVCQILLDQSLDLAEYNFLFALSFTTPTFDSEVAPSFGTLLATVNVALNMLGELDKKKEPLTQAVGLSTQAEGTRTLKSLLMFTMENCFYLLISQAMRYLRDPAVHPRDKQRMKQELSSELSTLLSSLSRYFRRGAPSSPATGVLPSPQGKSTSLSKASPESQEPLIQLVQAFVRHMQR

SEQ ID NO: 2786 - DNA, 1695 bp, Homo sapiens
aatttggccaggctgagaagactgagcttgatgcccactttgaaaaccttctggcccgggcagacagcaccaagaactggacagagaagatcttgaggcagacagaggtgctgctgcagcccaaccccagtgcccgagtggaggagttcctgtatgagaagctggacaggaaggtcccctcaagggtcaccaacggggagctgctggctcagtacatggcagacgcggccagtgagctggggccgaccaccccctatgggaagacactgatcaaggtggcagaagctgaaaagcaactgggagccgcggagagggattttatccacacggcctccatcagcttcctcacacccttgcgcaacttcctggagggggactggaagaccatctcgaaggagaggcggctcctccaaaaccggcgtctggacttggatgcctgcaaagcgaggctgaagaaggccaaggctgcagaagccaaagccacgtgtgagggagatacggtgcctgactttcaggagactagacctcgtaattacattctctcggccagcgcctccgcgctctggaatgatgaagtggacaaggccgagcaggagctccgcgtggcccagacagagtttgaccggcaagcagaagtgacccgtctcttgctggagggaatcagtagcactcacgtgaaccacctgcgctgcctccacgagttcgtcaagtctcagacaacctactacgcacagtgctaccgccacatgctggacttgcagaagcagctgggcagctcccagggtgccatatttcccggcaccttcgtgggcaccacagagcccgcctccccacccctgagcagcacctcacccaccactgctgcggccactatgcctgtggtgccctctgtggccagcctggcccctccgggggaggcctcgctctgcctggaagaggtggccccccctgccagtgggacccgcaaagctcgggtgctctatgactacgaggcagccgacagcagtgagctggccctgctggctgatgagctcatcactgtctacagcctgcctggcatggaccctgactggctcattggcgagagaggcaacaagaagggcaaggtccctgtcacctacttggaactgctcagctaggcaggtgcccccatcccccccgcattctggcctaggcaggagaggatgggcgcagccctgccacttaacttgtttgttggtgacacagttgttcagagtggggagaattcaccccattctgtccctgcccctagtcacctagctgtgagggtgcctgaggctgaatggctccacccctcccccagccctgcttctgacctgtggctctggagcccctgcccctgcctgcatccccgagcaccccaccctccaggctccactaaggagggaggggctgtctgcagcagctgcactcagcacctaggccagggtggggccgccgcagatgggctcaggaagccccaggtgcactcagcgagagccctgcctttcagttgccaaaagctgcatcaggggaatgcggcaaggcacacagggctctggcagcccctggggactgggcgctgcccctgggaggggagagcctggccagggctggtgttgggcccggagcagcatcttccggtgctatcctcccctcccacccctcacagctcaagccaagtccagcggccgc

SEQ ID NO: 2787 - DNA, 2840 bp, Homo sapiens
atgcgccccgcgcgccccgcactgacatggccgtcgcccggttccgcgcgtccgccgcgcgccggccgttaataggcttgctccctgagcgccccgcaccgacatggcggccgtcttcgctgtggtgactttaactctcggttttcggttatagccggccggcgctcacttgtcttcaggaagctcggagcctttggtggagccggggagaggaagggtgggtgcaagagtgaaaggcgagaggggactgcaagcatccgggtcggctcctggccggagcaagatggctgagggcgagcggcagccgccgccagattcttcagaggaggcccctccagccactcagaacttcatcattccaaaaaaggagatccacacagttccagacatgggcaaatggaagcgttctcaggcatacgctgactacatcggattcatccttaccctcaacgaaggtgtgaaggggaagaagctgaccttcgagtacagagtctccgagatgtggaatgaggttcatgaggaaaaggagcaggctgcaaagcagagtgtgtcctgcgatgaatgcataccattaccccgcgccgggcactgtgcaccttcggaggccattgagaaactagtcgctcttctcaacacgctggacaggtggattgatgagactcctccagtggaccagccctctcggtttgggaataaggcatacaggacctggtatgccaaacttgatgaggaagcagaaaacttggtggccacagtggtccctacccatctggcagctgctgtgcctgaggtggctgtttacctaaaggagtcagtggggaactccacgcgcattgactacggcacagggcatgaggcagccttcgctgctttcctctgctgtctctgcaagattggggtgctccgggtggatgaccaaatagctattgtcttcaaggtgttcaatcggtaccttgaggttatgcggaaactccagaaaacatacaggatggagccagccggcagccagggagtgtggggtctggatgacttccagtttctgcccttcatctggggcagttcgcagctgatagaccacccatacctggagcccagacactttgtggatgagaaggccgtgaatgagaaccacaaggactacatgttcctggagtgtatcctgtttattaccgagatgaagactggcccatttgcagagcactccaaccagctgtggaacatcagcgccgtcccttcctggtccaaagtgaaccagggtctcatccgcatgtataaggccgagtgcctggagaagttccctgtgatccagcacttcaagttcgggagcctgctgcccatccatcctgtcacgtcgggctaggaggggccaagccgaagagccacccaggccacagttcctgtgcctgccttccccaccccagcagtggcccctccccatcccctccctctgttcgtcccgtttgatgagaggctgtttactggggtggggtggcgagatgggcttgagggggctcagagcataaggcttcagggcccaagttgggagaagtgaccaaagtgtagccagttttctgagttcccgtgtgctagactggccagaagagagggtctggggcctggtcactcggccactctctcctgtttctggcctcttctcccttcactcccgtccagtctggttttgagagcaggggctgttctgcagcaccgcagggaagggaggagagatacctgctgcttccattgcttttcccttcctggagtcgatgcctttctaagggttggagctgctccttgcaggggcgggtcagtttcccaggccatgccggggtggccatctatggtagggctggaagctgaggctggccgccagctgtgggctggggtggggtgggtggggtcgggtggtggagaggccttagctgtcctggctggtgcccctcccaggctccttttcaccctgccccctgggcctgaggccccctgtgtccaagcctccccctggctcttcagttctctagcccttggctctgctgggtttcctgactgtagccacatctctcccgctccctaagggtaacctagccaatggaagctgccctttgggtaggtgctgggctcctgggagggcccagatgatggggtgaggcatgtctttccagaactttccctggcagggaggggatggcagaaactcagggaggggcttggggcccattgtatctggagagcctggattcctcttggcagtcttaggcccggccacttctgctacctttgcgctgctgtgagcctcaccctgggcccctgggccctgcttctctgctcccctgggtgatgggtgggcccagaaggtggcagtcccacaccttgtcctcccacctccctgaactgtccattgcttttatagggtgaggtaagagacagcctcccaagcccaggctttggcactcagaatgggcccagtgggggctgggcaggcccattgagggccaccgccgaggtttctcctagggctgttcctgggcctggctcttacaggctcgtcccccaggcctgcccttctccactgccccctcctgtgtctgggtccacacacccttcaggaagggggagcactgagaagcacagcacaggggctcagcctgggatccggtgatggtctgggcagaggctgggtcaggagtcccaaaggtcagtgacagtttctcagaagaggcccagcgtccacctctctcccagggccagacagcccttcctggctcccccatccccctatgggctcccagccccttgcaccctcattgctgttcagattaaagcctctgttttgcacctgt

SEQ ID NO: 2788 - protein, 408 aa, Homo sapiens
MSSKLLEPAGAHLSSGSSEPLVEPGRGRVGARVKGERGLQASGSAPGRSKMAEGERQPPPDSSEEAPPATQNFIIPKKEIHTVPDMGKWKRSQAYADYIGFILTLNEGVKGKKLTFEYRVSEMWNEVHEEKEQAAKQSVSCDECIPLPRAGHCAPSEAIEKLVALLNTLDRWIDETPPVDQPSRFGNKAYRTWYAKLDEEAENLVATVVPTHLAAAVPEVAVYLKESVGNSTRIDYGTGHEAAFAAFLCCLCKIGVLRVDDQIAIVFKVFNRYLEVMRKLQKTYRMEPAGSQGVWGLDDFQFLPFIWGSSQLIDHPYLEPRHFVDEKAVNENHKDYMFLECILFITEMKTGPFAEHSNQLWNISAVPSWSKVNQGLIRMYKAECLEKFPVIQHFKFGSLLPIHPVTSG

SEQ ID NO: 2789 - DNA, 315 bp, Homo sapiens
atggagtgcgccctggacgcccagagcctgatcagcatctccctgcgcaagatccacagctcccgaacccagcgcggcggcatcaagctgcacaagaacctcctgcgcgcccgcttcgaggacttctgcccggactcgtccccggacgcgtccaacatctcaaacttgatctccatctttggctccggcttctcggggctggtgagccgacagccggactcctcggagcagccgccgccgctcaacgggcagctgtgcgccaagcaggcgctcgccagcctcggcgcctggactcgagccattgtcgccttctag

SEQ ID NO: 2790 - DNA, 3925 bp, Homo sapiens
acagcacagacagattgacctattggggtgtttcgcgagtgtgagagggaagcgccgcggcctgtatttctagacctgcccttcgcctggttcgtggcgccttgtgaccccgggcccctgccgcctgcaagtcggaaattgcgctgtgctcctgtgctacggcctgtggctggactgcctgctgctgcccaactggctggcaagatgaagctctccctggtggccgcgatgctgctgctgctcagcgcggcgcgggccgaggaggaggacaagaaggaggacgtgggcacggtggtcggcatcgacctggggaccacctactcctgcgtcggcgtgttcaagaacggccgcgtggagatcatcgccaacgatcagggcaaccgcatcacgccgtcctatgtcgccttcactcctgaaggggaacgtctgattggcgatgccgccaagaaccagctcacctccaaccccgagaacacggtctttgacgccaagcggctcatcggccgcacgtggaatgacccgtctgtgcagcaggacatcaagttcttgccgttcaaggtggttgaaaagaaaactaaaccatacattcaagttgatattggaggtgggcaaacaaagacatttgctcctgaagaaatttctgccatggttctcactaaaatgaaagaaaccgctgaggcttatttgggaaagaaggttacccatgcagttgttactgtaccagcctattttaatgatgcccaacgccaagcaaccaaagacgctggaactattgctggcctaaatgttatgaggatcatcaacgagcctacggcagctgctattgcttatggcctggataagagggagggggagaagaacatcctggtgtttgacctgggtggcggaaccttcgatgtgtctcttctcaccattgacaatggtgtcttcgaagttgtggccactaatggagatactcatctgggtggagaagactttgaccagcgtgtcatggaacacttcatcaaactgtacaaaaagaagacgggcaaagatgtcaggaaagacaatagagctgtgcagaaactccggcgcgaggtagaaaaggccaaacgggccctgtcttctcagcatcaagcaagaattgaaattgagtccttctatgaaggagaagacttttctgagaccctgactcgggccaaatttgaagagctcaacatggatctgttccggtctactatgaagcccgtccagaaagtgttggaagattctgatttgaagaagtctgatattgatgaaattgttcttgttggtggctcgactcgaattccaaagattcagcaactggttaaagagttcttcaatggcaaggaaccatcccgtggcataaacccagatgaagctgtagcgtatggtgctgctgtccaggctggtgtgctctctggtgatcaagatacaggtgacctggtactgcttgatgtatgtccccttacacttggtattgaaactgtgggaggtgtcatgaccaaactgattccaaggaacacagtggtgcctaccaagaagtctcagatcttttctacagcttctgataatcaaccaactgttacaatcaaggtctatgaaggtgaaagacccctgacaaaagacaatcatcttctgggtacatttgatctgactggaattcctcctgctcctcgtggggtcccacagattgaagtcacctttgagatagatgtgaatggtattcttcgagtgacagctgaagacaagggtacagggaacaaaaataagatcacaatcaccaatgaccagaatcgcctgacacctgaagaaatcgaaaggatggttaatgatgctgagaagtttgctgaggaagacaaaaagctcaaggagcgcattgatactagaaatgagttggaaagctatgcctattctctaaagaatcagattggagataaagaaaagctgggaggtaaactttcctctgaagataaggagaccatggaaaaagctgtagaagaaaagattgaatggctggaaagccaccaagatgctgacattgaagacttcaaagctaagaagaaggaactggaagaaattgttcaaccaattatcagcaaactctatggaagtgcaggccctcccccaactggtgaagaggatacagcagaaaaagatgagttgtagacactgatctgctagtgctgtaatattgtaaatactggactcaggaacttttgttaggaaaaaattgaaagaacttaagtctcgaatgtaattggaatcttcacctcagagtggagttgaaactgctatagcctaagcggctgtttactgcttttcattagcagttgctcacatgtctttgggtgggggggagaagaagaattggccatcttaaaaagcaggtaaaaaacctgggttagggtgtgtgttcaccttcaaaatgttctatttaacaactgggtcatgtgcatctggtgtaggaagttttttctaccataagtgacaccaataaatgtttgttatttacactggtctaatgtttgtgagaagcttctaattagatcaattacttattttaggaaatttaagactagatactcgtgtgtggggtgaggggagggagtatttggtatgttgggataaggaaacacttctatttaatgcttccagggattttttttttttttttttaaccctcctgggcccaagtgatccttccacctcagtctcccagctaattgagaccacaggcttgttaccaccatgctcggcttttgcattaatctaagaaaaggggagagaagttaatccacatctttactcaggcaaggggcatttcacagtgcccaagagtggggttttcttgaacatacttggtttcctatttccccttatctttctaaaactgcctttctggtggctttttttaaaattattactaatgatgcttttatagctgcttggattctctgagaaatgatggggagtgagtgatcactggtattaactttatacacttggatttcatttgtaactttaggatgtaaaggtatattgtgaaccctagctgtgtcagaatctccatccctgaaatttctcattagtggtactggggtgggatcttggatggtgacattgaaactacactaaatcccctcactatgaatgggttgttaaaggcaatggtttgtgtcaaaactggtttaggattacttagattgtgttcctgaagaaaagagtccaggtaaatggtatgatcaataaaggacaggctggtgctaacataaaatccaatattgtaatcctagcactttgggaggccaaggcgggtggatcacaaggtcaagagatagagaccatctttgccaacatggtgaaactccatctctactgaaaatacaaaaattagctgggcgtggtagtgcaagctgaaggctgaggcaggagaatcactcgaacccgggaggcagaggttgcagtgagccgagatcacaccactgtactccagcccggcactccagcctggcgacaagagtgagactccacctcaaaaaaaaaaaaaagaatccaatactgcccaaggataggtattttatagatgggcaactggctgaaaggttaattctctagggctagtagaactggatcccaacaccaaactcttaattagacctaggcctcagctgcactgcccgaaaagcatttgggcagaccctgagcagaatactggtctcaggccaagcccaatacagccattaaagatgacctacagtgctgtgtaccctggggcaatagggttaaatggtagttagcaactagggctagtcttcccttacctcaaaggctctcactaccgtggaccacctagtctgtaactctttctgaggagctgttactgaatattaaaaagatagacttcaaaaaaaaaaaaaaaaaa

SEQ ID NO: 2791 - protein, 654 aa, Homo sapiens
MKLSLVAAMLLLLSAARAEEEDKKEDVGTVVGIDLGTTYSCVGVFKNGRVEIIANDQGNRITPSYVAFTPEGERLIGDAAKNQLTSNPENTVFDAKRLIGRTWNDPSVQQDIKFLPFKVVEKKTKPYIQVDIGGGQTKTFAPEEISAMVLTKMKETAEAYLGKKVTHAVVTVPAYFNDAQRQATKDAGTIAGLNVMRIINEPTAAAIAYGLDKREGEKNILVFDLGGGTFDVSLLTIDNGVFEVVATNGDTHLGGEDFDQRVMEHFIKLYKKKTGKDVRKDNRAVQKLRREVEKAKRALSSQHQARIEIESFYEGEDFSETLTRAKFEELNMDLFRSTMKPVQKVLEDSDLKKSDIDEIVLVGGSTRIPKIQQLVKEFFNGKEPSRGINPDEAVAYGAAVQAGVLSGDQDTGDLVLLDVCPLTLGIETVGGVMTKLIPRNTVVPTKKSQIFSTASDNQPTVTIKVYEGERPLTKDNHLLGTFDLTGIPPAPRGVPQIEVTFEIDVNGILRVTAEDKGTGNKNKITITNDQNRLTPEEIERMVNDAEKFAEEDKKLKERIDTRNELESYAYSLKNQIGDKEKLGGKLSSEDKETMEKAVEEKIEWLESHQDADIEDFKAKKKELEEIVQPIISKLYGSAGPPPTGEEDTAEKDEL

SEQ ID NO: 2792 - DNA, 1297 bp, Homo sapiens
cctaagtcgccgcagaactgccacgtggggatgagatttgctgggctggtagcggcggctgctgcggggaggtcccgcccacgtgaagccagcctaactgagctctggactttggggacagctgtcagtggcctaggccgcaggacaccatgaagcaactgccagtcttggaacctggagacaagcccaggaaagcaacatggtacaccttgactgtccctggagacagcccctgtgctcgagttggccacagctgttcatatttacccccagttggtaatgccaagagagggaaggtcttcattgttgggggagcaaatccaaacagaagcttctcagacgtgcacaccatggatctgggaaaacaccagtgggacttagatacctgcaagggcctcttgccccggtatgaacatgctagcttcattccctcctgcacacctgaccgtatttgggtatttggaggtgccaaccaatcaggaaatcgaaattgtctacaagtcctgaatcctgaaaccaggacgtggaccacgccagaagtgaccagccccccaccatccccaagaacattccacacatcatcggcagccattggaaaccagctatatgtctttgggggtggagagagaggtgcccagcccgtgcaggacacgaagctgcatgtgtttgacgcaaacactctgacctggtcacagccagagacacttggaaatcctccatctccccggcatggtcatgtgatggtggcagcagggacaaagctcttcatccacggaggcttggcgggggacagattctatgatgacctccactgcattgatataagtgacatgaaatggcagaagctaaatcccactggggctgctccagcaggctgtgctgcccactcagctgtggccatgggaaaacatgtgtacatctttggtggaatgactcctgcaggagcactggacacaatgtaccagtatcacacagaagagcagcattggaccttgcttaaatttgatactcttctaccccctggacgattggaccattccatgtgtatcattccatggccagtgacgtgtgcttctgagaaagaagattccaactctctcactctgaaccatgaagctgagaaagaggattcagttgacaaagtaatgagccacagtggtgactcacatgaggaaagccagactgctacactgctctgtttggtgtttggtgggatgaatacagaaggggaaatctatgacgattgtattgtgactgtagtggactaataaaacccacatttttattaaaaaaaaaa

SEQ ID NO: 2793 - protein, 372 aa, Homo sapiens
MKQLPVLEPGDKPRKATWYTLTVPGDSPCARVGHSCSYLPPVGNAKRGKVFIVGGANPNRSFSDVHTMDLGKHQWDLDTCKGLLPRYEHASFIPSCTPDRIWVFGGANQSGNRNCLQVLNPETRTWTTPEVTSPPPSPRTFHTSSAAIGNQLYVFGGGERGAQPVQDTKLHVFDANTLTWSQPETLGNPPSPRHGHVMVAAGTKLFIHGGLAGDRFYDDLHCIDISDMKWQKLNPTGAAPAGCAAHSAVAMGKHVYIFGGMTPAGALDTMYQYHTEEQHWTLLKFDTLLPPGRLDHSMCIIPWPVTCASEKEDSNSLTLNHEAEKEDSVDKVMSHSGDSHEESQTATLLCLVFGGMNTEGEIYDDCIVTVVD

SEQ ID NO: 2794 - DNA, 455 bp, Homo sapiens
cttcctctttccctcggagcgggcggcggcgttggcggcttgtgcagcaatggccaagatcaaggctcgagatcttcgcgggaagaagaaggaggagctgctgaaacagctggacgacctgaaggtggagctgtcccagctgcgcgtcgccaaagtgacaggcggtgcggcctccaagctctctaagatccgagtcgtccggaaatccattgcccgtgttctcacagttattaaccagactcagaaagaaaacctcaggaaattctacaagggcaagaagtacaagcccctggacctgcggcctaagaagacacgtgccatgcgccgccggctcaacaagcacgaggagaacctgaagaccaagaagcagcagcggaaggagcggctgtacccgctgcggaagtacgcggtcaaggcctgaggggcgcattgtcaataaagcacagctggctgag

SEQ ID NO: 2795 - protein, 123 aa, Homo sapiens [sequence omitted]

SEQ ID NO: 2796 - DNA, 2602 bp, Homo sapiens
gccgtgtcgccaccatggctccgcaccgccccgcgcccgcgctgctttgcgcgctgtccctggcgctgtgcgcgctgtcgctgcccgtccgcgcggccactgcgtcgcggggggcgtcccaggcgggggcgccccaggggcgggtgcccgaggcgcggcccaacagcatggtggtggaacaccccgagttcctcaaggcagggaaggagcctggcctgcagatctggcgtgtggagaagttcgatctggtgcccgtgcccaccaacctttatggagacttcttcacgggcgacgcctacgtcatcctgaagacagtgcagctgaggaacggaaatctgcagtatgacctccactactggctgggcaatgagtgcagccaggatgagagcggggcggccgccatctttaccgtgcagctggatgactacctgaacggccgggccgtgcagcaccgtgaggtccagggcttcgagtcggccaccttcctaggctacttcaagtctggcctgaagtacaagaaaggaggtgtggcatcaggattcaagcacgtggtacccaacgaggtggtggtgcagagactcttccaggtcaaagggcggcgtgtggtccgtgccaccgaggtacctgtgtcctgggagagcttcaacaatggcgactgcttcatcctggacctgggcaacaacatccaccagtggtgtggttccaacagcaatcggtatgaaagactgaaggccacacaggtgtccaagggcatccgggacaacgagcggagtggccgggcccgagtgcacgtgtctgaggagggcactgagcccgaggcgatgctccaggtgctgggccccaagccggctctgcctgcaggtaccgaggacaccgccaaggaggatgcggccaaccgcaagctggccaagctctacaaggtctccaatggtgcagggaccatgtccgtctccctcgtggctgatgagaaccccttcgcccagggggccctgaagtcagaggactgcttcatcctggaccacggcaaagatgggaaaatctttgtctggaaaggcaagcaggcaaacacggaggagaggaaggctgccctcaaaacagcctctgacttcatcaccaagatggactaccccaagcagactcaggtctcggtccttcctgagggcggtgagaccccactgttcaagcagttcttcaagaactggcgggacccagaccagacagatggcctgggcttgtcctacctttccagccatatcgccaacgtggagcgggtgcccttcgacgccgccaccctgcacacctccactgccatggccgcccagcacggcatggatgacgatggcacaggccagaaacagatctggagaatcgaaggttccaacaaggtgcccgtggaccctgccacatatggacagttctatggaggcgacagctacatcattctgtacaactaccgccatggtggccgccaggggcagataatctataactggcagggtgcccagtctacccaggatgaggtcgctgcatctgccatcctgactgctcagctggatgaggagctgggaggtacccctgtccagagccgtgtggtccaaggcaaggagcccgcccacctcatgagcctgtttggtgggaagcccatgatcatctacaagggcggcacctcccgcgagggcgggcagacagcccctgccagcacccgcctcttccaggtccgcgccaacagcgctggagccacccgggctgttgaggtattgcctaaggctggtgcactgaactccaacgatgcctttgttctgaaaaccccctcagccgcctacctgtgggtgggtacaggagccagcgaggcagagaagacgggggcccaggagctgctcagggtgctgcgggcccaacctgtgcaggtggcagaaggcagcgagccagatggcttctgggaggccctgggcgggaaggctgcctaccgcacatccccacggctgaaggacaagaagatggatgcccatcctcctcgcctctttgcctgctccaacaagattggacgttttgtgatcgaagaggttcctggtgagctcatgcaggaagacctggcaacggatgacgtcatgcttctggacacctgggaccaggtctttgtctgggttggaaaggattctcaagaagaagaaaagacagaagccttgacttctgctaagcggtacatcgagacggacccagccaatcgggatcggcggacgcccatcaccgtggtgaagcaaggctttgagcctccctcctttgtgggctggttccttggctgggatgatgattactggtctgtggaccccttggacagggccatggctgagctggctgcctgaggaggggcagggcccacccatgtcaccggtcagtgccttttggaactgtccttccctcaaagaggccttagagcgagcagagcagctctgctatgagtgtgtgtgtgtgtgtgtgttgtttcttttttttttttttacagtatccaaaaatagccctgcaaaaattcagagtccttgcaaaattgtctaaaatgtcagtgtttgggaaattaaatccaataaaaacattttgaagtgtg

SEQ ID NO: 2797 - protein, 782 aa, Homo sapiens
MAPHRPAPALLCALSLALCALSLPVRAATASRGASQAGAPQGRVPEARPNSMVVEHPEFLKAGKEPGLQIWRVEKFDLVPVPTNLYGDFFTGDAYVILKTVQLRNGNLQYDLHYWLGNECSQDESGAAAIFTVQLDDYLNGRAVQHREVQGFESATFLGYFKSGLKYKKGGVASGFKHVVPNEVVVQRLFQVKGRRVVRATEVPVSWESFNNGDCFILDLGNNIHQWCGSNSNRYERLKATQVSKGIRDNERSGRARVHVSEEGTEPEAMLQVLGPKPALPAGTEDTAKEDAANRKLAKLYKVSNGAGTMSVSLVADENPFAQGALKSEDCFILDHGKDGKIFVWKGKQANTEERKAALKTASDFITKMDYPKQTQVSVLPEGGETPLFKQFFKNWRDPDQTDGLGLSYLSSHIANVERVPFDAATLHTSTAMAAQHGMDDDGTGQKQIWRIEGSNKVPVDPATYGQFYGGDSYIILYNYRHGGRQGQIIYNWQGAQSTQDEVAASAILTAQLDEELGGTPVQSRVVQGKEPAHLMSLFGGKPMIIYKGGTSREGGQTAPASTRLFQVRANSAGATRAVEVLPKAGALNSNDAFVLKTPSAAYLWVGTGASEAEKTGAQELLRVLRAQPVQVAEGSEPDGFWEALGGKAAYRTSPRLKDKKMDAHPPRLFACSNKIGRFVIEEVPGELMQEDLATDDVMLLDTWDQVFVWVGKDSQEEEKTEALTSAKRYIETDPANRDRRTPITVVKQGFEPPSFVGWFLGWDDDYWSVDPLDRAMAELAA

SEQ ID NO: 2798 - DNA, 4763 bp, Homo sapiens
gtttagtatttttgagaacccagccacctggccatgctgtaccagccttgtgctgagtgctggggataaaggaacaaataaaacccagtccaggcttctgtgtgcccagccctgtgccgggtcccagtgggtaacagcatgtccaatcccctcagtgtcccactagaggcttcctttggggctgctggggacatcttgtttctagttgagaattcagatttatgtccaaagacaagaactccctgaggggcagattacaacatggactgggccattacaatcaacaaggacacaaagctaacacagccatcgttatacaccagacatgtgctaaggacttgatttccccattgtttaatcatcaccaactccattatcacccccatttcacagatgtggaaactgaggctgagaagagtaagggacttgtccaagggcacagagcaagtcagggctacggtgatgtttcaggcccagacctgtttgcctctggagcccagggtttaacacaccccagtgctgctgtgaaagggctctggacagctcaggctggccggccaattcggggataaccgaacagaggtatggaacagaaaggggcgttgaggatgttgctgtgtgtgtgcggtggggggagtgacaaggcttcagcaatggtactcattctctccaaccagctcccagtgctgctgtcctctgatccaccctccgctctgcctgccatggactaattgttctgaaatcccatggatcaagtcactcctcagctgaggacctgtccatggctccctggtacccagaggatagaaacccagcattcaaaacctctctaaccagctccccacctcaaccctcacactcctgctcactagcccccaggcgcagtgggctcttccagcggccaagcctgtgcctacggtgccttcttgcctggaatgcccaactcccccttctcagccttctttgactctcaagtaaggaaaagcactctttgtctccctgagccccttggcacttatcacagagcactctgggcgttaacttccactgtctccgtcttggattagagtggatctcagagggcccggtggtgtctgcttcacctccctctccactgcagcagcttagcaaggactggccgggtaaactaaaaaatgcaaagagctgagagaatcctgggaaagtgcacatttcccaggactgcccaatgacaagccccgtaccaaggcacagcatcaggataccctgatgtggaagaaccaaaaattgcaccctcatggcttatcaggatggtccttgtgtctgtccctttcaagggttctgataatgaaatctgggcaagtcaccctcctgctttaaaacttccaatggttcccagaggtctagcataaaatccaaactcaagggcccacataacctaggtgctgcctggcccccaggccctcctcttgccacgcccccctccctggccagcctccctcacttctttcagttcctcaaggactccccctcactaaagccttacccaggtcgcctctctgcctagggggctcctccattccctgctcactcagccacctccctctccctcttcaggtctcactttttaggggaggcttccctgatctgtccagataagacctcaccactcccacccaatcccaaacgctcccataacctgatcgtttccttcacagcaagaattaatcttcagtgtaaataatgatctactgaagacctatgaggaatgggaaagtcttgttttttgctgattcttcaacacccagctcagagcctaaatatctctcaaatgaatgaatatatgaatgaatgaatgaatgaatgaatgaatgaatgaacctatatacataaatcaagacaagaaggtgggcagaatcctagggaacactgaggcaggaaaagcagggccctgggccaggcgtcatggctcacacctgtaatcccagcactttgggaggccaaggcaggcagatcacttgaggtcaggactttgagaccagcctggccaacatggtaaaaccctgtctctactaaaaacacaaacattagccgggtatggtggcacatgcctgtagtcccagctactcaagaggctgaggcaggagaatcacttgtacctgggaggaggaggttgcagtgagctgagatcgtgccactgcactccagcctgggcaccacagcaagactccgtctaaaaaaaaaaaaaaagaaaaagaaagaaagaaagaaaaagaaaaccagggccctaactaaaaaagacaggaggaaaaacagggccctaactaaaaagagaggaggggccctaactgaaaaaaccagggccctaactaaaaaagtcaggaggaaaaacagggccctaactaaaaagagaagaggaaataaaccagacagtgcagcctcccagaagcaaaaggagggagtttctggaactgcactagagactggcacatggagtcctgaggaaagagcactggattggacatcgaggaggtcactggggcctccctgattgaaccaaggttccgtggaggtgggcacagggctggtacattgcagggggcagaggagtaaagagggatgaataagcaaagctctcaggcgacggttgctcagctgggtctatgccagcctggccctgcagggtctgcggaagacagggcccctgtgtcatagtcaccaaaagcatcaacagagcataacattctttttgttgacagattacattgaggcaacttggcttttggagttatcagggctcagtctcaaaggcagatgcatcagagccaagacccggccctcaagtcctcctattagggcagcactagggctacctctttgtcagcagaacctttggatagccgctgatggggtgagtcagctttctgggcccggcagaccttttgggaatccctggcttttggggcacaacatcctggggaccaccaaaaagccctttcacctgagctttgggaaagaggaacagctccggctgtgggtggctcatgtcaccatctggaagccagctgggccacagcagacgcgtaagtcctgtattcattcatccccttctccttttggcagaaaagggatggcgtgggttggaggggtgttttcctgggttcttgcacaattgctcattagaaattcacttctgtttgggtgttggaagctgggcgattccccctagtagtgatccttcctgtctcactggtcacaaagccctttggcatctacaagctcgttgggtccacacagcagctttgttaggtgggtagggggagaccaaggcacccatcctacaggtggagaaaccgaggctgaagctgggaggtgagccagtctcctggcttccagcccaggactctgcactcctccccccacctccccacctacttcagcaggtcacctgtgaatctgatagtcaggtgggccccaccctgccagctggccccagcgggcatgactcatccgcttccccatgactcacacacctcaggtgctcctcctctggtcaacaagtccagagacttggcaaatggacccccatttttctcacctctccaaagcctctgggaagaattcctgcacctcctctttatggggactctgctcttctacagaatagcaaccaaggccttgagagggaaagcaactctcctaaagtcacatagcaagcaaccagcacagccagggtgggagccaggcatccgggcaccgagcccagtcccggcctcctccctacaagatcactctcgcctgacctccctctcaaggacaggaaaggagcagagacgcactctgagccttattaggaagacctcagggactcccactgaatccactgtggctacagcggctgcttccaccactgaagtcccctccaggcttccctgggcagccagggcggggtttaagaggacgacaggtgtctgtattgctctacctacctaacaaggctgtgcagggtgaagagtgctgctccgtgggaaggcgctgggaccaaggccgaagcactggacaaagagagctatgagcactacctgtaaacaaagggcacagaatgtcagcctcagggggagttcaaggtcatctggtcaaatccccatttgatgtttcaacccctttcctcccctccaccaggggtcacacaatcagtacttgcacacatccagcaacaccgcactcactacctgccaaggctgcaagacctgctgctggagggtttggctgcgtaaaagaattgtcctaaggatgcactaaaatctctctcttcttatgccttgtacctgctggtattagctctgcctccttttgggtcagccagaacaggtctgtccccctctttcctgatggctctttggagatttgaagacagtgatcctgggcccctcaagtcttctacaaattgtgcaccccctttcctccagctcttcctgagaccagggtttccggttcgctcaccctgttccctgatctgctccagatgaaacctgtccctactgacagcacaagacccagaattagacaatcagtcaagctctatccaggacagggcaagcaggactctcacctccttcattagagatatcatgcttctattaattgagcctaaaatcccatttgcatttaaggcagccctattgcatggctgaattcagtttacagtcaacttcagagctgtacgttagtactctgaagttatataaactgggccctcacttaactgtgtaacttgagcaagc

SEQ ID NO: 2799 - DNA, 560 bp, Homo sapiens
aggatggcaatgccagtggaaccacgctgcttgaggctctggactgcatcctaccaccaactcgcccaactgacaagcccttgcgcctgcctctccaggatgtctacaaaattggtggtattggtactgttcctgttggccgagtggagactggtgttctcaaacccggtatggtggtcacctttgctccagtcaacgttacaacggaagtaaaatctgtcgaaatgcaccatgaagctttgagtgaagctcttcctggggacaatgtgggcttcaaggtcaagaatgtgtctgtcaaggatgttcgtcgtggcaacgttgctggtgacagcaaaaatgacccaccaatggaagcagctggcttcactgctcaggtgattatcctgaaccatccaggccaaataagcgccggctatgcccctgtattggattgccacatggctcacattgcatgcaagtttgctgagctgaaggaaaatggcaaggtcaccaagtctgcccagaaagctcagaaggctaaatgaatattatccctaatacctgccaccccactcttaatc

SEQ ID NO: 2800 - DNA, 506 bp, Homo sapiens
gtttgccgccagaacacaggtgtcgtgaaaactacccctaaaagccaaaatgggaaaggaaaagactcatatcaacattgtcgtcattggacacgtagattcgggcaagtccaccactactggccatctgatctataaatgcggtggcatcgacaaaagaccatccaggccaaataagcgccggctatgcccctgtattggattgccacatggctcacattgcatgcaagtttgctgagctgaaggaaaagattgatcgccgttctggtaaaaagctggaagatggccctaaattcttgaagtctggtgatgctgccattgttgatatggttcctggcaagcccatgtgtgttgagagcttctcagactatccacctttgggtcgctttgctgttcgtgatatgagacagacagttgcggtgggtgtcatcaaagcagtggacaagaaggctgctggagctggcaaggtcaccaagtctgcccagaaagctcagaaggctaaatga

SEQ ID NO: 2801 - DNA, 719 bp, Homo sapiens
gccaaaatgggaaaggaaaagactcatatcaacattgtcgtcattggacacgtagattcgggcaagtccaccactactggccatctgatctataaatgcggtggcatcgacaaaagaaccattgaaaaatttgagaaggaggctgctgagatgggaaagggctccttcaagtatgcctgggtcttggataaactgaaagctgagcgtgaacgtggtatcaccattgatatctccttgtggaaatttgagaccagcaagtactatgtgactatcattgatgccccaggacacagagacttcatcaaaaacatgattacagggacatctcaggctgactgtgctgtcctgattgttgctgctggtgttggtgaatttgaagctggtatctccaagaatgggcagacccgagagcatgcccttctggcttacacactgggtgtgaaacaactaattgtcggtgttaacaaaatggattccactgagccaccctacagccagaagagatatgaggaaattgttaaggaagtcagcacttacattaagaaaattggctacaaccccgacacagtagcatttgtgccaaattcttgaagtctggtgatgctgccattgttgatatggttcctggcaagcccatgtgtgttgagagcttctcagactatccacctttgggtcgctttgctgttcgtgatatgagacagacagttgcggtgggtgtc

SEQ ID NO: 2802 - DNA, 723 bp, Homo sapiens
aaattgttaaggaagtcagcacttacattaagaaaattggctacaaccccgacacagtagcatttgtgccaatttctggttggaatggtgacaacatgctggagccaagtgctaacatgccttggttcaagggatggaaagtcacccgtaaggatggcaatgccagtggaaccacgctgcttgaggctctggactgcatcctaccaccaactcgcccaactgacaagcccttgcgcctgcctctccaggatgtctacaaaattggtggtattggtactgttcctgttggccgagtggagactggtgttctcaaacccggtatggtggtcacctttgctccagtcaacgttacaacggaagtaaaatctgtcgaaatgcaccatgaagctttgagtgaagctcttcctggggacaatgtgggcttcaaggtcaagaatgtgtctgtcaaggatgttcgtcgtggcaacgttgctggtgacagcaaaaatgacccaccaatggaagcagctggcttcactgctcaggtgattatcctgaaccatccaggccaaataagcgccggctatgcccctgtattggattgccacatggctcacattgcatgcaagtttgctgagctgaaggaaaagattgatcgccgttctggtaaaaagctggaagatggccctaaccacctttgggtcgctttgctgttcgtgatatgagacagacagttgcggtggg

SEQ ID NO: 2803 - DNA, 639 bp, Homo sapiens
ctttttcgcaacgggtttgccgccagaacacaggtgtcgtgaaaactacccctaaaagccaaaatgggaaaggaaaagactcatatcaacattgtcgtcattggacacgtagattcgggcaagtccaccactactggccatctgatctataaatgcggtggcatcgacaaaagaaccattgaaaaatttgagaaggaggctgctgagatgggaaagggctccttcaagtatgcctgggtcttggataaactgaaagctgagcgtgaacgtggtatcaccattgatatctccttgtggaaatttgagaccagcaagtactatgtgactatcattgatgccccaggacacagagacttcatcaaaaacatgattacagggacatctcaggctgactgtgctgtcctgattgttgctgctggtgttggtgaatttgaagctggtatctccaagaatgggcagacccgagagcatgcccttctggcttacacactgggtgtgaaacaactaattgtcggtgttaacaaaatggattccactgagaccatccaggccaaataagcgccggctatgcccctgtattggattgccacatggctcacattgcatgcaagtttgctgagctgaaggaaaagattgatc

SEQ ID NO: 2804 - DNA, 687 bp, Homo sapiens
ctaaaagccaaaatgggaaaggaaaagactcatatcaacattgtcgtcattggacacgtagattcgggcaagtccaccactactggccatctgatctataaatgcggtggcatcgacaaaagaaccattgaaaaatttgagaaggaggctgctgagatgggaaagggctccttcaagtatgcctgggtcttggataaactgaaagctgagcgtgaacgtggtatcaccattgatatctccttgtggaaatttgagaccagcaagtactatgtgactatcattgatgccccaggacacagagacttcatcaaaaacatgattacagggacatctcaggctgactgtgctgtcctgattgttgctgctggtgttggtgaatttgaagctggtatctccaagaatgggcagacccgagagcatgcccttctggcttacacactgggtgtgaaacaactaattgtcggtgttaacaaaatggattccactgagccaccctacagccagaagagatatgaggaaactacaaaattggtggtattggtactgttcctgttggccgagtggagactggtgttctcaaacccggtatggtggtcacctttgctccagtcaacgttacaacggaagtaaaatctgtcgaaatgcaccatgaagctttgagtgaagctcttcctggggacaatgtgg

SEQ ID NO: 2805 - protein, 205 aa, Homo sapiens
MGKEKTHINIVVIGHVDSGKSTTTGHLIYKCSSIDKRTIEKFEKETAEMGKGSFKYGWVLDKLKAERERGITIDISLWKFETSKYYVTITDAPGHRDFIKNMITGTSQADCAVPIVAAGVGEFEAGISKNGQTREHALLAYTLGVKQLIVGVNKMDSTEPPYSQKRYEEIVKLVVLVVFLLAEWRLVFSNPVWWSPLLQSTLQQK

SEQ ID NO: 2806 - DNA, 3495 bp, Homo sapiens
atggcccaacaagcaaatgtcggggagcttcttgccatgctggactcccccatgctgggtgtgcgggacgacgtgacagctgtctttaaagagaacctcaattctgaccgtggccctatgcttgtaaacaccttggtggattattacctggaaaccagctctcagccggcattgcacatcctgaccaccttgcaagagccacatgacaagcacctcttggacaggattaacgaatatgtgggcaaagccgccactcgtttatccatcctctcgttactgggtcatgtcataagactgcagccatcttggaagcataagctctctcaagcacctcttttgccttctttactaaaatgtctcaagatggacactgacgtcgttgtcctcacaacaggcgtcttggtgttgataaccatgctaccaatgattccacagtctgggaaacagcatcttcttgatttctttgacatttttggccgtctgtcatcatggtgcctgaagaaaccaggccacgtggcggaagtctatctcgtccatctccatgccagtgtgtacgcactctttcatcgcctttatggaatgtacccttgcaacttcgtctcctttttgcgttctcattacagtatgaaagaaaacctggagacttttgaagaagtggtcaagccaatgatggagcatgtgcgaattcatccggaattagtgactggatccaaggaccatgaactggaccctcgaaggtggaagagattagaaactcatgatgttgtgatcgagtgtgccaaaatctctctggatcccacagaagcctcatatgaagatggctattctgtgtctcaccaaatctcagcccgctttcctcatcgttcagccgatgtcaccaccagcccttatgctgacacacagaatagctatgggtgtgctacttctaccccttactccacgtctcggctgatgttgttaaatatgccagggcagctacctcagactctgagttccccatcgacacggctgataactgaaccaccacaagctactctttggagcccatctatggtttgtggtatgaccactcctccaacttctcctggaaatgtcccacctgatctgtcacacccttacagtaaagtctttggtacaactgcaggtggaaaaggaactcctctgggaaccccagcaacctctcctcctccagccccactctgtcattcggatgactacgtgcacatttcactcccccaggccacagtcacaccccccaggaaggaagagagaatggattctgcaagaccatgtctacacagacaacaccatcttctgaatgacagaggatcagaagagccacctggcagcaaaggttctgtcactctaagtgatcttccagggtttttaggtgatctggcctctgaagaagatagtattgaaaaagataaagaagaagctgcaatatctagagaactttctgagatcaccacagcagaggcagagcctgtggttcctcgaggaggctttgactctcccttttaccgagacagtctcccaggttctcagcggaagacccactcggcagcctccagttctcagggcgccagcgtgaaccctgagcctttacactcctccctggacaagcttgggcctgacacaccaaagcaagcctttactcccatagacctgccctgcggcagtgctgatgaaagccctgcgggagacagggaatgccagacttctttggagaccagtatcttcactcccagtccttgtaaaattccacctccgacgagagtgggctttggaagcgggcagcctcccccgtatgatcatctttttgaggtggcattgccaaagacagcccatcattttgtcatcaggaagactgaggagctgttaaagaaagcaaaaggaaacacagaggaagatggtgtgccctctacctccccaatggaagtgctggacagactgatacagcagggagcagacgcgcacagcaaggagctgaacaagttgcctttacccagcaagtctgtcgactggacccactttggaggctctcctccttcagatgagatccgcaccctccgagaccagttgcttttactgcacaaccagttactctatgagcgttttaagaggcagcagcatgccctccggaacaggcggctcctccgcaaggtgatcaaagcagcagctctggaggaacataatgctgccatgaaagatcagttgaagttacaagagaaggacatccagatgtggaaggttagtctgcagaaagaacaagctagatacaatcagctccaggagcagcgtgacactatggtaaccaagctccacagccagatcagacagctgcagcatgaccgagaggaattctacaaccagagccaggaattacagacgaagctggaggactgcaggaacatgattgcggagctgcggatagaactgaagaaggccaacaacaaggtgtgtcacactgagctgctgctcagtcaggtttcccaaaagctctcaaacagtgagtcggtccagcagcagatggagttcttgaacaggcagctgttggttcttggggaggtcaacgagctctatttggaacaactgcagaacaagcactcagataccacaaaggaagtagaaatgatgaaagccgcctatcggaaagagctagaaaaaaacagaagccatgttctccagcagactcagaggcttgatacctcccaaaaacggattttggaactggaatctcacctggccaagaaagaccaccttcttttggaacagaagaaatatctagaggatgtcaaactccaggcaagaggacagctgcaggccgcagagagcaggtatgaggctcagaaaaggataacccaggtgtttgaattggagatcttagatttatatggcaggttggagaaagatggcctcctgaaaaaacttgaagaagaaaaagcagaagcagctgaagcagcagaagaaaggcttgactgttgtaatgacgggtgctcagattccatggtagggcacaatgaagaggcatctggccacaacggtgagaccaagacccccaggcccagcagcgcccggggcagtagtggaagcagaggtggtggaggcagcagcagcagcagcagcgagctttctaccccagagaaacccccacaccagagggcaggcccattcagcagtcggtgggagacgactatgggagaagcgtctgccagcatccccaccactgtgggctcacttcccagttcaaaaagcttcctgggtatgaaggctcgagagttatttcgtaataagagcgagagccagtgtgatgaggacggcatgaccagtagcctttctgagagcctaaagacagaactgggcaaagacttgggtgtggaagccaagattcccctgaacctagatggccctcacccgtctcccccgaccccggacagtgttggacagctacatatcatggactacaatgagactcatcatgaacacagctaa

SEQ ID NO: 2807 - protein, 1164 aa, Homo sapiens
MAQQANVGELLAMLDSPMLGVRDDVTAVFKENLNSDRGPMLVNTLVDYYLETSSQPALHILTTLQEPHDKHLLDRINEYVGKAATRLSILSLLGHVIRLQPSWKHKLSQAPLLPSLLKCLKMDTDVVVLTTGVLVLITMLPMIPQSGKQHLLDFFDIFGRLSSWCLKKPGHVAEVYLVHLHASVYALFHRLYGMYPCNFVSFLRSHYSMKENLETFEEVVKPMMEHVRIHPELVTGSKDHELDPRRWKRLETHDVVIECAKISLDPTEASYEDGYSVSHQISARFPHRSADVTTSPYADTQNSYGCATSTPYSTSRLMLLNMPGQLPQTLSSPSTRLITEPPQATLWSPSMVCGMTTPPTSPGNVPPDLSHPYSKVFGTTAGGKGTPLGTPATSPPPAPLCHSDDYVHISLPQATVTPPRKEERMDSARPCLHRQHHLLNDRGSEEPPGSKGSVTLSDLPGFLGDLASEEDSIEKDKEEAAISRELSEITTAEAEPVVPRGGFDSPFYRDSLPGSQRKTHSAASSSQGASVNPEPLHSSLDKLGPDTPKQAFTPIDLPCGSADESPAGDRECQTSLETSIFTPSPCKIPPPTRVGFGSGQPPPYDHLFEVALPKTAHHFVIRKTEELLKKAKGNTEEDGVPSTSPMEVLDRLIQQGADAHSKELNKLPLPSKSVDWTHFGGSPPSDEIRTLRDQLLLLHNQLLYERFKRQQHALRNRRLLRKVIKAAALEEHNAAMKDQLKLQEKDIQMWKVSLQKEQARYNQLQEQRDTMVTKLHSQIRQLQHDREEFYNQSQELQTKLEDCRNMIAELRIELKKANNKVCHTELLLSQVSQKLSNSESVQQQMEFLNRQLLVLGEVNELYLEQLQNKHSDTTKEVEMMKAAYRKELEKNRSHVLQQTQRLDTSQKRILELESHLAKKDHLLLEQKKYLEDVKLQARGQLQAAESRYEAQKRITQVFELEILDLYGRLEKDGLLKKLEEEKAEAAEAAEERLDCCNDGCSDSMVGHNEEASGHNGETKTPRPSSARGSSGSRGGGGSSSSSSELSTPEKPPHQRAGPFSSRWETTMGEASASIPTTVGSLPSSKSFLGMKARELFRNKSESQCDEDGMTSSLSESLKTELGKDLGVEAKIPLNLDGPHPSPPTPDSVGQLHIMDYNETHHEHS

SEQ ID NO: 2808 - DNA, 2164 bp, Homo sapiens
gctccggttgcctccgacctcggcgctgggcgggcgcgccgggcctggggaaggggcgggcgcggggacccgatgcgcgggagcggaggccgagatggcttcggcgggaggcgaagactgcgagagccccgcgccggaggccgaccgtccgcaccagcggcccttcctgataggggtgagcggcggcactgccagcgggaagtcgaccgtgtgtgagaagatcatggagttgctgggacagaacgaggtggaacagcggcagcggaaggtggtcatcctgagccaggacaggttctacaaggtcctgacggcagagcagaaggccaaggccttgaaaggacagtacaattttgaccatccagatgcctttgataatgatttgatgcacaggactctgaagaacatcgtggagggcaaaacggtggaggtgccgacctatgattttgtgacacactcaaggttaccagagaccacggtggtctaccctgcggacgtggttctgtttgagggcatcttggtgttctacagccaggagatccgggacatgttccacctgcgcctcttcgtggacaccgactccgacgtcaggctgtctcgaagagttctccgggacgtgcgccgagggagggacctggagcagattctgacgcagtacaccaccttcgtgaagccggccttcgaggagttctgcctgccgacaaagaagtatgccgatgtgatcatcccgcgaggagtggacaatatggttgccatcaacctgatcgtgcagcacatccaggacattctgaatggtgacatctgcaaatggcaccgaggagggtccaatgggcggagctacaagcggaccttttctgagccaggggaccaccctgggatgctgacctctggcaaacggtcacatttggagtccagcagcagaccccactgaggggctgccgagcctcagggcaggtctcccgcccggcatgtgtgttcagggactgagcctggggacgcccacccacacccactgcttcctctcggcgcaccccaggggagtgttagcagcgaggccttcctcactcaggagtggaaactcagatgtgtcactcagactcaacttgctgggacactgacaggcgttcctgaggttttcagccacttaggctcgttgcggtttaaagatccctctaggtcactgagaaatgccacagaatgtgcaggaagcctgggaggcttctgtgaggaatgtgaggcacattattggggaaattgaggagacagcctagacactggctggcctgatgttttgttgacagtgaacccacagtgggagagagttttttccagtctgatctggttcttacacactcacacacataactcaaaagttttgtgaacaagtactttccttttttacatgttacatgtcctcatgttttctgttttctgtttcataacacaaggctggttgtggcctacaaacctaatttcatgacccagtggtttgcagtccagcgtggcctacacggatatggggagccactgagggatgttttccccccttgcttgtgccttaaaggcagagaagcgaggcggatgccctggaagcacccagcatcacacccaggcttgtgcggggccaggctgggagcccatgcagtagggcagaaggcagcggaggccaggtctgtcccggctggagaacagcgtccacgcagtcctgcctggggtcaggccctcactgaccctcaggggagcccccaaggtgctgtctgtctagacaggctgtcccaccccagggtggctagtggccatatgcagggaatggtgcttctggctgtggcacgcactggatcacccaggtcccagcagacatggccgcccaaagtcagcaagcctcctttgtgctatgtggagctcacagcctcacatgtgaacacccgtgtctgggttgcctggggtgatcctccctcctgcgtggtggctgtctctggaaagcatcccttgccgctgccatgggcagccccagcccccgtccgtccaggctcacccacagtagtgatgcagacgtgacgtgggggaagggggctgagccctgtggctgggttctgacaactgtaacggttttgtcgagcttaggcccctttggagggagaatcaataaataacaaacaccaactac

SEQ ID NO: 2809 - DNA, 6442 bp, Homo sapiens
tgaacagggagaggccatgaaacagtttgacctgaactatggaagtgccatcattgaaaattgcgggtccagccccggggaggagagtgaggtgggttctatggtgggcgaaggcttcatcgaagtcctgaccaagaagcagcgccgcctgctggaggaagagagaagaaagaaggagcaggccgtgcaggtgcctgtcaaaggtcgaggcctttcctcccgtattcctcctcgatttgcaaaaaagcagaacaacttatgtctggagcaaggtgacgtgaccgtgcctggcagcagcctgggcactgagatctgggagagcagcagccaggctctccctgtgcaggccccagccaacgactcctggaggaaagctgtcactgccttcagcagcaccgagactggctctgcggagcagggttttaagagcagccagggagatagtggcgttgacttgagtgccgagtctcgggagtcgtctgcgacctcctcgcagcgcagctccccatatgggactctgaagccagaggagatgagcgggcccggcctggcggaacccaaggccgacagccacaaggagcaggctccaaagccatctgagcagaaggattcagaacaaggctctggacagagcaaggagcacagaccaggacccatcggcaacgagcgttctctgaaaaacagaaagggctcggagggggccgagcggctgcaaggggctgtcgtcccgcctgttaacggggtggagattcacgtggactccgtgctgcctgtgccacccattgaatttggagtcagtccaaaagactccgatttcagcttgccacctggttctgcctctggtcctactgggagtccagttgttaaacttcaggatgccttggccagtaatgcagggttaacacagagtatccccatcctgcggcgggaccatcacatccagagggccatcggtctctccccaatgtccttccccaccgccgaccttactctgaagatggagtctgcgcgcaaggcttgggaaaactcccccagtttgccggagcagagctctccaggcggcgctggctcaggcatccagcctccatcctctgtgggtgcctccagcggggtcaactacagctccttcggtggagtgtccatgccacccatgcctgtggcctctgtagcaccttctgcttctatgccaggcagccacctcccgcccctgtacctggatggccatgtgtttgcaagtcagccccggctggttcctcaaacgatacctcagcagcagagttaccaacaggccgccgctgcccagcagatcccgatctcccttcacacatctctgcaggcacaagctcagcttggactgaggggtgggcttcctgtgtcccagtcccaggagatcttcagctccttgcagcccttcagatctcaggtgtacatgcaccccagcctgtcaccgcccagcaccatgatcctctctgggggcacagccttgaagcctccatactcggcgttcccaggcatgcagcccttggagatggtgaagccgcagtctggctcaccctaccagcccatgagcgggaaccaagccctggtctacgagggccagctcagccaggctgctggcctgggtgcctcccagatgttggactcccagctcccacagctgaccatgccactgcctcggtacggctccgggcagcagccactgatcctgccccagtctattcagctgccacctgggcagagcctctccgttggggccccccgaaggattcctccgcccgggtcccagccgccagtcctgaacaccagcagagagccctctcagatggagatgaaaggcttccactttgccgacagtaaacagaatgtcccttcaggaggccccgtgccatcgccacagacctacaggcctagctctgctagccccagtgggaagccctctggatcagcagttaacatgggctctgtgcagggacactacgtgcaacaggcaaaacaacgagtggatgagaaacccagcctgggagccgtgaagctgcaggaggccccctcggctgcctcccagatgaagcgaaccggagcgatcaagcctcgggctgtcaaagtggaggagagtaaggcctgacagtgcctggctgccacctcgcctctccctactgaggacggtgccgccatgcggcctcgacacagccgacactcgggagcctcaccagatccaccgtccaaatgcgtggcccagactgagagacctccctcctctccactcccgaaagctccgttgtcaaccagcttgcacccgtggatatatggcattgacccgcttgctttgatacgaaacaaaaaagcagacgactccttcatcccatctgctcctaccgtgactgtggagtgacgcctcctgtgcagtgcagatttgccctccctgcctcctccctgtcctgccgcgcagccagggcgccttctcagcagtgcttccggcccagccgcccatccctaggcacagtgatttggcagcagggtcattttactttgaggctttttgttttaaaatgtagccaaggtttttacaaaggggaaaggaaaagaaaacaaaaacgcaagctccatgtgtatagctgaacttttatatgtttcttgccagcccctccgctcccttccatctctagcctctgtcctgtttagtttgatacgtcactgcagtaccttaagaggtgactcttaagaatgcatcccctcctgattcctcagctggttcacccttgaggttatttgcaaaaagaaaaggaggttcttgagggcaccgattgcgagcattctggtgcctggctccccgcctgggaagcgatggggtgctcagagcagcaggcaggttgggggagggggggggtcatagttgggttccagctcctggcttgatgagcccagggcgcttacaggcagcccatgaagttgatgacagttttagcatgagaatcacacagggtccctgtcctgggctcctctaaagccagtggatgtgctgggcaccagagacaaatcatggagatggctgctggtggctcccaggttggcccagatggggtgagctgacataccacaggcccatcccaggccccgtgggctctgcttctggggctccataccctgccctgcaggggtgctgtgtttttcacacatttctttccctgaagccttctgtaacctgtcattttccttccttcctcttccggagcctgctgctttctctggacctgtctccacctcccacacagctcatcgtgaacaccacttggtgatggagggagtggacccgtgtgtggtccccaagtgaggccactgggagtttgtccttttcctcctttgcttcactcccagcagcagacccaggttgtcaggacaggagggcctgagctaagcagtaggcatcagtctcgtttgtcttcagacggcgggggcaggtccagggtgaggctgggtggagggctgaccaaggtccaaagggcctgcgcagcctccgggagggcagcttctccagccagaggcttgtgtgagccatcgtgtgctgggcttgtttttaagtaagaaacaaggaaatcactccagattctgtcattccaaggaaagggaaggggacagttcaggtttctcagctgttcttaggggtcactgagcgtctacctcctcctccagaggaggctggctcagaacacctagaggagggggccggggatgcaccccccaccagaggctgccttcagcgtctcacgggtgcaggacagcgctcaggcttgggctctaagctctgtgtctagtgtagaacatggggaaggagcatcttaggaactgctgaagtaacttcttactgctctcacaattctaaggaagcgggagaacggcctcctaccaacagcgcccaccccagagctgcctgggaaagggcagttttactgaaaggtgctttactgttcacctgcatctttcagcagctcccctcctgccctcacctggtcttttccctctttatcccaagcctttatgcttgagtcccttccccaggggctgcccacccgacagttccaggcattccctacctgagcttcttgtctgcttttccttctcccactgcaagcggctgcttgtggggcctgggatgagccctctctgtccccaccggccctccttgccaagccattcctgggtgagttcaggcctgcgggagccacacattcatctccacctggacacttgagccgcatggccagacccctcccacctgatgcggtggtgcgtgtgatttgtcaaaagaaagccttctggatgctgttaagatgtacccttcaggtgaacctggtatcagacccacagtacttgctgtttgagaaaaaataaaaacaaaaaggtcacctgttctccagcccttttctcttacctggtatttccttcctttctcctcccccaccccaaataaaaaaacaaaaaacactagaatttatttatatgtattgatgttgtaggtctaggtgaaaaaaaaagaagtaaatgtttcactgctctatttatatataatgtctgaattaattctgtgcaggaaaggccaggaaattgcatgtgaagttcggtgcagtcaccacctgtgtgtgacctgagctgcagtctcttcgctgagatgcaggttttaaatgagacttggggggctgagggcaggcctcaggcctcccagcgccccaacccctccttggtctaatgaaatgcagttcttagtgcagagatgttttaaggtgcaatatatctcttcctttcccgtggttttagagccaagctcaaggtagtaggacgtagggtcttattttgttttcaaacccccatcctcagagcgcagatacatgcagaggcttctgccaggataccacggggccttagtgggaacaggtggagaccagcacttccctttcctgctgctgaggtagggattggggggtcagaacccactcacttttgcctgttaaagttgccctcctgacgctggcagctctgccttggtcactggggatgcggctcgttgctcagccaccagtggccttgcggtattgtccaccatccactagagtgggatgaagtccagagtgtgggtatacatctcagatgcccatctacccactggggacttcaatgccagctgcatttggtttggttttcttaactgttggcttctccccacagcgttttttgtttttttttaaacattcatattgttttcaaacttggaattcatagacactctggctctaggttccttaagggggaaaacaaaagatgactttatttcacattcaagaaaatcagttcagttccaaagctgtggtccttccagccacttctagggacactggggaaccttgttaaacgttgacatcagtgctctccagccgtgctgtcaccctcctatcttctggatctgccttcgcgatggtcagtgacagcttctggaagctgagcacacacaggtgcacagccatgctgtggtctggcctgctacggcagcatggcagctctggtggagccttctcccttgccatttggttcccctgtgccaagtagctgcaggctgcccctcaaatcttcatttgtcccttttcacttcctgcagaacaagcctgggttagagggtctgctggaaatggcctttgaagaccaaggataccaggatgtgtgcactctgtcgtgttctgtgatgaatgggaaacgtaggcttccagaaagccagctctcttctgaaatgtgacggacctaagcaggaagtcatccaggacaggagtggctcagtgttggggatggacgctgtcgcccagccatgctccaccagggccaccaatgtgtagttggctggtggtcttcgggcatgtgagacctgctcttcactgtttccaccccacttggtggcctccaggatggtagtggcaccctcagagccccatcttcagcatgttctgaagcctcagagtggaaattcctgctaaggctctgtgtggacgcctttctcccgtgatctaaaggggacactgtactcaagcttttgacctcatgccttgtgtagtaaaaaaggatttgggggttttgtttggttcctgagagggttgtgttttgtttttgtttccttttgtttatgttttggcctttcctctttgtctttccatgtagaccagatatttgaaagggcagacgatggctagaggtgtaatgtgcagcttgtttatacggtattttgggaaacttaccttggatgggaaatcgaatcgtggattcaccaggccggtgctggcacactcaccctcgccctttccctccggttcagtacctattgtttctcctttcaaatatgtgattgtactagctctttccatatgaaagaattctccttatttaaataaaaaaagtttaaaaagat

SEQ ID NO: 2810 - protein, 701 aa, Homo sapiens
MKQFDLNYGSAIIENCGSSPGEESEVGSMVGEGFIEVLTKKQRRLLEEERRKKEQAVQVPVKGRGLSSRIPPRFAKKQNNLCLEQGDVTVPGSSLGTEIWESSSQALPVQAPANDSWRKAVTAFSSTETGSAEQGFKSSQGDSGVDLSAESRESSATSSQRSSPYGTLKPEEMSGPGLAEPKADSHKEQAPKPSEQKDSEQGSGQSKEHRPGPIGNERSLKNRKGSEGAERLQGAVVPPVNGVEIHVDSVLPVPPIEFGVSPKDSDFSLPPGSASGPTGSPVVKLQDALASNAGLTQSIPILRRDHHIQRAIGLSPMSFPTADLTLKMESARKAWENSPSLPEQSSPGGAGSGIQPPSSVGASSGVNYSSFGGVSMPPMPVASVAPSASMPGSHLPPLYLDGHVFASQPRLVPQTIPQQQSYQQAAAAQQIPISLHTSLQAQAQLGLRGGLPVSQSQEIFSSLQPFRSQVYMHPSLSPPSTMILSGGTALKPPYSAFPGMQPLEMVKPQSGSPYQPMSGNQALVYEGQLSQAAGLGASQMLDSQLPQLTMPLPRYGSGQQPLILPQSIQLPPGQSLSVGAPRRIPPPGSQPPVLNTSREPSQMEMKGFHFADSKQNVPSGGPVPSPQTYRPSSASPSGKPSGSAVNMGSVQGHYVQQAKQRVDEKPSLGAVKLQEAPSAASQMKRTGAIKPRAVKVEESKA

SEQ ID NO: 2811 - DNA, 2050 bp, Homo sapiens
ctcacctcccggaggctctgctggtgcaggccccgcattggagggctcgattggctgcccggctggcactgacgtccccttggagctgggtggcagaggagataaacagccatgtgcaactctccacactatatttaacagctgcggcggagaaggcagggaggcagccacggtggcggctctgggggcagctcttgtcttcggggagaaggcccttggagccgggctggcatcggccttctcggggtgagcgaggtcaccatgccagcttcccagagccgggcccgtgcccgggaccgcaacaacgtcctcaaccgggctgagttcctgtccctgaaccagccccccaaggggggcccggagccccgcagctcgggcagaaaggcctcgggcccatcagcacagcccccacctgctggtgacggggccagagagcgacgccagtcacagcagctgccagaggaggactgcatgcagctgaacccctccttcaagggcatcgccttcaactccctgctggccatcgatatctgtatgtccaagcggctgggggtgtgcgctggccgggcggcgtcctgggccagtgcccgctccatggtcaagctcatcggcatcacgggccacggcatcccctggatcggaggcaccatcctctgcctggtgaagagcagcacactggccggccaggaggtgctcatgaatctgctcctggccctgctcctggacatcatgacggtggccggcgtgcagaagctcatcaagcggcgcggcccgtacgagacgagccccagcctcctggactacctcaccatggacatctacgccttcccggccgggcacgccagccgcgccgccatggtgtccaagttcttcctcagccacctggtgctggcggtgcccctgcgtgtgctgctggtgctctgggccctctgcgtgggcctgtcccgcgtgatgatcggccgccaccacgtcacggacgtcctctccggctttgtcatcggctacctccagttccgtctggtggagctggtctggatgccctccagcacctgccagatgctcatctctgcctggtgaagcgcccgccggcccacacaagcctctgggggcagggctggccctagagaaggggcagggggtggcgaggtggcgggcgtgggtggaacagagcggccaggagtcagagcggccacccccacctcatcttcccctcctggctggaggctggcgaacccaggccacccctcccggagacaagcgtgtttggcagtgccaggcctcttgcccctttgcttggactccaagtctcctctctaggcagccaggacccacccatggggacagccctatttagcttctgctctgggaacagcaaaaatcaggatggtgggaggggccgagtcttgtcttgtcctttcatcatcatgactgttgagttcttggctgtgcccatcacgccacagcacgacgcctgccaaaatgcccccaacctactgcctgatgcaggtgccattgccattagcggtcatcgacagcttagggcagcactttccaacgggtgcccatgggacaccagcctgcgagatgcttttgggggaaaggggttttgtggttcaataactttcggaagtgctgcacactctgtccccaagttggacattcacaaaggccgttattgccgtaaaggctctgacaagccctatagaaaagcttcttgctaaaccttctttaacccatgttttctaaacttatttgaccacagaacccttttcttggggaacagctattaacccccaaggaattattggttcctcaagtgcgttttgggagctgctgccagagagctaaagggcctggggtgtgagctgactctcctctggggaggccgggtgcacacgccacagcccgaggaaagtgctggccaccgcccgtgggcatcgatgaggctttggcccccaggggccggactccgtgtgacctaataggtcgtttccaagtcacccgttttggatgtgcatttcatgtgacaatacagatgacatgcaaatgg

SEQ ID NO: 2812 - protein, 201 aa, Homo sapiens [sequence omitted]

SEQ ID NO: 2813 - DNA, 798 bp, Homo sapiens
ggccaagggattgctgcagccctcatccaccttccaagcactggaaacaaacattggagaccaaggtctccagaagcttccactgactgctgttggctgcaccaggcaacagggtctggctctgtcacccaggctggagtgcaatggtatgatctcggctcactgcaacctctgcctcccaggttcaagcgattctcctgcctcagcctcccgagtagctgggattacaggtccagctgggagctccccgacctccaggagggcaagatccaagccatcagcgactcggatggggtgaactacccctggtacggcaacaccacagagacctgcaccatcgtgggccccaccaagagggactccaagttcatcatcagcatgaatgacaacttttaccccagcgtcacatgggccgtgcccgtcagcgagagcaacgtggccaagctcaccaatatctaccgggaccagagcttcaccacctggctggtggccaccaacacctccaccaacgacatgatcatcctgcagacgctgcactggcgcatgcagctcagcatcgaggtgaaccccaaccggcccctgggccagcgcgcccggctgcgggagcccatcgcccaggaccagcccaaaatcctgagcaagaatgagcccatcccgcccagcgccctggtcaagcccaatgccaacgatgcccaggtcctcatgtggcggcccaagtacgggcagccgctggtggtgatcccgcccaagcaccggtgacagccaggaccacccgctaggttagactcacaaataata

SEQ ID NO: 2814 - protein, 126 aa, Homo sapiens
MNDNFYPSVTWAVPVSESNVAKLTNIYRDQSFTTWLVATNTSTNDMIILQTLHWRMQLSIEVNPNRPLGQRARLREPIAQDQPKILSKNEPIPPSALVKPNANDAQVLMWRPKYGQPLVVIPPKHR

SEQ ID NO: 2815 - DNA, 4557 bp, Homo sapiens
gcttcaggtcaaattagggctttgggtcaaatcagggctacctggtctgggagaggcacacttctaactgctgatgccaccctcaaagggtctccagaagcttccactgactgctgttggctgcaccaggcagtgagtatcagtacatttaatcatcacaaaaaccgggcaggcagatgttggcggattgtctgtgggctgctgaagagctggtagagctcagcgcgtctgtgactggaccacagtgcgagtagctggggctgacagtggaccctgggctgctgcacccgctgcaacccccaggtggagggatccacgcagcctggtgacgatttggccctggccctgagccatgccccgcgtgacgcagtgctgtctgccagcctgggaggctcctcacctgtctttgcctgagccagggcctgggagtttcaggactgggaaaggaaagaaaaccccaaggctggggtcaggaagaggagggctattttgctgctcagtcctgctcccccaaaccagaccttcagctctttgcaaacgaaagagggggcaaggccaaagcggggttccttatgcaagtttgcttcctgccctgaaaaaccaaaaaaacggaaaacttttccaagcaagtgtaagcactgtgtgaggacagagtgggcgtttccttctgaaataggagactaggcccccagtgggcaaagagaccctgacccgcttctccatctgtgcgggggaatgaatgagcaggctcaccctgttgtcatcctgcctgctgctgtggggcccccctagatcttaggaattgctgggtacttccggacagtgaggttgtctgagctgcctgcaggttccctgagtctgggtactcaggggctgggcaggagatgcccattaagcaggtgttactctaatgagtgagcttttcaatgagatgaacaggaaaattagcaaaatcatgttcctaatcattcctcctgcggcggccccaattttgctaactgttaacattatatgatgcataagtaggggaatgcatttttaaaattatggtaaagcctatgtaacattttataaaattgaccattttattttattattaatttttttttttttaagacagggtctggctctgtcacccaggctggagtgcaatggtatgatctcggctcactgcaacctctgcctcccaggttcaagcgattctcctgcctcagcctcccgagtagctgggattacagcctgtgttggaacatccttccttcttaaggctgaagaacattccattgtccagctgggagctccccgacctccaggagggcaagatccaagccatcagcgactcggatggggtgaactacccctggtacggcaacaccacagagacctgcaccatcgtgggccccaccaagagggactccaagttcatcatcagcatgaatgacaacttttaccccagcgtcacatgggccgtgcccgtcagcgagagcaacgtggccaagctcaccaatatctaccgggaccagagcttcaccacctggctggtggccaccaacacctccaccaacgacatgatcatcctgcagacgctgcactggcgcatgcagctcagcatcgaggtgaaccccaaccggcccctgggccagcgcgcccggctgcgggagcccatcgcccaggaccagcccaaaatcctgagcaagaatgagcccatcccgcccagcgccctggtcaagcccaatgccaacgatgcccaggtcctcatgtggcggcccaagtacgggcagccgctggtggtgatcccgcccaagcaccggtgacagccaggaccacccgctaggttagactcacaaataataataccgctgaaaacaaaactcagactcactcttcagtcattcagcaagatacaaccattctaccctctccagcgggcggatctcactgtgctgatgcccccgggaaggcctccccggctctcggcacctgcttcctttcagggagaggggagatctaagcaggacagacagaccccacgtgcgccctcagggtgacctctggtctccttgcctctcctttttctcagtttcagtcgctcacttgtaacagattccctgaaacactgctttttccgttttttaaaaaaactcctcttttgggggctcaggggcaggaggagggggagctgattaggagggaagctccagcccccgatcaaagagacagatccacactgctgccgatttgtggcgctggccggccttccccccaggtccctccgccctctgtcatgcggccttatgtagacttgctttgccaaacttttgccttaagctgaattgaaaggaagaaaaccaatcggagaaagaaagcaggatctcttttctaccggacttttcctcttctgccagaggtggagggagggttggggtcgcccgcgagagtctcttgagcccttcttcccggttgtcttgggagaagggtgaggatgggcatttagacccgaaaccagctgctcactctttctttttggcagaaataaaaccacaggtagattctgcctgaacagccccttctctccctccacccccaggtcgtatccctgcacctgcggagaggggctgtgagctctggcggggggtggctccaccagtcgcctggcctcttctcccctctcttcccagcagccttaacttcccttgggcggctctaggaggagagaggcaggctcctgtgagcccagggaattttcaccctctcagtcctcaggacccacccccagttgagtccctggcccttcctccaggtgtgtggctttttccttctccatccacactggtcccaaatgcctgggggccggccacctggaccgccgacacacagcctcaatgttagtctcaaaggtaaggaaggcattcacgtcccttcttgcagggcattttaagacttgaatcgggtgggccccggcccctgtggctggctggcccctggtgtactgtaaaagggccaagacagggctcgttctcaggggcgcccctcccaggccctcagggcagcgggacggtgcagtcaggctctgggtgccacagtgatggaggtggaaggcacccaagctctagggaagtcttgggaggcagtcggccgagcccctgcttcctgtcctcaaataagtgaatccaggccaagggctgggagggctgggtgggcttatcgtcgagagggttcagagccactctggaggctgggctggcacagtggagagcaacaggtgaggacagacgtctggaagcccatccctgggacctgccctccctcggtcccaggtcactggagctccagggcttacttagtcctgacccattgtgccagggttctgagcagtgtcggccttgtggccacttgcaggggctattaggggacatcccgctgaagccacgctccttccagcttgccaaacccacagctacccgcccgggacccacactcagcctaataattatcaagcacagaaaaccgtccatttagaaaaataatccatttctgctgcagatgagccacttgtaagagtctccgtgacagcgtgggacggtgtgggaaccaaagtccctgccctgctcctttgtccacgggctattgcgtttattcaaggggtgcttaatgaccgtttagccactgccgtcggtctccgggcccagctcgtgccaggaggctgtcctgggacacactgggctggagctgccggctggcacggtgctcagggggcccctgatgggggccaggacctccccgcagaaactgcaggttctcttgtgaggatggaggccgtgccaccccgaaaggcagtagccttaggggaacagtgggtcccagctgcatgtctgaggatgggtggggacagggctgggactcagctttcattcactggagacttctccactcaggtctttgttgcactaaagcagggacaggaccctgggggttcaggaagcgggtctcaggccgctggtttattcctggaggtggggctggagaccagaatggaaaggggcttcctgagctgctagggggtgaaggacccccgaacccgcatttcttgagtgagagcaaacactcgaggcaggagccagcacccctcccactgcatgcccggcccccagcccaccttgccccctgacccaccttcacccgtgccccttctttctgcccttcctcaccgaagaagggctaggaacaccctggagaggctgcaggtccggccacggacgctcagctgagccccggtctgctccttcagcctccttgctcatgttggagcacaggccccaggcttcctgccagggccccgattcttcttatgtcctccagccccgccctggcgtggacatccactcactccttccagcaataagaaccgtccttggtcgtggagagtactgtgaaacaaaccaatgcacttaccaggaggcacaagactcttgaagaagatgtacaatgaacctttttttttttacaaaaaacaaaaagcaaatattcataaagagaaataaaatgtaattttaaagt

SEQ ID NO: 2816 - protein, 126 aa, Homo sapiens; identical to SEQ ID NO: 2814

SEQ ID NO: 2817 - DNA, 6556 bp, Homo sapiens
aggggaggaagtttgctgtcgagcggcctgggttccgtgggcaaggccgtgggaggcagcgttggctgcttcgacacactgagggcggcgcgatgggagacgagatggatgccatgattcccgagcgggagatgaaggattttcagtttagagcgctaaagaaggtgagaatctttgactcccctgaggaattgcccaaggaacgctcgagtctgcttgctgtgtccaacaaatatggtctggtcttcgctggtggagccagtggcttgcagatttttcctactaaaaatcttcttattcaaaataaacccggagatgatcccaacaaaatagttgataaagtccaaggcttgctagttcctatgaaattcccaatccatcacctggccttgagctgtgataacctcacactctctgcgtgcatgatgtccagtgaatatggttccattattgctttttttgatgttcgcacattctcaaatgaggctaaacagcaaaaacgcccatttgcctatcataagcttttgaaagatgcaggaggcatggtgattgatatgaagtggaaccccactgtcccctccatggtggcagtttgtctggctgatggtagtattgctgtcctgcaagtcacggaaacagtgaaagtatgtgcaactcttccttccacggtagcagtaacctctgtgtgctggagccccaaaggaaagcagctggcagtgggaaaacagaatggaactgtggtccagtatcttcctactttgcaggaaaaaaaagtcattccttgtcctccgttttatgagtcagatcatcctgtcagagttctggatgtgctgtggattggtacctacgtcttcgccatagtgtatgctgctgcagatgggaccctggaaacgtctccagatgtggtgatggctctactaccgaaaaaagaagaaaagcacccagagatatttgtgaactttatggagccctgttatggcagctgcacggagagacagcatcattactacctcagttacattgaggaatgggatttagtgctggcagcatctgcggcttcaacagaagttagtatccttgctcgacaaagtgatcagattaattgggaatcttggctactggaggattctagtcgagctgaattgcctgtgacagacaagagtgatgactccttgcccatgggagttgtcgtagactatacaaaccaagtggaaatcaccatcagtgatgaaaagactcttcctcctgctccagttctcatgttactttcaacagatggtgtgctttgtccattttatatgattaatcaaaatcctggggttaagtctctcatcaaaacaccagagcgactttcattagaaggagagcgacagcccaagtcaccaggaagtactcccactaccccaacctcctctcaagccccacagaaactggatgcttctgcagctgcagcccctgcctctctgccaccttcatcacctgctgctcccattgccactttttctttgcttcctgctggtggagcccccactgtgttctcctttggttcttcatctttgaagtcatctgctacggtcactggggagcccccttcatattccagtggctccgacagctccaaagcagccccaggccctggcccatcaaccttctcttttgttcccccttctaaagcctccctagcccccacccctgcagcgtctcctgtggctccatcagctgcttcattctcctttggatcatctggttttaagcctaccctggaaagcacaccagtgccaagtgtgtctgctccaaatatagcaatgaagccctccttcccaccctcaacctctgctgtcaaagtcaaccttagtgaaaagtttactgctgcagctacctctactcctgttagtagctcccagagcgcacccccgatgtcgccattctcttctgcctccaagccagctgcttctggaccactcagccaccccacacctctctcagcaccacctagttccgtgccattgaagtcctcagtcttgccctcaccatcaggacgatctgctcagggcagttcaagcccagtgccctcaatggtacagaaatcacccaggataacccctccagcggcaaagccaggctctccccaggcaaagtcacttcagcctgctgttgcagaaaagcagggacatcagtggaaagattcagatcctgtaatggctggaattggggaggagattgcacactttcagaaggagttggaagagttaaaagcccgaacttccaaagcctgtttccaagtgggcacttctgaggagatgaagatgctgcgaacagaatcagatgacttgcatacctttcttttggagattaaagagaccacagagtcgcttcatggagatataagtagcctgaaaacaactttacttgagggctttgctggtgttgaggaagccagagaacaaaatgaaagaaatcgtgactctggttatctgcatttgctttataaaagaccactggatcccaagagtgaagctcagcttcaggaaattcggcgccttcatcagtatgtgaaatttgctgtccaagatgtgaatgatgttctagacttggagtgggatcagcatctggaacaaaagaaaaaacaaaggcacctgcttgtgccagagcgagagacactgtttaacaccctagccaacaatcgggaaatcatcaaccaacagaggaagaggctgaatcacctggtggatagtcttcagcagctccgcctttacaaacagacttccctgtggagcctgtcctcggctgttccttcccagagcagcattcacagttttgacagtgacctggaaagcctgtgcaatgctttgttgaaaaccaccatagaatctcacaccaaatccttgcccaaagtaccagccaaactgtcccccatgaaacaggcacaactgagaaacttcttggccaagaggaagaccccaccagtgagatccactgctccagccagcctgtctcgatcagcctttctgtctcagagatattatgaagacttggatgaagtcagctcaacgtcatctgtctcccagtctctggagagtgaagatgcacggacgtcctgtaaagatgacgaggcagtggttcaggcccctcggcacgcccccgtggttcgcactccttccatccagcccagtctcttgccccatgcagcaccttttgctaaatctcacctggttcatggttcttcacctggtgtgatgggaacttcagtggctacatctgctagcaaaattattcctcaaggggccgatagcacaatgcttgccacgaaaaccgtgaaacatggtgcacctagtccttcccaccccatctcagccccgcaggcagctgccgcagcagcactcaggcggcagatggccagtcaggcaccagctgtaaacactttgactgaatcaacgttgaagaatgtccctcaagtggtaaatgtgcaggaattgaagaataaccctgcaaccccttctacagccatgggttcttcagtgccctactccacagccaaaacacctcacccagtgttgaccccagtggctgctaaccaagccaagcaggggtctctaataaattcccttaagccatctgggcctacaccagcatccggtcagttatcatctggtgacaaagcttcagggacagccaagatagaaacagctgtgacttcaaccccatctgcttctgggcagttcagcaagcctttctcattttctccatcagggactggctttaattttgggataatcacaccaacaccgtcttctaatttcactgctgcacaaggggcaacaccctccactaaagagtcaagccagccggacgcattctcatctggtgggggaagcaaaccttcttatgaggccattcctgaaagctcacctccctcaggaatcacatccgcatcaaacaccaccccaggagaacctgccgcatctagcagcagacctgtggcaccttctggaactgctctttccaccacctctagtaagctggaaaccccaccgtccaagctgggagagcttctgtttccaagttctttggctggagagactctgggaagtttttcaggactgcgggttggccaagcagatgattctacaaaaccaaccaataaggcttcatccacaagcctaactagtacccagccaaccaagacgtcaggcgtgccctcagggtttaattttactgcccccccggtgttagggaagcacacggagccccctgtgacatcctctgcaaccaccacctcagtagcaccaccagcagccaccagcacttcctcaactgccgtttttggcagtctgccagtcaccagtgcaggatcctctggggtcatcagttttggtgggacatctctaagtgctggcaagactagtttttcatttggaagccaacagaccaatagcacagtgcccccatctgccccaccaccaactacagctgccactccccttccaacatcattccccacattgtcatttggtagcctcctgagttcagcaactaccccctccctgcctatgtccgctggcagaagcacagaagaggccacttcatcagctttgcctgagaagccaggtgacagtgaggtctcagcatcagcagcctcacttctagaggagcaacagtcagcccagcttccccaggctcctccgcaaacttctgactctgttaaaaaagaacctgttcttgcccagcctgcagtcagcaactctggcactgcagcatctagtactagtcttgtagcactttctgcagaggctaccccagccaccacgggggtccctgatgccaggacggaggcagtaccacctgcttcctccttttctgtgcctgggcagactgctgtcacagcagctgctatctcaagtgcaggccctgtggccgtcgaaacatcaagtacccccatagcctccagcaccacgtccattgttgctcccggcccatctgcagaggcagcagcatttggtaccgtcacttctggctcatccgtctttgctcagcctcctgctgccagttctagctcagctttcaaccagctcaccaacaacacagccactgccccctctgccacgcccgtgtttgggcaagtggcagccagcaccgcaccaagtctgtttgggcagcagactggtagcacagccagcacagcagctgccacaccacaggtcagcagctcagggtttagcagcccagcttttggtaccacagccccaggggtctttggacagacaaccttcgggcaggcctcagtctttgggcagtcggcgagcagtgctgcaagtgtcttttccttcagtcagcctgggttcagttccgtgcctgccttcggtcagcctgcttcctccactcccacatccaccagtggaagtgtctttggtgccgcctcaagtaccagtagctccagttccttctcatttggacagtcttctcccaacacaggaggggggctgtttggccaaagcaacgctcctgcttttgggcagagtcctggctttggacagggaggctctgtctttggtggtacctcagctgccaccacaacagcagcaacctctgggttcagcttttgccaagcttcaggttttgggtctagtaatactggttctgtgtttggtcaagcagccagtactggtggaatagtctttggccagcaatcatcctcttccagtggtagcgtgtttgggtctggaaacactggaagagggggaggtttcttcagtggccttggaggaaaacccagtcaggatgcagccaacaaaaacccattcagctcggccagtgggggctttggatccacagctacctcaaatacctctaacctatttggaaacagtggggccaagacatttggtggatttgccagctcgtcgtttggagagcagaaacccactggcactttcagctctggaggaggaagtgtggcatcccaaggctttgggttttcctctccaaacaaaacaggtggcttcggtgctgctccagtgtttggcagccctcctacttttgggggatcccctgggtttggaggggtgccagcattcggttcagccccagcctttacaagccctctgggctcgacgggaggcaaagtgttcggagagggcactgcagctgccagcgcaggaggattcgggtttgggagcagcagcaacaccacatccttcggcacgctcgcgagtcagaatgcccccactttcggatcactgtcccaacagacttctggttttgggacccagagtagcggattctctggttttggatcaggcacaggaggtctgtccagggttttggtggctggcgaagctgagggcgtgtcagcaggcctttcgatccctgggaccaaccgcatcctcagcttcttccccgagaaatgctggagcaggctgttcagaccgacgttgccatcaaaacacatacacccagaaagaaacaacagaaaccaaaactcacaaggcgcatgattacttgttttatatttcatgttgggttttccctcccactattaaacagtctgtttccgtac

SEQ ID NO: 2818 - DNA, 3362 bp, Homo sapiens
gccggagcccggaccaggcgcctgtgcctcctcctcgtccctcgccgcgtccgcgaagcctggagccggcgggagccccgcgctcgccatgtcgggcgagctcagcaacaggttccaaggagggaaggcgttcggcttgctcaaagcccggcaggagaggaggctggccgagatcaaccgggagtttctgtgtgaccagaagtacagtgatgaagagaaccttccagaaaagctcacagccttcaaagagaagtacatggagtttgacctgaacaatgaaggcgagattgacctgatgtctttaaagaggatgatggagaagcttggtgtccccaagacccacctggagatgaagaagatgatctcagaggtgacaggaggggtcagtgacactatatcctaccgagactttgtgaacatgatgctggggaaacggtcggctgtcctcaagttagtcatgatgtttgaaggaaaagccaacgagagcagccccaagccagttggcccccctccagagagagacattgctagcctgccctgaggaccccgcctggactccccagccttcccaccccatacctccctcccgatcttgctgcccttcttgacacactgtgatctctctctctctcatttgtttggtcattgagggtttgtttgtgttttcatcaatgtctttgtaaagcacaaattatctgccttaaaggggctctgggtcggggaatcctgagccttgggtcccctccctctcttcttccctccttccccgctccctgtgcagaagggctgacatcaaaccaaaaactagagggggcagggccagggcagggaggcttccagcctgtgttcccctcacttggaggaaccagcactctccatcctttcagaaagtctccaagccaagttcaggctcactgacctggctctgacgaggaccccaggccactctgagaagaccttggagtagggacaaggctgcagggcctctttcgggtttccttggacagtgccatggctccagtgctctggtgtcacccaggacacagccactcggggccccgctgccccagctgatccccactcattccacacctcttctcatcctcagtgatgtgaaggtgggaaggaaaggagcttggcattgggagcccttcaagaaggtaccagaaggaaccctccagtcctgctctctggccacacctgtgcaggcagctgagaggcagcgtgcagccctactgtcccttactggggcagcagagggcttcggaggcagaagtgaggcctggggttttgggggaaaggtcagctcagtgctgttccaccttttagggaggttactgaggggaccaggatgggagaatgaggagtaaaatgctcacggcaaagtcagcagcactggtaagccaagactgagaaatacaaggttgcttgtctgaccccaatctgcttgaaacctgactctgcttctctcatttgtcttcctaccctactcacataattcactcattgactcactcattcaccagatatttattgacctgctattataagctttacatcctcccatgttgtcctggcatgtgcagtatacacggtctaactcatctctccccagatctctcagaaccttgagcttgggaattgaactggggtcacctgtgtcctttcttatggactcgcaggattttagaaccctaatgcaccctggagggtagctgggccagacttctcatttcacaggtgaggagactggtgccccacagggattaagtgccttgcccaaggtcaggcttatctccagagggaggtgccctggactggggcccagatgttcagggaccctgcctacacctcatttccagtgtgggctgccttagttagttatgagaacagggaagggctgggaagagacagcctccaaggtcaacacttggagagggtttcacttgctctgaagaccctggtccaggattcgccctctcccatgccttcaagtcagcatcaggcttagggcaaagaccaggcctctgaagctgcctcttgtaattcatgcaggaagatgtcaaagtcagccccatcttggctgatcagggtgttcagccttaaccccacctgtgttctgaagtctcttaccctacctgctcaggactgagacagttattcactgaacatatttattaagcacttgctgtaggccaacagttaagaatccaataatgaaatggacagattcatggaacttagagtccaataggaaagtgagacccagacaatgacaatgagataaatgttaggaagggggaggtatggggtgacttccctgcagtcctgggggcctagatgggcccaagactgggtgagagtcttggcagagcctttgcaacaccttaagtggacaggactgggaggtcttggtggttggagccaacgtgggttccctgcggctccttagtcacctctgatagcagattgagggaggaaaacaggtaaggcatgaggaaatggccaggttgggttaacccactggtttcaaccagttcaggaatgaggttatttggccatgactggctgatcttgagctcaaggatctgcttcaaatgcacacaggcctagttgaagtttaaaccccagcaaaacattcctccctgtaaatggaaaatcctacttctacccccaccctgccctgttttttgttttttttttccccaagatcattagatgtcctcacccctcctcactgcctctcctctctgggacaggctgggacctttgaggaagataaagccttccttcactacccatcatattcagtgtccctgttcctcactcagagaggaaggcagaaccagtcaggcttatttcagtaagttccacagttctacaagactgcaggaattctccttaagggaggagagcaagcaggtgtggccccagcttctggaaatggcagaagagagggttttctcattgaatgggggtgggggctcgtgtgtcctgggaaaccccatcagtcccttcatttcttgagactcaactcctgggaggagagggtctcaagagttgtccctggaaggagggcgggggcagtctgcatctatttcaggttgtggctcttggttctaggactcttacttctctggctaagggctcagcttcttgggacttcaaccatcttctttctgaaagaccaaatctaatgtaaccagtaacgtgaggactgccaagtatggctttgtccctatgactcagaggagggtttgtcgggcaaattcaggtggatgaagtatgtgtgtgcgtgtgcatgggagtgtgcgtggactgggatatcatctctacagcctgcaaataaaccagacaaactt

SEQ ID NO: 2819 - DNA, 5437 bp, Homo sapiens
atggggcagcagcctggaaaagtacttggggaccaaagaaggccaagcttgcctgccctgcattttatcaaaggagcagggaagaaggaatcatcgaggcatgggggtccacactgcaatgtttttgtggaacaagcccttcagcggccagtagcatctgactttgagcctcagggtctgagtgaagccgctcgttggaactccaaggaaaaccttctcgctggacccagtgaaaatgaccccaaccttttcgttgcactgtatgattttgtggccagtggagataacactctaagcataactaaaggtgaaaagctccgggtcttaggctataatcacaatggggaatggtgtgaagcccaaaccaaaaatggccaaggctgggtcccaagcaactacatcacgccagtcaacagtctggagaaacactcctggtaccatgggcctgtgtcccgcaatgccgctgagtatctgctgagcagcgggatcaatggcagcttcttggtgcgtgagagtgagagcagtcctggccagaggtccatctcgctgagatacgaagggagggtgtaccattacaggatcaacactgcttctgatggcaagctctacgtctcctccgagagccgcttcaacaccctggccgagttggttcatcatcattcaacggtggccgacgggctcatcaccacgctccattatccagccccaaagcgcaacaagcccactgtctatggtgtgtcccccaactacgacaagtgggagatggaacgcacggacatcaccatgaagcacaagctgggcgggggccagtacggggaggtgtacgagggcgtgtggaagaaatacagcctgacggtggccgtgaagaccttgaaggaggacaccatggaggtggaagagttcttgaaagaagctgcagtcatgaaagagatcaaacaccctaacctggtgcagctccttggggtctgcacccgggagcccccgttctatatcatcactgagttcatgacctacgggaacctcctggactacctgagggagtgcaaccggcaggaggtgaacgccgtggtgctgctgtacatggccactcagatctcgtcagccatggagtacctggagaagaaaaacttcatccacagagatcttgctgcccgaaactgcctggtaggggagaaccacttggtgaaggtagctgattttggcctgagcaggttgatgacaggggacacctacacagcccatgctggagccaagttccccatcaaatggactgcacccgagagcctggcctacaacaagttctccatcaagtccgacgtctgggcatttggagtattgctttgggaaattgctacctatggcatgtccccttacccgggaattgacctgtcccaggtgtatgagctgctagagaaggactaccgcatggagcgcccagaaggctgcccagagaaggtctatgaactcatgcgagcatgttggcagtggaatccctctgaccggccctcctttgctgaaatccaccaagcctttgaaacaatgttccaggaatccagtatctcagacgaagtggaaaaggagctggggaaacaaggcgtccgtggggctgtgagtaccttgctgcaggccccagagctgcccaccaagacgaggacctccaggagagctgcagagcacagagacaccactgacgtgcctgagatgcctcactccaagggccagggagagagcgatcctctggaccatgagcctgccgtgtctccattgctccctcgaaaagagcgaggtcccccggagggcggcctgaatgaagatgagcgccttctccccaaagacaaaaagaccaacttgttcagcgccttgatcaagaagaagaagaagacagccccaacccctcccaaacgcagcagctccttccgggagatggacggccagccggagcgcagaggggccggcgaggaagagggccgagacatcagcaacggggcactggctttcacccccttggacacagctgacccagccaagtccccaaagcccagcaatggggctggggtccccaatggagccctccgggagtccgggggctcaggcttccggtctccccacctgtggaagaagtccagcacgctgaccagcagccgcctagccaccggcgaggaggagggcggtggcagctccagcaagcgcttcctgcgctcttgctccgcctcctgcgttccccatggggccaaggacacggagtggaggtcagtcacgctgcctcgggacttgcagtccacgggaagacagtttgactcgtccacatttggagggcacaaaagtgagaagccggctctgcctcggaagagggcaggggagaacaggtctgaccaggtgacccgaggcacagtaacgcctccccccaggctggtgaaaaagaatgaggaagctgctgatgaggtcttcaaagacatcatggagtccagcccgggctccagcccgcccaacctgactccaaaacccctccggcggcaggtcaccgtggcccctgcctcgggcctcccccacaaggaagaagctggaaagggcagtgccttagggacccctgctgcagctgagccagtgacccccaccagcaaagcaggctcaggtgcaccagggggcaccagcaagggccccgccgaggagtccagagtgaggaggcacaagcactcctctgagtcgccagggagggacaaggggaaattgtccaggctcaaacctgccccgccgcccccaccagcagcctctgcagggaaggctggaggaaagccctcgcagagcccgagccaggaggcggccggggaggcagtcctgggcgcaaagacaaaagccacgagtctggttgatgctgtgaacagtgacgctgccaagcccagccagccgggagagggcctcaaaaagcccgtgctcccggccactccaaagccacagtccgccaagccgtcggggacccccatcagcccagcccccgttccctccacgttgccatcagcatcctcggccctggcaggggaccagccgtcttccaccgccttcatccctctcatatcaacccgagtgtctcttcggaaaacccgccagcctccagagcggatcgccagcggcgccatcaccaagggcgtggtcctggacagcaccgaggcgctgtgcctcgccatctctaggaactccgagcagatggccagccacagcgcagtgctggaggccggcaaaaacctctacacgttctgcgtgagctatgtggattccatccagcaaatgaggaacaagtttgccttccgagaggccatcaacaaactggagaataatctccgggagcttcagatctgcccggcgacagcaggcagtggtccagcggccactcaggacttcagcaagctcctcagttcggtgaaggaaatcagtgacatagtgcagaggtagcagcagtcaggggtcaggtgtcaggcccgtcggagctgcctgcagcacatgcgggctcgcccatacccgtgacagtggctgacaagggactagtgagtcagcaccttggcccaggagctctgcgccaggcagagctgagggccctgtggagtccagctctactacctacgtttgcaccgcctgccctcccgcaccttcctcctccccgctccgtctctgtcctcgaattttatctgtggagttcctgctccgtggactgcagtcggcatgccaggacccgccagccccgctcccacctagtgccccagactgagctctccaggccaggtgggaacggctgatgtggactgtctttttcatttttttctctctggagcccctcctcccccggctgggcctccttcttccacttctccaagaatggaagcctgaactgaggccttgtgtgtcaggccctctgcctgcactccctggccttgcccgtcgtgtgctgaagacatgtttcaagaaccgcatttcgggaagggcatgcacgggcatgcacacggctggtcactctgccctctgctgctgcccggggtggggtgcactcgccatttcctcacgtgcaggacagctcttgatttgggtggaaaacagggtgctaaagccaaccagcctttgggtcctgggcaggtgggagctgaaaaggatcgaggcatggggcatgtcctttccatctgtccacatccccagagcccagctcttgctctcttgtgacgtgcactgtgaatcctggcaagaaagcttgagtctcaagggtggcaggtcactgtcactgccgacatccctcccccagcagaatggaggcaggggacaagggaggcagtggctagtggggtgaacagctggtgccaaatagccccagactgggcccaggcaggtctgcaagggcccagagtgaaccgtcctttcacacatctgggtgccctgaaagggcccttcccctcccccactcctctaagacaaagtagattcttacaaggccctttcctttggaacaagacagccttcacttttctgagttcttgaagcatttcaaagccctgcctctgtgtagccgccctgagagagaatagagctgccactgggcacctgcgcacaggtgggaggaaagggcctggccagtcctggtcctggctgcactcttgaactgggcgaatgtcttatttaattaccgtgagtgacatagcctcatgttctgtgggggtcatcagggagggttaggaaaaccacaaacggagcccctgaaagcctcacgtatttcacagagcacgcctgccatcttctccccgaggctgccccaggccggagcccagatacgggggctgtgactctgggcagggacccggggtctcctggaccttgacagagcagctaactccgagagcagtgggcaggtggccgcccctgaggcttcacgccgggagaagccaccttcccaccccttcataccgcctcgtgccagcagcctcgcacaggccctagctttacgctcatcacctaaacttgtactttatttttctgatagaaatggtttcctctggatcgttttatgcggttcttacagcacatcacctctttgcccccgacggctgtgacgcagccggagggaggcactagtcaccgacagcggccttgaagacagagcaaagcgcccacccaggtcccccgactgcctgtctccatgaggtactggtcccttccttttgttaacgtgatgtgccactatattttacacgtatctcttggtatgcatcttttatagacgctcttttctaagtggcgtgtgcatagcgtcctgccctgccccctcgggggcctgtggtggctccccctctgcttctcggggtccagtgcattttgtttctgtatatgattctctgtggttttttttgaatccaaatctgtcctctgtagtattttttaaataaatcagtgtttacattag

SEQ ID NO: 2820 - DNA, 2010 bp, Homo sapiens
ggcacgaggagatggcgatggagatgaggcttccagtggctcgcaagcctcttagcgagagactgggccgcgacactaagaaacatctagtggtgccgggggatacaatcactacggacacaggattcatgcggggccatggaacgtatatgggagaagagaagctcattgcatctgttgctggctctgtggagagagtaaacaagttgatctgtgtgaaagctttgaaaaccagatacattggtgaagtaggagacatcgtagtgggacgaatcacagaggttcaacagaagaggtggaaggtggagaccaactccaggctggattcggtcttgctgctctcgtccatgaaccttcctggaggagagctgaggagaagatctgcagaagatgagcttgcaatgagaggtttcttacaggaaggggaccttatcagtgctgaggtccaggcagtgttctctgacggagctgtctctttgcacacgaggagcctgaaatatggaaaactaggtcagggggttttggtccaggtttccccctccctggtgaaacggcagaagacccactttcatgatttgccatgtggtgcctcagtgattctcggtaacaacggcttcatctggatttacccaacacctgagcacaaagaagaggaagcagggggcttcattgcaaacctggagcctgtctctcttgctgatcgagaggtgatatcccggcttcggaactgcatcatctcgctggtaactcagaggatgatgctgtatgataccagcatcctgtactgctatgaagcatcccttccacatcagatcaaagacatcttaaagccagaaataatggaggagattgtgatggaaacacgccagaggcttttggaacaggagggataaggaggtgctccagaagcacgggactgtggaccttgcaggagtgaagactgtgatgtgtggtccccatatgtggctcagcaaagactcgagagatcatccctttgtctgcattgacggccctgtgacggcctccagcccacaggcctgctttctcctgtcctaacaccaagcctgggtggcagatgaacagtgcttccttgggttgccagctgagtcccggtattagggaatagtttcagctctttcaaagtgcacagtgttacagtcgaatgggctcccatcctggaataatatggagaatcctttgtcttccactcactgtcattcacaaggcacagtgccccatgaaattgccccaatagaaaacatggcatccctgacctccaaatggtctgttttggcctccattcctatatcctttaaatgactgagaatgcagctggtaaagttggaagaataaagttaaccaagcaggccaggcacggtggctcacgcctataatcccagcacttagggaggccaaggcgggcagatcacctgaggtcaatagttcgagaccagcctggccaacaaggtgaaaccccatctctactaaaaatacaaaaaattagccaggtgtggtggtgtgcacctgtagtcccagctatttgggaggctgaggtgggagaatcacttgaacctgggaggcggaggttgcagtgagctgaaatcgcgtaccacactccagcctgggtgacagagcgagactgtgtttcaaagaaaaaaaaaaacaagcagccttttgcttggttggaatctgattttctgttgcgtgttccttgtagccatagatgtgattatgtccacaccgggctgccttaatctgtcctgcttggagagtgacttgtaagatgctgaattattcatgataatacagtgaatgttctgggtccatgtactcagataaacatgaagaaaataagcaaagaaaaatggagactgggaaagcaaagctgttttcatcctataattgaagtagtgtggagcattaacttgtggatgattcagagttaaaagataaaaagacgccagagttctcgctgaagaatgtgagaaaaaaaaaaaaaaaaaaaaaaaa

SEQ ID NO: 2821 - protein, 293 aa, Homo sapiens
MAMEMRLPVARKPLSERLGRDTKKHLVVPGDTITTDTGFMRGHGTYMGEEKLIASVAGSVERVNKLICVKALKTRYIGEVGDIVVGRITEVQQKRWKVETNSRLDSVLLLSSMNLPGGELRRRSAEDELAMRGFLQEGDLISAEVQAVFSDGAVSLHTRSLKYGKLGQGVLVQVSPSLVKRQKTHFHDLPCGASVILGNNGFIWIYPTPEHKEEEAGGFIANLEPVSLADREVISRLRNCIISLVTQRMMLYDTSILYCYEASLPHQIKDILKPEIMEEIVMETRQRLLEQEG

SEQ ID NO: 2822 - DNA, 1595 bp, Homo sapiens
ggcacgaggcttataacctgggatgggcacccctgccagtcctgctctgccgcctgccaccgctgcccgagcccgacgctatgtccagcaaaggctccgtggttctggcctacagtggcggcctggacacctcgtgcatcctcgtgtggctgaaggaacaaggctatgacgtcattgcctatctggccaacattggccagaaggaagacttcgaggaagccaggaagaaggcactgaagcttggggccaaaaaggtgttcattgaggatgtcagcagggagtttgtggaggagttcatctggccggccatccagtccagcgcactgtatgaggaccgctacctcctgggcacctctcttgccaggccctgcatcgcccgcaaacaagtggaaatcgcccagcgggagggggccaagtatgtgtcccacggcgccacaggaaaggggaacgatcaggtccggtttgagctcagctgctactcactggccccccagataaaggtcattgctccctggaggatgcctgaattctacaaccggttcaagggccgcaatgacctgatggagtacgcaaagcaacacgggattcccatcccggtcactcccaagaacccgtggagcatggatgagaacctcatgcacatcagctacgaggctggaatcctggagaaccccaagaaccaagcgcctccaggtctctacacgaagacccaggacccagccaaagcccccaacacccctgacattctcgagatcgagttcaaaaaaggggtccctgtgaaggtgaccaacgtcaaggatggcaccacccaccagacctccttggagctcttcatgtacctgaacgaagtcgcgggcaagcatggcgtgggccgtattgacatcgtggagaaccgcttcattggaatgaagtcccgaggtatctacgagaccccagcaggcaccatcctttaccacgctcatttagacatcgaggccttcaccatggaccgggaagtgcgcaaaatcaaacaaggcctgggcttgaaatttgctgagctggtgtataccggtttctggcacagccctgagtgtgaatttgtccgccactgcatcgccaagtcccaggagcgagtggaagggaaagtgcaggtgtccgtcctcaagggccaggtgtacatcctcggccgggagtccccactgtctctctacaatgaggagctggtgagcatgaacgtgcagggtgattatgagccaactgatgccaccgggttcatcaacatcaattccctcaggctgaaggaatatcatcgtctccagagcaaggtcactgccaaatagacccgtgtacaatgaggagctggggcctcctcaatttgcagatcccccaagtacaggcgctaattgttgtgataatttgtaattgtgacttgttctccccggctggcagcgtagtggggctgccaggccccagctttgttccctggtccccctgaagcctgcaaacgttgtcatcgaagggaagggtggggggcagctgcggtggggagctataaaaatgacaattaaaagagacactagtcttttatttctaaaaaaaaaaaaaaaaaaaaaaaa

SEQ ID NO: 2823 - protein, 412 aa, Homo sapiens
MSSKGSVVLAYSGGLDTSCILVWLKEQGYDVIAYLANIGQKEDFEEARKKALKLGAKKVFIEDVSREFVEEFIWPAIQSSALYEDRYLLGTSLARPCIARKQVEIAQREGAKYVSHGATGKGNDQVRFELSCYSLAPQIKVIAPWRMPEFYNRFKGRNDLMEYAKQHGIPIPVTPKNPWSMDENLMHISYEAGILENPKNQAPPGLYTKTQDPAKAPNTPDILEIEFKKGVPVKVTNVKDGTTHQTSLELFMYLNEVAGKHGVGRIDIVENRFIGMKSRGIYETPAGTILYHAHLDIEAFTMDREVRKIKQGLGLKFAELVYTGFWHSPECEFVRHCIAKSQERVEGKVQVSVLKGQVYILGRESPLSLYNEELVSMNVQGDYEPTDATGFININSLRLKEYHRLQSKVTAK

SEQ ID NO: 2824 - DNA, 1436 bp, Homo sapiens
aaaaatcgaggcggggctgagaggctgcggcggctgactaggttttcggaccgcggcgcggcggggaagagagactgcggcgggagggccaggccgtgggagagacgcgggaaagtgcgggtcgcagaggcacttgaccaccccgccctaggccgacccggcggacgcggcgtctggtgtgcgggcgctggggcgggtcccaggtctccccgctgcgctgcttgaggctcagccatggcccagcagagagccctgccccagagcaaggagacgctgctgcagtcctacaacaagcggctgaaggacgacattaagtccatcatggacaacttcaccgagatcatcaagaccgccaagattgaggacgagacgcaggtgtcacgggccactcagggtgaacaggacaattacgagatgcatgtgcgagccgccaacatcgtccgagccggcgagtccctgatgaagctggtgtccgacctcaagcagttcctgatcctcaatgacttcccctccgtgaacgaggccattgaccagcgcaaccagcagctgcgcacactgcaggaggagtgcgaccggaagctcatcacgctgcgagacgagatctccattgacctctacgagctggaggaggagtattactcgtccagctcaagcctttgcgaagctaatgacctgcctctgtgcgaagcttacgggaggctggacctcgacacagactctgctgatggcctctcggcccctctgctggcgtccccggagcccagtgctggccccctacaggtggcagcccctgcccactcccatgctggtggccctggccccactgagcacgcctgagcctccggggccacgcttcgttctcaggaacaaaacctgaggcagccctttggatgccctcacagccttgcttctctcagcctaggttcccatttggggacttcaggaccccagagccactaggacttccttgggaagcccgttagcccagggtgggtcccaccaggacagtagggaaacagttgtttccctagccatttccgaatagcccatcattccgagtcatcatctctgtttgctgccttcctggccagccaggtggaagaaagtttccaagctaggtctggcccgttggggatctcagcagtggggcaggagggtgcctgatttcggggagtcctgacccgagcctgttgtcagagttgggaggggctctgagcagtgttgggcaggccgggtctcccatcccgaggccagcgttcctgtgcagagccccatccactggttcttgccctgagccacatatgtctgtgccatgggctgagtgccacgacaggcccgtgtgacagctgctgcccacgcatgtggaagctaggtgggactcattcctaattctgccgttgtaatgagacttgattaaaacaccgccacttttttgc

SEQ ID NO: 2825 - DNA, 1194 bp, Homo sapiens
ggagaagggaggcgcctggctgtatcccccgcaggccctcttccgagagccttcctcctcgggcagtgcgttctggggctgtgctgctcctgttaccttctgaaaccttcgaccgtttgagctggaggggccctgagaaatcagagtctacgtatcatttacttagggggaaacttaggctggagacagggaggccttccactctgccccattagcttagaaaatcaagattcagtccagcagatgcagagtccatgtccatcttgtgccttctcctggacaaacctttccttcctggtggtggatttaaaatactcctttctgcccattggccatgctgggagccacagctatccagagccagcatgacctggggcttggtttccctgccctgggctcagtggcactgctgagctgcagcagtcctagagttttccagggggttctgagggaatctttggtccccagtactcattaactcagcagacatgaggcagcatttcctccacactagggtggctgagaggggtcctggggtgtttcagacccttctgggcatctccttccacagctgttcagtttgtcggtctctttgaggcagccaccgtccctgagggcccctgcacagagcagctgtgggcctgtaattcagcctgcctgccttgccttggggcagggagagagggaacctgctcacggccctgcagcagagcagggcgcaaacccaggacatctgtgccaggcttcccatgccctcccccaacagtccctcagcttcacccagcggggcttccaggccagcctgtgtcccctcccgcaggcctcctgtccacaccagcgccccctggggggcctcacacagcccctggctttcctctctgcctgctcctgtctctccctggggtttctggtggtggaaaagctcaagcctttgcgaagctaatgacctgcctctgtgcgaagcttacgggaggctggacctcgacacagactctgctgatggcctctcggcccctctgctggcgtccccggagcccagtgctggccccctacaggtggcagcccctgcccactcccatgctggtggccctggccccactgagcacgcctgagcctccggggccacgcttcgttctcaggaacaaaacctgaggcagccctttggatgccctcacagccttgcttctctcagcc

SEQ ID NO: 2826 - DNA, 890 bp, Homo sapiens
tttcctttctctctcctcccgccgcccaagatgccgaaaggaaagaaggccaagggaaagaaggtggctccggccccagctgtcgtgaagaagcaggaggctaagaaagtggtgaatcccctgtttgagaaaaggcctaagaattttggcattggacaggacatccagcccaaaagagacctcacccgctttgtgaaatggccccgctatatcaggttgcagcggcagagagccatcctctataagcggctgaaagtgcctcctgcgattaaccagttcacccaggccctggaccgccaaacagctactcagctgcttaagctggcccacaagtacagaccagagacaaagcaagagaagaagcagagactgttggcccgggccgagaagaaggctgctggcaaaggggacgtcccaacgaagagaccacctgtccttcgagcaggagttaacaccgtcaccaccttggtggagaacaagaaagctcagctggtggtgattgcacacgacgtggatcccatcgagctggttgtcttcttgcctgccctgtgtcgtaaaatgggggtcccttactgcattatcaagggaaaggcaagactgggacgtctagtccacaggaagacctgcaccactgtcgccttcacacaggtgaactcggaagacaaaggcgctttggctaagctggtggaagctatcaggaccaattacaatgacagatacgatgagatccgccgtcactggggtggcaatgtcctgggtcctaagtctgtggctcgtatcgccaagctcgaaaaggcaaaggctaaagaacttgccactaaactgggttaaatgtacactgttgagttttctgtacataaaaataattgaaataatacaaattttccttc

SEQ ID NO: 2827 - protein, 266 aa, Homo sapiens [sequence omitted]

SEQ ID NO: 2828 - DNA, 2985 bp, Homo sapiens
ggagccgcagccgacgcggagcgaggccggccgccgggcacttcctgtggaggccgcagcgggtgcgggcgccgacgggcgagagccagcgagcgagcgagcgagccgagccgagcctcccgccgtcgccatgggccagaacgacctgatgggcacggccgaggacttcgccgaccagttcctccgtgtcacaaagcagtacctgccccacgtggcgcgcctctgtctgatcagcaccttcctggaggacggcatccgtatgtggttccagtggagcgagcagcgcgactacatcgacaccacctggaactgcggctacctgctggcctcgtccttcgtcttcctcaacttgctgggacagctgactggctgcgtcctggtgttgagcaggaacttcgtgcagtacgcctgcttcgggctctttggaatcatagctctgcagacgattgcctacagcattttatgggacttgaagtttttgatgaggaacctggccctgggaggaggcctgttgctgctcctagcagaatcccgttctgaagggaagagcatgtttgcgggcgtccccaccatgcgtgagagctcccccaaacagtacatgcagctcggaggcagggtcttgctggttctgatgttcatgaccctccttcactttgacgccagcttcttttctattgtccagaacatcgtgggcacagctctgatgattttagtggccattggttttaaaaccaagctggctgctttgactcttgttgtgtggctctttgccatcaacgtatatttcaacgccttctggaccattccagtctacaagcccatgcatgacttcctgaaatacgacttcttccagaccatgtcggtgattgggggcttgctcctggtggtggccctgggccctgggggtgtctccatggatgagaagaagaaggagtggtaacagtcacagatccctacctgcctggctaagacccgtggccgtcaaggactggttcggggtggattcaacaaaactgccagcttttatgtatcctcttcccttcccctcccttggtaaaggcacagatgttttgagaactttatttgcagagacacctgagaatcgatggctcagtctgctctggagccacagtctggcgtctgacccttcagtgcaggccagcctggcagctggaagcctcccccacgccgaggctttggagtgaacagcccgcttggctgtggcatctcagtcctatttttgagtttttttgtgggggtacaggagggggccttcaagctgtactgtgagcagacgcattggtattatcattcaaagcagtctccctcttatttgtaagtttacatttttagcggaaactactaaattattttgggtggttcagccaaacctcaaaacagttaatctccctggtttaaaatcacaccagtggctttgatgttgtttctgccccgcattgtattttataggaatagtgaaaacatttagggacacccaaagaatgatgcagtattaaaggggtggtagaagctgctgtttatgataaaagtcatcggtcagaaaatcagcttggattggtgccaagtgttttattgggtaacaccctgggagttttagtagcttgaggcaaggtggaggggcaagaagtccttggggaagctgctggtctgggtgctgctggcctccaagctggcagtgggaagggctagtgagaccacacaggggtagccccagcagcagcaccctgcaagccagcctggccagctgctcagaccagcttgcagagccgcagccgctgtgggcagggggtgtggcaggagctcccagcactggagacccacggactcaacccagttacctcacatggggccttttctgagcaaggtctcgaaagcgcaggccgccctggctgagcagcaccgccctttcccagctgcactcgccctgtggacagccccgacacaccactttcctgaggctgtcgctcactcagattgtccgtttgctatgccgaatgcagccaaaattcctttttacaatttgtgatgccttaccgatttgatcttaatcctgtatttaaagttttctaacactgccttatactgtgtttctctttttgggggagcttaactgcttgttgctccctgtcgtctgcaccatagtaaatgccacaagggtagtcgaacacctctctggcccctagacctatctggggacaggctggctcagcctgtctccagggctgctgcggcccagccccgagcctgcctccctcttggcctctcatccattggctctgcagggcaggggtgaggcaggtttctgctcataagtgcttttggaagtcacctacctttttaacacagccgaactagtcccaacgcgtttgcaaatattcccctggtagcctacttccttacccccgaatattggtaagatcgagcaatggcttcaggacatgggttctcttctcctgtgatcattcaagtgctcactgcatgaagactggcttgtctcagtgtttcaacctcaccagggctgtctcttggtccacacctcgctccctgttagtgccgtatgacagcccccatcaaatgaccttggccaagtcacggtttctctgtggtcaaggttggttggctgattggtggaaagtagggtggaccaaaggaggccacgtgagcagtcagcaccagttctgcaccagcagcgcctccgtcctagtgggtgttcctgtttctcctggccctgggtgggctagggcctgattcgggaagatgcctttgcagggaggggaggataagtgggatctaccaattgattctggcaaaacaatttctaagatttttttgctttatgtgggaaacagatctaaatctcattttatgctgtattttatatcttagttgtgtttgaaaacgttttgatttttggaaacacatcaaaataaataatggcgtttgttgtaaaaaaaaaaaaaaaaa

SEQ ID NO: 2829 - protein, 269 aa, Homo sapiens
MGQNDLMGTAEDFADQFLRVTKQYLPHVARLCLISTFLEDGIRMWFQWSEQRDYIDTTWNCGYLLASSFVFLNLLGQLTGCVLVLSRNFVQYACFGLFGIIALQTIAYSILWDLKFLMRNLALGGGLLLLLAESRSEGKSMFAGVPTMRESSPKQYMQLGGRVLLVLMFMTLLHFDASFFSIVQNIVGTALMILVAIGFKTKLAALTLVVWLFAINVYFNAFWTIPVYKPMHDFLKYDFFQTMSVIGGLLLVVALGPGGVSMDEKKKEW

SEQ ID NO: 2830 - DNA, 2760 bp, Homo sapiens
accccagccatgcccgccctcagtcgctgggccagcctgcccggccccagcatgcgggaggcagccttcatgtacagcacagcagtggccatcttcctggtcatcctggtggccgcactgcagggctcggctccccgtgagagccccctcccctatcacatccccctggacccggaggggtccctggagctctcatggaatgtcagctacacccaggaggccatccatttccagctcctggtgcggaggctcaaggctggcgtcctgtttgggatgtccgaccgtggcgagcttgagaacgcagatctcgtggtgctctggaccgatggggacactgcctattttgcggacgcctggagtgaccagaaggggcagatccacctggatccccagcaggactaccagctgctgcaggtgcagaggaccccagaaggcctgaccctgcttttcaagaggccctttggcacctgcgaccccaaggattacctcattgaggacggcactgtccacttggtctacgggatcctggaggagccgttccggtcactggaggccatcaacggctcgggcctgcagatggggctgcagagggtgcagctcctgaagcccaatatccccgaaccggagttgccctcagacgcgtgcaccatggaggtccaagctcccaatatccagatccccagccaggagaccacgtactggtgctacattaaggagcttccaaagggcttctctcggcaccacattatcaagtacgagcccatcgtcaccaagggcaatgaggcccttgtccaccacatggaagtcttccagtgcgcccccgagatggacagcgtcccccacttcagcgggccctgcgactccaagatgaaacccgaccgcctcaactactgccgccacgtgctggccgcctgggccctgggtgccaaggcattttactacccagaggaagccggccttgccttcgggggtccagggtcctccagatatctccgcctggaagttcactaccacaacccactggtgatagaaggacgaaacgactcctcaggcatccgcttgtactacacagccaagctgcggcgcttcaacgcggggatcatggagctgggactggtgtacacgccagtgatggccattccaccacgggagaccgccttcatcctcactggctactgcacggacaagtgcacccagctggcactgcctccctccgggatccacatcttcgcctctcagctccacacacacctgactgggagaaaggtggtcacagtgctggtccgggacggccgggagtgggagatcgtgaaccaggacaatcactacagccctcacttccaggagatccgcatgttgaagaaggtcgtgtcggtccatccgggagatgtgctcatcacctcctgcacgtacaacacggaagaccgggagctggccacagtggggggcttcgggatcctggaggagatgtgtgtcaactacgtgcactactacccccagacgcagctggagctctgcaagagcgctgtggacgccggcttcctgcagaagtacttccacctcatcaacaggttcaacaacgaggatgtctgcacctgccctcaggcgtccgtgtctcagcagttcacctctgttccctggaactccttcaaccgcgacgtactgaaggccctgtacagcttcgcgcccatctccatgcactgcaacaagtcctcagccgtccgcttccagggtgaatggaacctgcagcccctgcccaaggtcatctccacactggaagagcccaccccacagtgccccaccagccagggccgaagccctgctggccccaccgttgtcagcattggtgggggcaaaggctgaggggggacctactcctccccctcctccatgctgtccctgtgggctcacaccggcactgtgcactctactctgcgacgatccccatggaacagccctgcacgcccaggatgaaggggccagaccacgcccctgcctgagaccacggtccaatccagccttcttcccccagggtcccctgcatggctgagagggtgtgggtgccctgttgacctaccctggaccgagtggaccacgacctcgtccatttaaacccggctgactcagtgcagggacagcctgcacagtggtccagggtccagccctccgccagccctgttccgcctcactgggtgtggcctggcttctgggacaggcaccatgctgggccggggtgtggaatcaccgggaacgcccccgcccccgccccgctgctcccggtgtgcagcgggtgcgggtgccgcttaaacatttccctgctgagtggctcgtgtttcacagtgggcggcttccctgcgacggaggcaggaccaggcatttagctagttagagactcgcctgggaaattgctccattcctgagtaaacagatattttcgcccacctaaagggaagccctgacaacaactatcaccaaaagacgaggcggcaaagatccagcggggcttctgggcgccggttccacgtggggtggaattattagcaccagcttgcttctctgccggtggggccagcgctgaacagaccggggtggagtcagggctgtgctttccgcgtggttctgccacttagggagtgtgccttgggcgggccatttcacattcctgaccctcacttttctcatctgtaaaaccaggctgatgccgtgcgggctaatgagccaataaagctcacacttgggctggcacccactggaggtggg

SEQ ID NO: 2831 - protein, 603 aa, Homo sapiens
MREAAFMYSTAVAIFLVILVAALQGSAPRESPLPYHIPLDPEGSLELSWNVSYTQEAIHFQLLVRRLKAGVLFGMSDRGELENADLVVLWTDGDTAYFADAWSDQKGQIHLDPQQDYQLLQVQRTPEGLTLLFKRPFGTCDPKDYLIEDGTVHLVYGILEEPFRSLEAINGSGLQMGLQRVQLLKPNIPEPELPSDACTMEVQAPNIQIPSQETTYWCYIKELPKGFSRHHIIKYEPIVTKGNEALVHHMEVFQCAPEMDSVPHFSGPCDSKMKPDRLNYCRHVLAAWALGAKAFYYPEEAGLAFGGPGSSRYLRLEVHYHNPLVIEGRNDSSGIRLYYTAKLRRFNAGIMELGLVYTPVMAIPPRETAFILTGYCTDKCTQLALPPSGIHIFASQLHTHLTGRKVVTVLVRDGREWEIVNQDNHYSPHFQEIRMLKKVVSVHPGDVLITSCTYNTEDRELATVGGFGILEEMCVNYVHYYPQTQLELCKSAVDAGFLQKYFHLINRFNNEDVCTCPQASVSQQFTSVPWNSFNRDVLKALYSFAPISMHCNKSSAVRFQGEWNLQPLPKVISTLEEPTPQCPTSQGRSPAGPTVVSIGGGKG

SEQ ID NO: 2832 - DNA, 5327 bp, Homo sapiens
gatttctccacccaggtgaactcctccctcacctccccgacggggcgaggctccatggctgccccctcgctgcacccgtccctggggcctggcatcggctccccgggacagctgcattctcccatcagcaccctgagctcccccatcaacggcatgggcccgcctttctcggtcatcagctcccccatgggcccccactccatgtcggtgcccaccacacccaccctgggcttcagcactggcagcccccagctcagctcacctatgaaccccgtcagcagcagcgaggacatcaagccccccctgggcctcaatggcgtcctcaaggtccccgcccacccctcaggaaacatggcttccttcaccaagcacatctgcgccatctgcggggaccgctcctcaggcaagcactatggagtgtacagctgcgaggggtgcaagggcttcttcaagcggacggtgcgcaaggacctgacctacacctgccgcgacaacaaggactgcctgattgacaagcggcagcggaaccggtgccagtactgccgctaccagaagtgcctggccatgggcatgaagcgggaagccgtgcaggaggagcggcagcgtggcaaggaccggaacgagaatgaggtggagtcgaccagcagcgccaacgaggacatgccggtggagaggatcctggaggctgagctggccgtggagcccaagaccgagacctacgtggaggcaaacatggggctgaaccccagctcgccgaacgaccctgtcaccaacatttgccaagcagccgacaaacagcttttcaccctggtggagtgggccaagcggatcccacacttctcagagctgcccctggacgaccaggtcatcctgctgcgggcaggctggaatgagctgctcatcgcctccttctcccaccgctccatcgccgtgaaggacgggatcctcctggccaccgggctgcacgtccaccggaacagcgcccacagcgcaggggtgggcgccatctttgacagggtgctgacggagcttgtgtccaagatgcgggacatgcagatggacaagacggagctgggctgcctgcgcgccatcgtcctctttaaccctgactccaaggggctctcgaacccggccgaggtggaggcgctgagggagaaggtctatgcgtccttggaggcctactgcaagcacaagtacccagagcagccgggaaggttcgctaagctcttgctccgcctgccggctctgcgctccatcgggctcaaatgcctggaacatctcttcttcttcaagctcatcggggacacacccattgacaccttccttatggagatgctggaggcgccgcaccaaatgacttaggcctgcgggcccatcctttgtgcccacccgttctggccaccctgcctggacgccagctgttcttctcagcctgagccctgtccctgcccttctctgcctggcctgtttggactttggggcacagcctgtcactgctctgcctaagagatgtgttgtcaccctccttatttctgttactacttgtctgtggcccagggcagtggctttcctgaggcagcagccttcgtggcaagaactagcgtgagcccagccaggcgcctccccaccgggctctcaggacaccctgccacaccccacggggcttgggcgactacagggtcttcgggccccagccctggagctgcaggagttgggaacggggcttttgtttccgttgctgtttatcgatgctggttttcagaattcctgtgtggccctcctgtctggagtgacatcttcatctgctctgaatactggtgcccagccagcccgtgacagcttccccctaatcaggaggggacagctgggggcgcaagctggtgtgtcatcagcaaagacctcagccgcctcggggatgagaggggactcgtggggcaagcaagctgccctgtgctctgagtgagggggaaggtagcccctttttccaaagataactcacagttttgccctcgagccaatgagaacatgagctgccctctgtgcaaggtttcggggccacctccaggctgcaggggcgggtcactcacccccctgttttctctctgccttggtgttctggtttcagactcccgactccccgttcagaccagagtgccccggcccctccccagcctgagtcttctccttgctctgcggggtgggctgaggcttgtccttgtttcctgcagggctggccctggctcgggcagggtggggcatcaccacctcactggccttgctggaggcacagggctctgcggacctgcagccatctgtgaggcccgcggggatgggaggggaggagggtggcctgttggtttccctcagagggggcaggtggcctggagagagaggggctcaggaactgggagcctcgtgggtggggcagatgctccgcggcctggagtggctctgccggggcattggtgggacccctgctcaggccttctctctggctgccagttgtgtctaaaagactcttggaatctgagaacccggagtcgcagcgccctcgggcctgggccacacgcaggccctggtgggaccacccagcctggtattgtccacggacagcgttgttcacccagagccttacttgggagcctcactgaacgcctgctctggttgaaggtggggtgggggcggggcttggggcctccctggctcagcccagtgcggcctggcgctcctcccgcaggctctgcccccgggctccggtggtgcggggccctctcaggttgaactcgcctcttttgcactggaaggccctccctttggcctgagtacttttcccgttcacgcctcagtcccgtggacccagcctttgtcagtggcaggtgcctgaacagagggtggatgggggggataccggagggggtcttgtcttcccagccgcagtctaggaatgatgcgggggggtggacgccttctccatagtctttccccacctggagcaggggcttcctcagtggtgaggggagctgcctacaggttggaccgggaggcagtggcttggagaggcagctttccagccttggtggggaagaaagtgtccattctttgccttcctggagctcccagccagagctgagcttaggcacccgagtggagcctgcagctgagtctgtgcccgagacaggctgtcagagattccagaagcctctcctccccgccgccctccacccctgcctttcagcgttgtggatccctagaggtggccccctgcccgatccaccgtcctgaggcagagtgttgagcctcatacctgtaccaggtccccggccagctgggcccctcccaggcactgccaggaagccccagctgcccctggcgggtgtggtggaaatggcaggagggtgcaggtactcttggggccccagcggtgggagtgcaaaagacccaacgccaacacctggtgccttctgcagccagcgcccacccatccgtgcccggacccttgggaatgcccgcggctccagaggaaaaagcccagggacggggcctccgttgcggggggtcggctgcttcttgggaactttgtcgtttccggcgctggctggctggctggctggctgtaaagcactgaagccccccggccgccaacccctgaaagcagaacctggcctccctggccacagcagccttacccaccgctctacgtgtcccgggcacttcccgcagccttcccgtccctttctcatcggccttgtagttgtacagtgctgttggtttgaaaaggtgatgtgtggggagtgcggctcatcactgagtagagaggtagaatttctatttaaccagacctgtagtagtattaccaatccagttcaattaaggtgattttttgtaattattattattttggtgggacaatctttaattttctaaagatagcactaacatcagctcattagccacctgtgcctgtccccgccttggcccggctggatgaagcggcttccccgcagggcccccacttcccagtggctgcttcctggggacccagggcaccccggcaccttcaggcacgctcctcagctggtcacctcccggctttgccgttcagatggggctcctgaggctcaggagtgaagatgccacagagccgggctcccctaggctgcgtcgggcatgcttggaagctggcctgccaggaccttccaccctggggcctgtgtcagccgccggccctccgcaccctggaagcacacggcctctgggaaggacagccctgaccttcggttttccgagcacggtgtttcccaagaattctgggctggcggcctggtggcagtgctggagatgaccccgagcccctccccgtggggcacccaggagggccctgccggaatgtgcagcctgtgggtagtcggctggtgtccctgtcgtggagctggggtgcgtgatctggtgctcgtccacgcaggtgtgtggtgtaaacatgtatgtgctgtacagagagacgcgtgtggagagagccgcacaccagcgccacccaggaaaggcggagcggttaccagtgttttgtgtttatttttaatcaagacgtttcccctgttttcctataaatttgcttcgtgtaagcaagtacataaggaccctcctttggtgaaatccgggttcgaatgaatatctcaaggcaggagatgcatctattttaagatgctttggagcagacagctttagccgttcccaatccttagcaatgccttagctgggacgcatagctaatactttagagaggatgacagatccataaagagagtaaagataagagaaaatgtctaaagcatctggaaaggtaaaaaaaaaaaatctatttttgtacaaatgtaattttatccctcatgtatacttggatatggcggggggagggctgggactgtttcgtttctgcttctagagattgaggtgaaagcttcgtccgagaaacgccaggacagacgatggcagaggagagggctcctgtgacggcggcgaggcttgggaggaaaccgccgcaatgggggtgtcttccctcggggcaggagggtgggcctgaggctttcaagggttttcttccctttcgagtaatttttaaagccttgctctgttgtgtcctgttgccggctctggccttcctgtgactgactgtgaagtggcttctccgtacgattgtctctgaaacatcgtggcctcaggtgccagggtttgatggacagtagcattagaattgtggaaaaggaacacgcaaagggagaagtgtgagaggagaaacaaaatatgagcgtttaaaatacatcgccattcag

SEQ ID NO: 2833 - DNA, 2358 bp, Homo sapiens
ctgatggaataacaaagacaacaggcttttgcgccacgcggcgatcttccaaaggcccggatgtcgcttacagagtcaccaaagacgcgcagctcagcgcacccaccatgcctccagccccccagctcgcccgacccatcctgttcgtgaataggtctcaggggttgggggagggactgccagatttggacactatatttttttctaaattcaacttgaagatgtgtatttcccctgaccttcaaaaaatgttccaaggtaagcctcgtaaaggtcatcccaccatcaccaaagcctccgtttttaacaacctccaacacgatccatttagaggccaaatgtcattctgcaggtgccttcccgatggattaaaggtgcttatgtttttgtgagttttaagtaaatatttgtattgtattgttataaatgttaagtgtgcctggctttcaatcatgcacggaaacccagtctcagtcccacggacagaatgggcgaggcatggattctgggttgcagtaccgttctgattagaaataggaagtctccccacccccgccctggccaagaacgtgcaataaattggaagtttgccccggggcagcaagaatttatgctgccattgaaaagcaggtaccagtgccccttttcagacagtttttgattcgctctagactttttttttttttaatagggaaaaaatttgataattttcttttttctacatgcacttaagactaaaacacaggtttggattaattttatttgcttcctttttccgcttttcttcccgcagagcctgatgggagaatgtccagggcagggaaaccacattttttgtaggtgataactcaatgaaaattggtgcttattttttacacttctctcttgtggctctcttgtggtgctatctatctgttttaaggtctccttgaaggcgcactggggaccctggccatgcctcgttctccctgctttctttatcctgttattgcctccacagtctgttgccaaggactctaagatcaatgcacgtcactttcctttccactgggcaggatagccaagcacactccctcctgcgctctcccgccccggtgcgtccactcccgagggctgttatgaggactgggttgtgcctacttgatttgaaaacacacacaagcaataaaaagcctcttcctgcattgtctgtggtgtgaccatagcagattatatttggttcctgaatgtttgtggtgctaatttctgtgtttgttccaagccgttcagtcatgccatgcgctgcctcggtagatggagtaatgtacaatgaactccatgagtctctccagggctgcctgcagcacgtcttttccaagtagcctatttggattcccatctcaaatgtcctggatgcgagcgtcagcggctccagagctcggggcgggtgaggtcccctttggggaaccctttcctggccatcgaggtcggggggctgccgtctgtgggcaggaggacccgaggggcagccaggaaaggcgatctcttcactgtgaaaagttgcccgggtgcagcgccttttccttctaccatgggaaatgcaggctgggcccttggggtgagcctgcggggctctggtgctgtccccgacccccaccaccaccagaatgcagttccagcttaggaagccacaaacaagccacccaggaggaacaaaacaccgccagcgtggattttccaaatttccctggaaagtaagtctcgctcttgccaaagaaaagtctggcttggagagtctctggagcccaggatgccagcatgtgccaatgactgtcaccttcatctcttcaaaagaaaagccatagccgaggactgtcccgcgacccccgtggactgcgtctaggtcatgtgattctgttttcatttctcatcccatccaatttgtccttttctcctgtcattttcttcctctgtggtcccttcaaagttgttataatttgtactgaacttcaaaatgtgtcccgttctccccagaccactctagccacagtatattgcaataaaattacttcttatatttgcagaaattcttttggtgtaattttattttttcctctcaatatatataattggacaaacgctggcaaaaagaaaaaaatggtaagcaaaaaacccaagataaagtttcgaggacatcaggccttttgaaatacaatgtcaaatgacacattgtacggtttcaaaaaatccgctagacatgtcataagttttaactgtaatgcccaggaaaggatatcttaaaatattctaaacttgtgtaacaaaggaataattaactgtaatagtttttcaataaatcgagttgggtgtttccaccgt

SEQ ID NO: 2834 - DNA, 1292 bp, Homo sapiens
cagggagttgagaaactgtggcacaaggcgagagctggtttcctctgccctgttagagctgggggactcttcagagtcaaaggccagagagcatggagctgagtggagccaccatggcccgggggctcgctgtcctgctagtcttgttcctgcatatcaagaacctgcctgcccaggctgcggacacatgtccagaggtgaaggtggtgggcctggagggctctgacaagctcaccattctccgaggctgcccggggctgcccggggccccagggccaaagggagaggcaggtgtcattggagagagaggagaacgcggtctccctggagcccctggaaaggcaggaccagtggggcccaaaggagaccgaggagagaaggggatgcgtggagagaaaggagacgctgggcagtctcagtcgtgtgcgacaggcccacgcaactgcaaggacctgctagaccgggggtatttcctgagcggctggcacaccatctacctgcccgactgccggcccctgactgtgctctgtgacatggacacggacggagggggctggaccgttttccagcggaggatggatggctctgtggacttctatcgggactgggccgcatacaagcagggcttcggcagtcagctgggggagttctggctggggaacgacaacatccacgccctgactgcccagggaagcagcgagctccgtgtagacctggtggactttgagggcaaccaccagtttgctaagtacaaatcattcaaggtggctgacgaggcagagaagtacaagctggtactgggagcctttgtcgggggcagtgcgggtaattctctaacgggccacaacaacaacttcttctccaccaaagaccaagacaatgatgtgagttcttcgaattgtgctgagaagttccagggagcctggtggtacgccgactgtcatgcttcaaacctcaatggtctctacctcatgggaccccatgagagctatgccaatggtatcaactggagtgcggcgaaggggtacaaatatagctacaaggtgtcagagatgaaggtgcggcccgcctagacgggccaggacccctccacatgcacctgctagtggggaggccacacccacaagcgctgcgtcgtggaagtcaccccatttccccagccagacacactcccatgacgcccacagctgcccctttgcccccagctcagtcaagccgccacatgcccacaacctcaccagagggagaattatgtttctaaatatgtttactttgggacagaaaaaaaaaaa

SEQ ID NO: 2835 - protein, 326 aa, Homo sapiens
MELSGATMARGLAVLLVLFLHIKNLPAQAADTCPEVKVVGLEGSDKLTILRGCPGLPGAPGPKGEAGVIGERGERGLPGAPGKAGPVGPKGDRGEKGMRGEKGDAGQSQSCATGPRNCKDLLDRGYFLSGWHTIYLPDCRPLTVLCDMDTDGGGWTVFQRRMDGSVDFYRDWAAYKQGFGSQLGEFWLGNDNIHALTAQGSSELRVDLVDFEGNHQFAKYKSFKVADEAEKYKLVLGAFVGGSAGNSLTGHNNNFFSTKDQDNDVSSSNCAEKFQGAWWYADCHASNLNGLYLMGPHESYANGINWSAAKGYKYSYKVSEMKVRPA

SEQ ID NO: 2836 - DNA, 980 bp, Homo sapiens
gcgcgggggagccattaggaggcgaggagagaggagggcgcagctcccgcccagcccagccctgcccagccctgcccggaggcagacgcgccggaaccgggacgcgataaatatgcagagcggaggcttcgcgcagcagagcccgcgcgccgcccgctccgggtgctgaatccaggcgtggggacacgagccaggcgccgccgccggagccagcggagccggggccagagccggagcgcgtccgcgtccacgcagccgccggccggccagcacccagggccctgcatgccaggtcgttggaggtggcagcgagacatgcacccggcccggaagctcctcagcctcctcttcctcatcctgatgggcactgaactcactcaaaataaaagagaaaacaaagcagagaagatgggagggccagagagcgagaggaagaccacaggagagaagacactgaacgagcttcccttgttttgcctggaagcccacgctggctccctggctctgcccaggatgtgcagtccaaatcccaatccagcagtggggttatgtcgtcccgcttaccctcagagcccttctcctggtgctgcccagacgatcagccagtccctcctggagaggttctgcatggcctctaggagagaagttttcttggccccaggaaggcctggtggagggtggtggttgtgcactgttgctggacagatgcattcattcatgtgcacacacacacacacacatgcacacacaggggagcagatacctgcagagaagagccaaccaggtcctgattagtggcaagctgccccacaaagggctatgcctgtgtcttattgagacaccttggcaaagagatggctgattctgggtggtcctggacatggccgcacccaagggccctccaagccttaatggcaccctgaagcctccatgcccaggccaaaagatgcttttcctccctaaaaaaaaaaaaaaaaaaa

SEQ ID NO: 2837 - protein, 169 aa, Homo sapiens
MPGRWRWQRDMHPARKLLSLLFLILMGTELTQNKRENKAEKMGGPESERKTTGEKTLNELPLFCLEAHAGSLALPRMCSPNPNPAVGLCRPAYPQSPSPGAAQTISQSLLERFCMASRREVFLAPGRPGGGWWLCTVAGQMHSFMCTHTHTHAHTGEQIPAEKSQPGPD

SEQ ID NO: 2838 - DNA, 761 bp, Homo sapiens
tggttactgagatggtgaaaaccaggggagacctgggggacatcacaagcttggttcctaccaggtttatggagccgtacatctttgggagccgcctggaccacgacatcatcgacctggaacagacagccacgcacctccagctggccttgaacttcaccgcccacatggcctaccgcaagggcatcatcttgtttataagccgcaaccggcagttctcgtacctgattgagaacatggcccgtgactgtggcgagtacgcccacactcgctacttcaggggcggcatgctgaccaacgcgcgcctcctctttggccccacggtccgcctgccggacctcatcatcttcctgcacacgctcaacaacatctttgagccacacgtggccgtgagagacgcagccaagatgaacatccccacagtgggcatcgtggacaccaactgcaacccctgcctcatcacctaccctgtacccggcaatgacgactctccgctggctgtgcacctctactgcaggctcttccagacggccatcacccgggccaaggagaagcggcagcaggttgaggctctctatcgcctgcagggccagaaggagcccggggaccaggggccagcccaccctcctggggctgacatgagccattccctgtgatgttcactctcctcccaaagcaaaccacagccagctgggttggtgggacagccaggccagatgacctgattccagcaaaaataaaactcagatttgggcaaaatg

SEQ ID NO: 2839 - DNA, 792 bp, Homo sapiens
ctggtccaggcacagccttgccacagtccagagaaggccacctctaatggggcctgcaggcattgtggccacaggaggaaagggccggggggcccctctccccactcctggggcagctcccttgcccttccccagcctcaggcactctcatcatctccgttggcctcttctgggggctcttggggttcatctccagggtggaaaacttggagggcccctcctggcagagtcaaggatggggtcagcgagaccccatcccctcagccctcaacctttgtttcacccagagcccctctgaatcctgggagctggctctttccactccccgagggggccctcaggcccaccctggctgtcccagcatggcccccgcggcttctgcgctgcacccttcccgtccctccctgctcctcatggtcactagtgcctgcttatccactgggtcatcccctcggccagggcccctcctgccctggaagcccagcaagcgcccactcgtagctcctcagcgggtcctcgccggcctgtgccaggtgcaggggccagtgggaggacaacaggagccacgcaggccatcagcgcaagagcaaacgcacatggcaacgttggtccgctcagccactggttctgtggtggaacggtggatgtctgcactgtgacatcagctgagtacgagaactgccggttgcggcttataaacaagatgatgcccttgcggtaggccatgtgggcggtgaagttcaaggccagctggaggtgcgtggctgtctgttccaggtcgatgatgtcgtg

SEQ ID NO: 2840 - protein, 98 aa, Homo sapiens
MAPAASALHPSRPSLLLMVTSACLSTGSSPRPGPLLPWKPSKRPLVAPQRVLAGLCQVQGPVGGQQEPRRPSAQEQTHMATLVRSATGSVVERWMSAL

SEQ ID NO: 2841 - DNA, 2815 bp, Homo sapiens
gggaagcgacgagtccgggacgcccagcgcgggcccggagcagggggaagggaagtgcggctcggtcggcgcgggtggagggggcgtgaggccgccctacggtggccgtcgagggacggcgctacggctcccacgctaggccaaacgcctccggcggccgcgcccgagagccccttcacctgcagggcgaccccagccggcgacgcgtgaaccacgccctcagccgccttgccagcgcccccagccgcgcgccccagcaccatgcggccgccctgcgcacggagccccgagggacaggggcacccgcaggcccggcccctagcaccgccggccggccccgaggtccgggacgccggcgccgccgcggagagggcaccgggccgacgcctccccccagggtcagctgcgggctcccaggcctaggcgcccatgacccctacgccaacagccgcctggacaccgccgccgccactgcgacctagcgccgccgccgccggggcccaatgccggtcatgcccattccgcggcgggtgcgctccttccacggcccgcacaccacctgcctgcatgcggcctgcgggcccgtgcgcgcctcccacctggcccgcaccaagtacaacaacttcgacgtgtacatcaagacgcgctggctgtacggcttcatccgcttcctactctactttagctgcagcctgttcactgcggcgctctggggtgcgctggccgccctcttctgcctacagtacctgggcgttcgcgtcctgctgcgcttccagcgcaagctgtcggtgctgctgctgctgctgggccgccggcgcgtggacttccgcctggtgaacgagctgctcgtctatggcatccacgtcaccatgctgctggtcgggggcctgggctggtgcttcatggtcttcgtggacatgtgagggccgtgggtgcgagcttgatgtatcgtcccggcctgtggctgtgttctctccatgggtggggtcggccagcgccttcccttcgcccatcccccaggcagtcgctgctgcccggcgcccacggagagaaaagaaagggctgagacttctgtgatgggggcgcggacaccacccctaggctggcttcctggacccaccctccccgtatgcactctcaggggcagcgcccacctgccggtggctcctgctcacatgtcttcgggtcgtactgcggggtgggccctccgttccgcctctctgtgggcctctctccaggaccacagctgccagggactttagacatcaccctgggaggcccctggacacagagggctgtgtgcccaggagcaattccggaggggggccctcctggctgcacagccccttctgcgtgccctggccccagccccagccaacgggacacggaaggctcccctcgctgacacaccacactgccacaaagctgcttactctgccctgggccgcctgaggcctggcactgcccgcggaccaccctgtgtgtgtcatcctgaggggctgtgtgggtcctgagtccccagccagccttcagggtccccttggattgtgtagatgcagtctagcggggggccggagaagggctcaggtgggaggggcctcagcaggctcccagctcaggggctggcctggggggaaccctgggagccaggggctgactccagcaacactggcctgtctgcctgttctgggagggctgtgaggatgtcttgcagatgctctggatttctgcggaggcacctccattcctttctggctttttttgcgggggagggctttgggcctctttctttgagggaacaccgtcaaagaaagcctgggagatcgaggcttcagtgagccaggatggaaacgcgtgtcccaagtgtccggagcaggcggcagaggcctcagtgcggcaaacacagccccagagcctgtgtggcaccagcagcatcttagagccccaggtatatgctgagatcttatctcacgctgtcctccagtgtctggggggcccaaatgatggcacaggggcaggtgggctggaggggcgcagatgcctgtgttcagggagggtggccaccatgggccgaggtctcacccaggaccccttgctctgctcctcagccttgcagtcacggcagcactatggtggactgcccatggccgtgtgactttgggggcaagtgggagggcgccctgaataatgattgcaaggacaacaggcagaggctaccctagagcaggacacagggtgtggtactgacaaccctagtgtcacctcaaatccatgtccccacactctgggcatgggtgggacttgtgaccctaccctgtcaggcggaccagtggcccaggagccatgaggacagttgtgtgccactggaagagaaactttttgaaaaaccctaaatcaggtagagaaagcaaaaaatctctggccgtaaaccgtgctctctaatttatcggcagcttctgtggatgacctctgatgagcccgggctgcgtccacgccctgggcaggtaggcgggagcttccctgcgtgggcctcatttcttgctgcagagaatcttttgcactaagtcatgctgtttcctcaaagaagctttgttttttgttaacgtattactcagagtcacccaagcctcttggctgagggtgaaggtgggacgggaggcgggagggggctggtggtgccgctcgtgcggtgtcaacgctgcagggagttgtggcaccttggtgccctctgagcacctggccgcctgctgtccccggtgcctgtgaaattcgtcatgccatgacccacctgcattaaacctatttttttaatgtg

SEQ ID NO: 2842 - protein, 146 aa, Homo sapiens [sequence omitted]

SEQ ID NO: 2843 - DNA, 714 bp, Homo sapiens
ctgggctggtgcttcatggtcttcgtggacatgtgagggccgtgggtgcgagcttgatgtatcgtcccggcctgtggctgtgttctctccatgggtggggtcggccagcgccttcccttcgcccatcccccaggcagtcgctgctgcccggcgcccacggagagaaaagaaagggctgagacttctgtgatgggggcgcggacaccacccctaggctggcttcctggacccaccctccccgtatgcactctcaggggcagcgcccacctgccggtggctcctgctcacatgtcttcgggtcgtactgcggggtgggccctccgttccgcctctctgtgggcctctctccaggaccacagctgccagggactttagacatcaccctgggaggcccctggacacagagggctgtgtgcccaggagcaattccggaggggggccctcctggctgcacagccccttctgcgtgccctggccccagccccaggtatatgctgagatcttatctcacgctgtcctccagtgtctggggggcccaaatgatggcacaggggcaggtgggctggaggggcgcagatgcctgtgttcagggagggtggccaccatgggccgaggtctcacccaggaccccttgctctgctcctcagccttgcagtcacggcagcactatggtggactgcccatggccgtgtgactttgggggcaagtgggagg

SEQ ID NO: 2844 - protein, 94 aa, Homo sapiens
MGGVGQRLPFAHPPGSRCCPAPTERKERAETSVMGARTPPLGWLPGPTLPVCTLRGSAHLPVAPAHMSSGRTAGWALRSASLWASLQDHSCQGL

SEQ ID NO: 2845 - DNA, 710 bp, Homo sapiens
ctcgtggacacctgccaccgggccatgaggaccaccttcctccacatctccaagaccccccaggagaacggggccactgcggggtctggcgtgcagccggcccagtagcccagaccacggcagggcatgacctggggagggcaggtggaagccgatggctggaggatgggcagaggggactcgcgcccacggcacctctgggagctgggatgataaagatgaggcttgcggctgtggcccgctggtgggctgagccacaaggcccccgatggcccaggagcagatgggaggaccccgaggccagacgcacactgtccgagccctctgctcagccgcctgggacccaccagggtgcagctgggctccagggtccagcccacaagctgcatcaggctctctgggagaggaggggcctggagggccaggagtcccagactcacgcaccctgggccacagggagccgggaatcggggcctgctgctcctgctggcctggaagactctgtggggtcagcactgtactccgttgctgtttttttataaacacactcttggaagtggctggggagctgtggtcactcacagggcgggcaggtgaccagggcggtggaggcgacgctgtgtcttcccagctgccctgcctagaggcccagggtgcaggcaccgccacccacccgtgttccctatccaggagtggacccacatcaccct

SEQ ID NO: 2846 - DNA, 1511 bp, Homo sapiens
cgcgggggagaagcgggagcgggagcgggagcgagctggcggcgccgtcgggcgccgggccgggccatggagctgtggccgtgtctggccgcggcgctgctgttgctgctgctgctggtgcagctgagccgcgcggccgagttctacgccaaggtcgccctgtactgcgcgctgtgcttcacggtgtccgccgtggcctcgctcgtctgcctgctgcgccacggcggccggacggtggagaacatgagcatcatcggctggttcgtgcgaagcttcaagtacttttacgggctccgcttcgaggtgcgggacccgcgcaggctgcaggaggcccgtccctgtgtcatcgtctccaaccaccagagcatcctggacatgatgggcctcatggaggtccttccggagcgctgcgtgcagatcgccaagcgggagctgctcttcctggggcccgtgggcctcatcatgtacctcgggggcgtcttcttcatcaaccggcagcgctctagcactgccatgacagtgatggccgacctgggcgagcgcatggtcagggagaacctcaaagtgtggatctatcccgagggtactcgcaacgacaatggggacctgctgccttttaagaagggcgccttctacctggcagtccaggcacaggtgcccatcgtccccgtggtgtactcttccttctcctccttctacaacaccaagaagaagttcttcacttcaggaacagtcacagtgcaggtgctggaagccatccccaccagcggcctcactgcggcggacgtccctgcgctcgtggacacctgccaccgggccatgaggaccaccttcctccacatctccaagaccccccaggagaacggggccactgcggggtctggcgtgcagccggcccagtagcccagaccacggcagggcatgacctggggagggcaggtggaagccgatggctggaggatgggcagaggggactcctcccggcttccaaataccactctgtccggctcccccagctctcactcagcccgggaagcaggaagccccttctgtcactggcctcagacacaggcccctggtgtcccctgcagggggctcagctggaccctccccgggctcgagggcagggactcgcgcccacggcacctctgggagctgggatgataaagatgaggcttgcggctgtggcccgctggtgggctgagccacaaggcccccgatggcccaggagcagatgggaggaccccgaggccagacgcacactgtccgagccctctgctcagccgcctgggacccaccagggtgcagctgggctccagggtccagcccacaagctgcatcaggctctctgggagaggaggggcctggagggccaggagtcccagactcacgcaccctgggccacagggagccgggaatcggggcctgctgctcctgctggcctggaagactctgtggggtcagcactgtactccgttgctgtttttttataaacacactcttggaagtgg

SEQ ID NO: 2847 - DNA, 6144 bp, Homo sapiens
ggggagaacacttctttgtctgggattccaaccagctctgtccttagcttgtctctgcctagcagtgttgcccaaagtaattttccacaaggttctggtgcttccgaaatggtttctaatcagcctgctaatttgctggttcaaccaccatcccagccagttccagagaacttggttccagaaagtcaaaaggatcgtaaggcaggaagtgctcttcccggatttgctaatagccctgctggaagcacaagtgtggtgttagttccacctgcacacggcaccctggtgcctgatggtaataaggcaaaccattccagtcatcaggaagacacttacggagccctagactttaccttaagcaggactttggaaaatcctgtaaacgtgtacaacccgtcccattctgacagcctcgcttctcagcaaagtgttgccagtcatcccagacaatctgggcctggggcgcctaaccttgaccgtttttatcagcaggtcacgaaagatgcccagggccagcctggcctcgaaagagcccagcaggagctggtgccaccccagcaacaggcttctcccccacaactacccaaagccatgttttcggagctgtcaaatccagaaagtctgcccgcacagggacaggcccagaactcagcacagtcaccagcaagtctggttctggtcgacgcgggtcagcagctgccccctcggcctcctcagtcctctagcgtgtctctggtgtccagtggctccggccaggcagctgtgccgtcagagcagccgtggccacagccagtgcctgcacttgcccccggcccaccgcctcaggacctggccgcctactactactaccggcctttgtacgatgcctaccagcctcagtactctttgccgtacccaccggagcctggcgcagcctccctctattaccaggatgtctacagcctctatgagcctcgatacaggccctatgatggtgctgcgtctgcttacgcccagaactaccgctatcccgagcccgagcggcccagctcccgagccagccactcctcggaacggccacctcccaggcaaggatatcctgaaggatactatagttccaaaagtggatggagcagtcagagcgattactatgcaagctattactccagccagtacgattatggagatccaggtcactgggatcgttaccactacagtgctagagtcagggacccccgcacctatgaccggaggtattggtgtgatgcagagtatgacgcatacaggagagagcactctgccttcggggacaggcccgagaaacgtgacaacaactggaggtacgatcctcgcttcacggggagttttgacgatgaccccgatccgcacagagacccttatggggaagaggtggaccggcgcagcgtccacagcgagcactcggcacggagcctgcacagcgcacacagcctggccagccgccgcagcagcctcagctcccactcgcaccagagtcagatttacagaagccacaatgtggctgccggttcctacgaggccccgcttcctccaggctcctttcacggcgattttgcctacggcacctaccgcagcaatttcagcagtggccccggcttcccagagtatggctaccctgccgacaccgtctggcctgccatggagcaagtttcatcaagaccaacttctcctgaaaaattttcagtgcctcatgtctgtgccaggtttggccctggcggtcagcttatcaaagtgattcccaatctgccttcagaaggacagccggccttggtggaggtccacagcatggaggccttgctgcagcacacgtctgagcaggaggagatgcgggcgttcccgggacccctggccaaagacgacacccataaggtggatgtcattaattttgcacagaacaaagctatgaaatgtttgcagaatgaaaacttaattgacaaagagtctgcaagtcttctttggaattttattgttctcttatgcagacaaaatgggaccgtggtagggaccgacattgcggagcttctgttacgagaccacagaacagtgtggcttcctgggaagtcgcccaatgaagcaaacctgattgatttcacgaatgaggcagtggagcaggtggaagaggaggagtctggtgaggcccagctctctttcctcactggtggtccggcggctgccgccagctcgctcgagagagagaccgagaggttcagggagctgttgctgtatggccgtaagaaggatgctttggagtctgcaatgaagaatggcctgtggggtcacgctctgctacttgcaagtaagatggacagccggacacacgcccgagtcatgaccaggtttgctaacagcctcccaatcaacgaccctctgcagacagtctaccagctcatgtccggacggatgcctgccgcgtccacgtgctgtggagacgagaaatggggagattggaggccgcacctcgccatggtcttgtccaacttgaacaacaacatggacgtcgagtccaggacgatggctaccatgggcgacactctggcttcaaggggcctcttggatgcggcccacttctgctacctcatggcccaggcgggatttggtgtttacacgaagaaaactacaaagcttgtcttaatcggatccaatcacagtttgccattcttaaagttcgcaaccaacgaagcaatccagaggacggaagcctatgagtacgcccagtccctgggtgccgagacctgccccctgcctagtttccaggtgtttaagttcatctactcctgccgcctggcggaaatggggctggccacgcaagccttccactactgtgaggccatcgcgaagagcatcctgacgcagccgcacctgtattccccggtgttgatcagccagcttgtgcagatggcttcccagttacgactcttcgatccccagctgaaagagaagccagaagaggagtccttggccgcacccacgtggctggttcacctgcagcaggtggagcggcagattaaggagggggctggagtatggcatcaggatggagccctcccgcagcagtgtcctggcactccgagttccgagatggagcagttggacaggccaggactcagtcagccaggagccctggggatcgccaaccctctgctggcggtgcctgcaccgagccctgagcactcgagcccgagcgtgcggctgctgccctcagctccgcagacgctccctgacggcccattggccagtcctgccagagtgccgatgttcccagtgccactgcccccggggcccctggagccgggtcctggctgtgtgaccccagggcctgcacttggcttcctggagccctccgggcctggcctcccacctggtgtgccacctctgcaggaaaggagacacttgctccaggaagccaggagcccagacccagggatagtgccgcaggaggcgcctgttggaaactcactttccgagctaagcgaagaaaattttgatggaaaatttgctaatctgaccccctcgaggacggtgccagactcggaggcccccccagggtgggatcgtgccgactcgggtcccacgcagccacctctgtctctctcacccgctcccgaaacaaagagacccggacaggcagccaagaaagaaacgaaggaacctaagaagggtgaatcctggttctttcgttggctacctggaaagaaaaagacagaagcttatttgccagatgacaagaacaaatcgattgtttgggatgaaaagaaaaaccagtgggtgaatttaaatgagccagaagaggagaagaaagccccgcccccacctccaacctcgatgcccaagactgtgcaagctgccccgcctgccctcccagggcctcctggagcccccgtgaacatgtactctagaagagcagcaggaaccagagctcgctacgttgacgtcctgaacccaagcgggacccagcggagcgagccggctctcgctcctgcggactttgtcgctccactcgcgccactcccaattccttctaacttgttcgtgccaaccccagtgagaccccagggacgttcgggacggaatgatggcctcctcgctctctcatccccagatgcagaagaaccacagcttccagacgggactggcagggaagggcctgcagcagctaggggcctggccaatccagagcctgccccagagcccaaggttttaagctctgcagcgtcactccctggctctgaactcccctcctccaggcctgagggttcccagggaggagagctttcgcgctgtagttcaatgagttcattatcacgtgaagtgagccagcattttaatcaggctcctggcgacctccctgctgcagggggccctcccagcggggccatgcccttctacaaccctgctcagctggcacaggcctgcgccacctccgggagctcaaggctagggaggattggccagaggaagcacctggtgctgaactaggcttgccctgctgtgaacttgcacttggagccctgacgctgctgttctccccgaagaacccgaccgacctccgcgatctccgtcccgcccccagggagacacagcagtgactcagagctggtcgcacactgtgcctccctcctcaccgcccatcgtaatgaattattttgaaaattaattccaccatcctttcagattctggatggaaagactgaatctttgactcagaattgtttgccgaaaagaatgatgtgactttcttagtcatttaggatgatttaaggatatagtattcctggtcatttaagaatgttcattcattgaagccggagctgtctctgccacaggagagccacatggtcggtagtaaccagggcctctccaagcccagctgtgagtcactgcccagtgagtcccgcgcttcctttaaggtgctgggagcaaagagagggtgactgaggcagaccccaacccctgctctgcaccatctgggccctcgccgtgtttgaacctggctgaatgagtggagggcgctgtgttctcaatcagcgcctccgaggagccgtggggttccttcggcattagttcacggtttttgagagaggccttagttactgcagtgaatttctttcctgttgcaaagacgcttccagcctcactttactttctgtggcctgatgaggaccatgggtgattttgtgtacccaaagcgctggggactgcccaccgtgtggcccagtcactgggaaggagccccagagagccggctgtctgacatgatggctcagggtggtcatccaggttgaaaactgaccgtgtgatgtttgatttgggcttcatttcgtgtgtaggagcacggttagactcactgttaaggaagctggatgcacttctctaaaaggctgcactttccgtgagcacttttcgtggtacaatccacatgacccactttctcccctgggggacgttggttcagaggttggtagcacttggggagagtatcttaacacagtttcttgacagcagctctggaacttagtatttctgccccgagttttgccacactgagactttgagtagctcctggtggactcaaccctgttcaactcagagacgggcctcctctcactgatgcaaagctttaaggcttctctgactgttctgaaactcttcgtattcttgtcaagtctaaagagactgaagaaaagatttaaatactaataaaaatcagtagataatttctgtaggttctgctggaggaatacaaactgtttggtgttttaaatttaagtgtagaaattgtagaatgtggaattagcacagatccttcctggctttctgtttcacttgatcatttagcccagaccacccaggatgttttccaaaatgttccacaggcgtgtcccgctggatccatttgtccttgtcacttggagaaaggccagtccctgtgacggggcagccctctctgtccctcggtcagctcgtgtgaatcctgggacctcttccggtcggctctgcccgctgttctggggtcgactgccacgacttttgattcaagaagcttcctccaggcgggagcggctatttttcctaaatgagaattgttacattgcaaattgttgaataaaatattttgcgctccttcaa

SEQ ID NO: 2848 - protein, 1672 aa, Homo sapiens
METLCAPQVCPLPLNSTTEAVHMLPHAGAPPLDTVYPAPEKRPSARTQGPVKCESPATTLWAQSELPDFGGNVLLAPAAPALYVCAKPQPPVVQPPEEAMSGQQSRNPSSAAPVQSRGGIGASENLENPPKMGEEEALQSQASSGYASLLSSPPTESLQNPPVLIAQPDHSYNLAQPINFSVSLSNSHEKNQSWREALVGDRPAVSSWALGGDSGENTSLSGIPTSSVLSLSLPSSVAQSNFPQGSGASEMVSNQPANLLVQPPSQPVPENLVPESQKDRKAGSALPGFANSPAGSTSVVLVPPAHGTLVPDGNKANHSSHQEDTYGALDFTLSRTLENPVNVYNPSHSDSLASQQSVASHPRQSGPGAPNLDRFYQQVTKDAQGQPGLERAQQELVPPQQQASPPQLPKAMFSELSNPESLPAQGQAQNSAQSPASLVLVDAGQQLPPRPPQSSSVSLVSSGSGQAAVPSEQPWPQPVPALAPGPPPQDLAAYYYYRPLYDAYQPQYSLPYPPEPGAASLYYQDVYSLYEPRYRPYDGAASAYAQNYRYPEPERPSSRASHSSERPPPRQGYPEGYYSSKSGWSSQSDYYASYYSSQYDYGDPGHWDRYHYSARVRDPRTYDRRYWCDAEYDAYRREHSAFGDRPEKRDNNWRYDPRFTGSFDDDPDPHRDPYGEEVDRRSVHSEHSARSLHSAHSLASRRSSLSSHSHQSQIYRSHNVAAGSYEAPLPPGSFHGDFAYGTYRSNFSSGPGFPEYGYPADTVWPAMEQVSSRPTSPEKFSVPHVCARFGPGGQLIKVIPNLPSEGQPALVEVHSMEALLQHTSEQEEMRAFPGPLAKDDTHKVDVINFAQNKAMKCLQNENLIDKESASLLWNFIVLLCRQNGTVVGTDIAELLLRDHRTVWLPGKSPNEANLIDFTNEAVEQVEEEESGEAQLSFLTGGPAAAASSLERETERFRELLLYGRKKDALESAMKNGLWGHALLLASKMDSRTHARVMTRFANSLPINDPLQTVYQLMSGRMPAASTCCGDEKWGDWRPHLAMVLSNLNNNMDVESRTMATMGDTLASRGLLDAAHFCYLMAQAGFGVYTKKTTKLVLIGSNHSLPFLKFATNEAIQRTEAYEYAQSLGAETCPLPSFQVFKFIYSCRLAEMGLATQAFHYCEAIAKSILTQPHLYSPVLISQLVQMASQLRLFDPQLKEKPEEESLAAPTWLVHLQQVERQIKEGAGVWHQDGALPQQCPGTPSSEMEQLDRPGLSQPGALGIANPLLAVPAPSPEHSSPSVRLLPSAPQTLPDGPLASPARVPMFPVPLPPGPLEPGPGCVTPGPALGFLEPSGPGLPPGVPPLQERRHLLQEARSPDPGIVPQEAPVGNSLSELSEENFDGKFANLTPSRTVPDSEAPPGWDRADSGPTQPPLSLSPAPETKRPGQAAKKETKEPKKGESWFFRWLPGKKKTEAYLPDDKNKSIVWDEKKNQWVNLNEPEEEKKAPPPPPTSMPKTVQAAPPALPGPPGAPVNMYSRRAAGTRARYVDVLNPSGTQRSEPALAPADFVAPLAPLPIPSNLFVPTPDAEEPQLPDGTGREGPAAARGLANPEPAPEPKVLSSAASLPGSELPSSRPEGSQGGEAPGDLPAAGGPPSGAMPFYNPAQLAQACATSGSSRLGRIGQRKHLVLN

SEQ ID NO: 2849 - DNA, 2083 bp, Homo sapiens
agacgcaagatggcggctgtggtgctggcggcgacgcggttgctgcggggctcgggttcttggggctgttcgcggctgaggtttggacctcctgcgtacagacggtttagtagtggtggtgcctatcccaacatccccctctcttctcccttacctggagtacccaagcctgtttttgctacagttgatggacaggaaaagtttgaaaccaaagtaaccacattggataatgggcttcgcgtggcatctcagaataagtttggacagttttgtacagtaggaattcttatcaattcaggatcgagatatgaagcgaaataccttagtggaattgctcactttttggaaaaattggcattttcgtctactgctcgatttgacagcaaagatgaaattctgcttacgttggaaaagcatgggggtatctgtgactgccagacatcaagagacaccaccatgtatgctgtgtctgctgatagcaaaggcttggacacggtggttgccttactggctgatgtggttctgcagccccggctaacagatgaagaagtcgagatgacgcggatggcggtccagtttgagctggaggacctgaacctgcggcctgacccagagccacttctcaccgagatgattcatgaagcggcttacagggagaacacagttggcctccaccgtttctgccccacagaaaacgtagcaaagatcaaccgagaggtgctgcattcctacctgaggaactactacactcccgaccgcatggtgctggccggcgtgggcgtggagcacgagcatctggtggactgtgcccggaagtacctcctgggggtccagccggcctgggggagcgcagaggccgtggatattgacagatctgtggcccagtacactggggggattgccaagctagaaagagacatgtccaatgtcagcctgggcccgacccccatccccgagctcacgcacatcatggttggactggagagctgctccttcctggaggaggacttcatcccctttgcagtgttgaacatgatgatgggcggaggtggctccttctcggctggtgggcccggcaagggcatgttctccaggctctacctcaacgtgctcaacaggcaccactggatgtataacgcgacctcctaccaccacagctacgaggacactggcctcctttgcatccatgccagcgccgacccaagacaggttcgagaaatggtagaaatcatcacaaaggagtttattttaatgggcggaaccgtggacacggtggagctggaacgagccaagacgcagctgacatcaatgctcatgatgaacctggaatccaggcctgtgatcttcgaggatgtggggaggcaggtgctggccactcgctccagaaagctgccgcacgagctgtgcacgctcatccgcaacgtgaagccggaagatgtgaagagagtcgcttctaagatgctccgagggaagccggcagtggccgccctgggtgacctgactgacctgcccacgtatgagcacatccagaccgccctgtcgagtaaggacgggcgcctgcccaggacgtaccggctcttccggtagaaccgctccccggcctgacagacccagggagctgcagctggagcccgttcccgtgcgtgttagtttggacacgaatttagtctaaaaagctgtctggttgtataaacggtgcaaacaatgtcgccacagcacccacgcggtttgcattcttttggaactcaatgtgccgatcagtggagtcagtatcgagcctgaccaccgcaagccaggaagcaggtgaagtgcccagcgctggagtgcagcgtgccacgaggagggcggtcggtgcttccctcctcgggctgtgggcacatggggccccgcaggttccttggaggagccctgagctgggaggcagcaaaggctgacctatcaaagcctcccggaggccaccgtgctgggtaccaggactcacctctgacaagcaggagaaggtaagggcccggtcagctccaaggagcgcgctccacgcgcgtgcacacagcttccctggtaataaagagctggcatctttctt

SEQ ID NO: 2850 - protein, 525 aa, Homo sapiens
MAAVVLAATRLLRGSGSWGCSRLRFGPPAYRRFSSGGAYPNIPLSSPLPGVPKPVFATVDGQEKFETKVTTLDNGLRVASQNKFGQFCTVGILINSGSRYEAKYLSGIAHFLEKLAFSSTARFDSKDEILLTLEKHGGICDCQTSRDTTMYAVSADSKGLDTVVALLADVVLQPRLTDEEVEMTRMAVQFELEDLNLRPDPEPLLTEMIHEAAYRENTVGLHRFCPTENVAKINREVLHSYLRNYYTPDRMVLAGVGVEHEHLVDCARKYLLGVQPAWGSAEAVDIDRSVAQYTGGIAKLERDMSNVSLGPTPIPELTHIMVGLESCSFLEEDFIPFAVLNMMMGGGGSFSAGGPGKGMFSRLYLNVLNRHHWMYNATSYHHSYEDTGLLCIHASADPRQVREMVEIITKEFILMGGTVDTVELERAKTQLTSMLMMNLESRPVIFEDVGRQVLATRSRKLPHELCTLIRNVKPEDVKRVASKMLRGKPAVAALGDLTDLPTYEHIQTALSSKDGRLPRTYRLFR

SEQ ID NO: 2851 - DNA, 2303 bp, Homo sapiens
ggcggccgagcggcgggcgacgggggcgggcgacgggggcgggcgacgcgggccgcggcacgggcggagccggggccatggagccgccgctgccgggctaggcaggtcgtgccccgccgggccggcggcgatgtcgggctaccagcgccgcccgggcgccaccccgctgtcccgagcccggagcctcgccattcccgacgctccagcgttctatgagcgccggtcttgtctcccccagctaaattgtgagcgcccccatggcagggacctggactcccccttcttcggcattcggccggcctttatgtgctatgtgcccagcccggtgctggcttccgtgggagacacagattttggctatggaaaggggaaatgttctaagcagagcccgtcaggagcccacgggacacattttggagatgacagatttgaagatctggaagaggcaaatccattctcttttagagagtttctgaagaccaagaacctcggcctctcgaaagaggatccggccagcagaatttatgcaaaggaagcctcgaggcattccctgggacttgaccacaactccccaccctcccaaaccggcgggtatggcctggagtatcagcagccatttttcgaggatccgacaggggctggtgacctcctggatgaggaggaggatgaggacaccggatggagtggggcctacctgccgtccgccatcgagcagactcaccccgagagggtccctgccggcacgtcgccctgcagcacatacctttcctttttctccaccccgtcggagctggcagggcctgagtctctgccctcgtgggcgttgagtgacactgattctcgcgtgtctccggcctctccggcagggagtcctagcgcagactttgcggttcatggagagtctctgggagacaggcacctgcggacgctgcagataagttacgacgcactgaaagatgaaaattctaagctgagaagaaagctgaatgaggttcagagcttctctgaagctcaaacagaaatggtgaggacgcttgagcggaagttagaagcaaaaatgatcaaggaggaaagcgactaccacgacctggagtcggtggttcagcaggtggagcagaacctggagctgatgaccaaacgggctgtaaaggcagaaaaccacgtcgtgaaactaaaacaggaaatcagtttgctccaggcgcaggtctccaacttccagcgagagaatgaagccctgcggtgcggccagggtgccagcctgaccgtggtgaagcagaacgccgacgtggccctgcagaacctccgggtggtcatgaacagtgcacaggcttccatcaagcaactggtttccggagctgagacactgaatcttgttgccgaaatccttaaatctatagacagaatttctgaagttaaagacgaggaggaagactcttgaggacccctgggtgttctcagcatgaagctccgtgtataccctgaggtcaccaccgctcgatctaaatgtgcagttgtgtccttaaatatgcagtcttcacccagagtaaagtgttgatcgcaagagtccagtgtcgtgccctcagccagttcttggccaccacaatgggagcagccctggccgagttgtctctgtggtttctatgcagcccttcttggcgaaattcctgcgatcttatagattctaatgagctcttggaagacattgtcataaaagccagtgattttaagaaaaagagtggttctggaatcaatgttttccagtcccatcccagaacatcagttgtaagataagtacaattggttgtccttgatttcataagtagaacaaacactaaatgtgcctctgagatggccaccccgggcagggacctgtgccttccgccgatgctcagggctccctctggctcccgggtcactcttgtggccccagtgggtggtccctgcagtcatggcctgagtgcgcaggggccaccgcgtggctgctgctgtcctcctccgggacccacggggaccaaggtcacacgttccgtgctgtgaagctgtccagatgtgcctctttggctgggggttctggtggacgtttcaagtggcattttgtacaatgcaggttagaattcaggaatttcaagtatgtgcccgggtctgtcaggtcccagttgcctttctgacggcccccctcagagggacggcgatgagcactaaatgcttttttgactattttcctatagattttttttaaaacttttttttcctcctgttccaattgatagctttcttatttaataaattctgtagttcaccgc

SEQ ID NO: 2852 - DNA, 2170 bp, Homo sapiens
ctgtgtagggcatggacacagggagctcatggcagggctgacacagggtgtggtgggcacagggacaggaggcacgggaggcttcccgggatgtctgggaagtgttccaggccaaggctggggaggctggcccagggcaggtgacggacagaggcctggactggggtagcacccatgagaggggagaagtccggggcagtcggcgggtgccgagggagcatcccgagggccccgtcttcggacgaggagtgcttctttgacctgttgaccaagttccagagcagccgcatggacgaccagcgttgtcccctggacgatggccaggccggggctgccgaggccacggccgcccccaccctggaggacaggatcgcccagccctcgatgacggcctcgccccagaccgaggaattcttcgacctcatcgccagctcccagagccgccggctggacgaccagcgggccagcgtgggcagcctgccggggctgcgaatcacccacagcaatgcagggcacctccgaggccacggcgagccccaggagccgggggacgacttcttcaacatgctcatcaagtaccagtcctccaggatcgatgaccagcgctgcccaccacctgacgtactgccccggggccctaccatgccggacgaggacttcttcagcctcattcagagggtgcaggctaagcgcatggacgagcagcgggtggacctcgccgggggcccggagcagggggcaggcggcccgcccgagccccagcagcagtgccagcctggtgcgagctaaggccctgtgcccaccgccaggcccaccctgcccccactcctggacgccggtctcacagtcacagccacgtcctcccgaggccattgccgaggacaggcactgggcatgcagccccacggcctccccgacccagggcgacaggctcaggccaagctgcccgtggtgggagggcgtgcttccatcccgggctggcccccatggccctcagcttcctcccttctgcccctgccgcaggccggacggggccttcggcatgtcggccccgacctggtgctgtcagactcccgcatcctctcccccaagcccttcccgttctgccctgccctgccaaatgtgaaaccctgctgtctcccccaccctccccaaaggtgtctctgagccgcctcttggggccaccaaggacagggccatgttctgtccccccagagctggtcttgggatggccgtgtgacaggcatgctccacccctccagcttcgtcctggggcagggctccctccaagcctgtctccccactccccggccagaggtcagcaaccacagaaggccccccagaccacgcatggcagaccaggctgcagtggcagccctgaggtgccccccgccgagtcccagggccctgcaggggcctcgacaggagccgggcctatctctaaagcagagggaatggctgggcatgaacttcgacattccaaaaccccaagccaggaaaaagggcagggcctggtcctagggatgcttactggcagcaagagcagtgcccagtcagggtgggaggtagcaccaggctctgtgaccctcacccaagtgggggggtggtcagtggaagctggggaggcttcactcagctcaaccctgcagaccccccatatgagaacccccctcctcccaccagctgggggagatgacatcactgctctctccatggggagggggctcacagggcaccaagttcgggatcctaggactggcaggacctgctggagcctgagatgggccccaggggcctgaggttgcctcctcctgtccagacccagccttggcacctcccaagactgccaagggccctaccatggccccacagcccccagggctggcagttccatctaggagggtgcctctaggccccactctcaggctaggatggagaggcagatctgggcctggtgaggtgacctgcttctggaggggcagggccgcacccgagagcagggacaggtgcccgaacacagggtctccaggacgtagcgcccccccgcatacttgaatgtatgtgcgtatttattgctcacgtctgtgccatgttgtcaatgggtcctttccaacccaagaggtacatttgtttttctgtttttcctgaaaaataaagtcggccaagtgag

SEQ ID NO: 2853 - protein, 270 aa, Homo sapiens [sequence omitted]

SEQ ID NO: 2854 - DNA, 710 bp, Homo sapiens; identical to SEQ ID NO: 2845

SEQ ID NO: 2855 - DNA, 1511 bp, Homo sapiens; identical to SEQ ID NO: 2846

SEQ ID NO: 2856 - protein, 278 aa, Homo sapiens
MELWPCLAAALLLLLLLVQLSRAAEFYAKVALYCALCFTVSAVASLVCLLRHGGRTVENMSIIGWFVRSFKYFYGLRFEVRDPRRLQEARPCVIVSNHQSILDMMGLMEVLPERCVQIAKRELLFLGPVGLIMYLGGVFFINRQRSSTAMTVMADLGERMVRENLKVWIYPEGTRNDNGDLLPFKKGAFYLAVQAQVPIVPVVYSSFSSFYNTKKKFFTSGTVTVQVLEAIPTSGLTAADVPALVDTCHRAMRTTFLHISKTPQENGATAGSGVQPAQ

SEQ ID NO: 2857 - DNA, 1558 bp, Homo sapiens
ggcgcctggcgcacctggtgctcttctgccccttctccaagcgcctgcagggccggctcccaggcctcagggtccgctgcatcttcctggcctggctgggcgtctttgcaggcagctggctggtgtacgtgcactactcgtcctactcggagcgctgtcgcggccatgtctgccaggtggtcatttgtgaccagtaccgcaaggggatcatctcgggctccgtctgccaggacctgtgtgagctgcatatggtggagtggaggacctgcctctcggtggccccgggccagcaggtgtacagcgggctctggcgggacaaggatgtaaccatcaagtgtggcattgaggagaccctcgactccaaggcccggtcggatgcggccccccggcgggagctggtactgtttgacaagcccacccggggcacctccatcaaggaattccgggagatgaccctcagcttcctcaaggcgaacctgggagacctgccttccctgccggcgctggttggccaggtcctgctcatggctgacttcaacaaggacaaccgggtgtccctggcggaagccaagtccgtgtgggccctgctgcagcgtaacgagttcctgctgctgctgtccctgcaggagaaggagcacgcctccagactgctgggctactgtggggacctctacctcaccgagggcgtgccgcatggcgcctggcacgcggccgcccttccacccctgttgcgcccactgctgccgcctgccctgcagggtgctctccagcagtggctggggcctgcgtggccttggcgggccaagatcgccatcggcctgctggagttcgtggaggagctcttccacggctcttacgggactttctacatgtgtgagaccacactggccaacgtgggctacacagccacctacgacttcaagatggccgacctgcagcaggtggcacccgaggccaccgtgcgccgcttcctgcagggccgccgctgcgagcacagcaccgactgcacctacgggcgcgactgcagggccccgtgtgacaggctcatgaggcagtgcaagggcgacctcatccagcccaacctggccaaggtgtgcgcactgctacggggctacctgctgcctggcgcgcccgccgacctccgcgaggagctgggcacacagctgcgcacctgtaccacgctgagcgggctggccagccaggtggaggcccatcactcgctggtgctcagccacctcaagactctgctctggaagaagatctccaacaccaagtactcttgatggggcagtgaggggcctggccacccttcctggagctggccaggtgccagggtccaaccctccctcaaggaatcctgtcagaagatgtgaaatgcaactgtgttgcaaaatcactcccctaccgtcagggctctggattccagcaccacagacatgagaccccagctcggagcaaaggcggacatggacatcccggcaggagagtcctccaagggggtttgttactctgaagaacgtaatgtcaataaacagcttttatgtaatgcccagggctg

SEQ ID NO: 2858 - protein, 344 aa, Homo sapiens
MVEWRTCLSVAPGQQVYSGLWRDKDVTIKCGIEETLDSKARSDAAPRRELVLFDKPTRGTSIKEFREMTLSFLKANLGDLPSLPALVGQVLLMADFNKDNRVSLAEAKSVWALLQRNEFLLLLSLQEKEHASRLLGYCGDLYLTEGVPHGAWHAAALPPLLRPLLPPALQGALQQWLGPAWPWRAKIAIGLLEFVEELFHGSYGTFYMCETTLANVGYTATYDFKMADLQQVAPEATVRRFLQGRRCEHSTDCTYGRDCRAPCDRLMRQCKGDLIQPNLAKVCALLRGYLLPGAPADLREELGTQLRTCTTLSGLASQVEAHHSLVLSHLKTLLWKKISNTKYS

SEQ ID NO: 2859 - DNA, 1227 bp, Homo sapiens
ctctgcgtgcgccggaggctgccgtggcgggtgggccgcctgacttctcctcccggccagttctcgagcgcctcaccgggcctcgccctgcagcctcgctctcgctggcgctgcgcggcctaggggactgggctgctggcctccgggtgcggggtgggggcaggctccgacctggggcgtcctggccgcgcgagccgcgggatgggggcccgggccgcggaggaggcgccgctggtgtgtcccttggtggagagggcgctgccggccctgcgcggtttccagccaggaagcttcgggaagcctggacgtctgctcactggagatgacacgtgcgtggggtgttggcattcttgttatttaacacgggaaggaggtgacttcgcctgtgatggacttccagtgtgagcactggccagagtgaccaggctgaccagcaccagccctgatccagatgcagaggccaggatgtgggcccagccctgtgccaggaggctggctggaataaaggtacagatagaggcctcaccccctctgggaccactggcactcagggtgtttgcagcctcagagcccacctgcccccagggccacagctgcatctcctgccctgctgtcattacagggatgggcaggctggcatgggggcagccgctgcccctgcctgggtgttgctgtgtattcctgccggccaggggccactgccaggaccacgcctcccttttcatatcccgattcttaagttctgctattgtggtattctggtggagaaaaaagaaccgcgtggctgtttttgaactgcctggaacctaagaccctgaattcttttcccccccaaggggaaaatctatatggaaaacatttattttaaaatacaggatgaagtgaattaaaagatttaaatgcacatttctttaaggataatatttctgtgttggcaaaatttgagagtaaattggtcttgaatggaatggattgtcttgactcacacattgcggagcagagcccgccctgaagaaaggtgttgctgtggtgggatcttcccacgagggtccttgcctgttctcctaggggatggttgctgggtgccctgggctactggggagagcgtacggggctggagaagatggccattcctgggctgtttcctagggaatgagttgtacatctcatggctggattttgtaaaatcagtttttaaaataccgcatatatctgttttcttactgg

SEQ ID NO: 2860 - DNA, 794 bp, Homo sapiens
ggcacgaggccgagccctgccaaccatggtgaacttgggtctgtcccgggtggacgacgccgtggctgccaagcacccgggactcggggagtatgccgcatgccagtcacacgccttcatgaagggcgttttcaccttcgtcacaggcaccggcatggcctttggcttgcagatgttcattcagaggaagtttccataccctttgcagtggagcctcctagtggccgtggttgcaggctctgtggtcagctacggggtgacgagagtggagtcggagaaatgcaacaacctctggctcttcctggagaccgggcagctccccaaagacaggagcacagatcagagaagctaggagagctccagcaggggcacagaggattgggggcaggaggagtctggaacacagccttcatgccccctgaccccagcccgaccctccccacaccctagggtaccccagtcgtatcctctgtccgcatgtgtggccaggcctgacaaacacctgcagatggctgctgccccaacctgggacctgcccaggaggttggagcagaaagggctctccctggggtggtgtttctcctctagggtattgggatgcatgttctgcactgccagcagagagggtgtgtctgggggccaccacctatgggacacggggtcgaaggggcctgtacactctgtcatttcctttctagcccctgcatctccaacaagtccaaggtgacagctggtgctaggggcgtggggttaataaatggcttatccttctctccaaaaaaaaaaaaaaaaaa

SEQ ID NO: 2861 - protein, 108 aa, Homo sapiens
MVNLGLSRVDDAVAAKHPGLGEYAACQSHAFMKGVFTFVTGTGMAFGLQMFIQRKFPYPLQWSLLVAVVAGSVVSYGVTRVESEKCNNLWLFLETGQLPKDRSTDQRS

SEQ ID NO: 2862 - DNA, 615 bp, Homo sapiens
ggggactccgggaggaggaacatggccgtggcggacctcgctctcattcctgatgtggacatcgactccgacggcgtcttcaagtatgtgctgatccgagtccactcggctccccgctccgggctccggctgcagagagcaaggagatcgtgcgcggctacaagtgggctgagtaccatgcggacatctacgacaaagtgtcgggcgacatgcagaagcaaggctgcgactgtgagtgtctgggcggcgggcgcatctcccaccagagtcaggacaagaagattcacgtgtacggctattccatggcctatggtcctgcccagcacgccatttcaactgagaaaatcaaagccaagtaccccgactacgaggtcacctgggctaacgacggctactgagcactcccagcccggggcctgctgcctccagcagccacttcagagccccgcctttgcctgcactcctcttgcagggctggccctgcctgctcctgcggcagcctctggtgacgtgctgtccaccaggccttggagacaggctagcctggccacagaattaaacgtgttgccacacctgccggcttcttaaaaaaaaaaaaaaaaaaaaaaaaaaaaa

SEQ ID NO: 2863 - protein, 188 aa, Homo sapiens
MAVADLALIPDVDIDSDGVFKYVLIRVHSAPRSGLRLQRARRSCAATSGLSTMRTSTTKCRATCRSKAATVSVWAAGASPTRVRTRRFTCTAIPWPMVLPSTPFQLRKSKPSTPTTRSPGLTTATEHSQPGACCLQQPLQSPAFACTPLAGLALPAPAAASGDVLSTRPWRQASLATELNVLPHLPAS

SEQ ID NO: 2864 - DNA, 639 bp, Homo sapiens
ccggacggacgctcgtcttcgcccgccatggccgagagcgactgggacacggtgacggtgctgcgcaagaagggccctacggccgcccaggccaaatccaagcaggctatcttagcggcacagagacgaggagaagatgtggagacttccaagaaatgggctgctggccagaacaaacaacattctattaccaagaacacggccaagctggaccgggagacagaggagctgcaccatgacagggtgaccctggaggtgggcaaggtgatccagcaaggtcggcagagcaaggggcttacgcagaaggacctggccacgaaaatcaatgagaagccacaggtgatcgcggactatgagagcggacgggccatacccaataaccaggtgcttggcaaaatcgagcgggccattggcctcaagctccggggaaaggacattggaaagcccatcgagaaggggcctagggcgaaatgaacacaaagcctcgaaatcagtgcgctccagctgatctcgttccgccggttccccttggccgccagttccgttctcctcacgggccgaacggaacaaggggtccagcttgcgggggaccctccccagcccattcctgctgtcaaacaaacaaaaccttgcaaagcg

SEQ ID NO: 2865 - protein, 148 aa, Homo sapiens
MAESDWDTVTVLRKKGPTAAQAKSKQAILAAQRRGEDVETSKKWAAGQNKQHSITKNTAKLDRETEELHHDRVTLEVGKVIQQGRQSKGLTQKDLATKINEKPQVIADYESGRAIPNNQVLGKIERAIGLKLRGKDIGKPIEKGPRAK

SEQ ID NO: 2866 - DNA, 2668 bp, Homo sapiens
acggcaacgggggcctctactgcgcgctggaggaccacaagatcctggaggacatggagcgccggggagtggagtttgtgcacgtgtactgtgtggacaacatcctggtgcggctggcggaccctgtcttcatcggcttctgtgtgttgcagggcgcagactgtggcgccaaggtggtggaaaaggcataccccgaggagcccgtgggcgtggtgtgccaggtggacggtgtcccccaggtggtggagtacagcgagatcagtcctgagaccgcacagctacgtgcctccgacgggagcctgctgtacaatgcaggcaacatctgcaaccacttcttcacccgaggcttccttaaggcggtcaccagggagtttgagcctttgctgaagccacacgtggctgtgaagaaggtcccgtatgtggatgaggaggggaatctggtaaagccgctaaaaccgaacgggataaagatggagaagtttgtgtttgatgtgttccggtttgctaagaactttgctgccttggaagtgctgcgggaggaggaattttccccactgaagaacgcagagccagccgacagggacagtccccgcaccgctcgccaggccctgctcacccagcactaccggtgggctctgcgggccggggcccgcttcctggatgcccatggggcctggctcccagagctgcccagcttgcccccaaatggagaccctccggccatctgtgagatatcgcccttggtgtcttactctggagagggtttagaagtgtacctgcaaggccgggagttccagtccccgctcatcctggatgaagaccaggccagggagccgcagctgcaggagtcctgacccgcccagactgtccccagactcccccgagacctgccagccccggcatcctggaagtcccgactccccccagacctgccagccccggcgtcctggagctgggggctacagcccagcctgagctctgggtgggaaagcagcctgccccatgcttccagcctgcagaacacagaatgaaacatgctggtagactccacgagggcagggcctctcctgtcgcctctggacacaagtggcgacagcctgctgggggctctgtggctccattcctggctgtggggtctagtcaagaggcagagggacttgggacctgggagaatggggctgagaggaggcttcgggttggggcccaagggaggtgtggtgtcatctggggagaacaggagggcatgtccctttgggagcccgccttgtggatccaccacaccccaccgagcactagaagctgcataagctacacaggatgtgcttctgcagcctacagatgcagaaccagaatgagggggacaattccacccactcgagggctgccccctcttccttagcagacgaaccagtaatgggggcaaggctggggcatcccagcccacacaccctggatgcccagcaaggccacagaaagagcctgatgtccatgatccaggtggctctgagaagcttggcctggacacctgagcctgcggccggtactcctgccttctccccatctatccccaaggcctctgcctctcagcctcttccatggtcggtttaggctgctgagttttctgtgcttccccaagaaccagtgggatcaatgccggcggcctctgtgatggttgctgactaatccgggatttcatgagtcagaggcaccacccctcaccccagctgcctgctgcttctgacggatcttggtgctcaggctgcctggctctccgagtgaggacgcagcctccatatttggtgcactcaggcatggctgggacaagccagctgccccagggttcttcccctggtgattctcgcctgctttctcatctcaggggaggcagtggcacctccctctccctgctgacatgaagagagctatgatatgccactgctgccaactcatcctctgcccccacctcgaaacccacagtccccagtggagggccactactcatccccattggtttcccaggggaggggtgttgtctggaagggcaggttcagatgcagccttccagatttagaggcactgggaggacagtggctgagtggaggcgcccagacctgggcaggcagcaggctcaggcccacaccttgtgatttttgaaaccaaagcccagaagatgatgtttacttctctctccctggctctgcccttcttactgcaaaccatgctgtgccttagggcccttctcatagctgttcctcatggccatgactggaacagggatgcaacctctttctacacaagcacagttagttgggtgaagtctttttttttgtttgttttagacggagtttcactcttgttgcccaggctggagtgaagtggcgtgaccttggctcactgcaacctccaggccagcctcagcctccctagtagctgggactacaggcacccactaccacgcctggctaattctttgtatttttagtagagatggggtttgaccgtgttagccaggatggtctcgatctcctgacctcgtgatccacccacctcggcctcccaaagtgctgggattataggtgtgagccaccgcgccgggccggttgctggcatcttaatgttctgtaggtggaatatttccaataaacacaaggtgccgtaattgactgct

SEQ ID NO: 2867 - protein, 266 aa, Homo sapiens
MERRGVEFVHVYCVDNILVRLADPVFIGFCVLQGADCGAKVVEKAYPEEPVGVVCQVDGVPQVVEYSEISPETAQLRASDGSLLYNAGNICNHFFTRGFLKAVTREFEPLLKPHVAVKKVPYVDEEGNLVKPLKPNGIKMEKFVFDVFRFAKNFAALEVLREEEFSPLKNAEPADRDSPRTARQALLTQHYRWALRAGARFLDAHGAWLPELPSLPPNGDPPAICEISPLVSYSGEGLEVYLQGREFQSPLILDEDQAREPQLQES

SEQ ID NO: 2868 - DNA, 775 bp, Homo sapiens
tgcaggagaatggctactcatcacacgctgtggatgggactggccctgctgggggtgctgggcgacctgcaggcagcaccggaggcccaggtctccgtgcagcccaacttccagcaggacaagttcctggggcgctggttcagcgcgggcctcgcctccaactcgagctggctccgggagaagaaggcggcgttgtccatgtgcaagtctgtggtggcccctgccacggatggtggcctcaacctgacctccaccttcctcaggaaaaaccagtgtgagacccgaaccatgctgctgcagcccgcggggtccctcggctcctacagctaccggagtccccactggggcagcacctactccgtgtcagtggtggagaccgactacgaccagtacgcgctgctgtacagccagggcagcaagggccctggcgaggacttccgcatggccaccctctacagccgaacccagacccccagggctgagttaaaggagaaattcaccgccttctgcaaggcccagggcttcacagaggataccattgtcttcctgccccaaaccgataagtgcatgacggaacaataggactccccagggctgaagctgggatcccggccagccaggtgacccccacgctctggatgtctctgctctgttccttccccgagcccctgccccggctccccgccaaagcacccctgcccactcgggcttcatcctgcacaataaactccggaagcaagtcagttaaaaaaaaaaaaaaaaaaaaaaaaaaaaa

SEQ ID NO: 2869 - protein, 190 aa, Homo sapiens
MATHHTLWMGLALLGVLGDLQAAPEAQVSVQPNFQQDKFLGRWFSAGLASNSSWLREKKAALSMCKSVVAPATDGGLNLTSTFLRKNQCETRTMLLQPAGSLGSYSYRSPHWGSTYSVSVVETDYDQYALLYSQGSKGPGEDFRMATLYSRTQTPRAELKEKFTAFCKAQGFTEDTIVFLPQTDKCMTEQ

SEQ ID NO: 2870 - DNA, 1024 bp, Homo sapiens
gcgcaggcgcagtctccgcgtgcgcgcctcgccggcgcctccatcccggatccttgctgcagcgtcagcgccgccgcccgtgcctttcctcttcctcctcctcctccttggcatccgcctcttcttcctcctgcgtcctcccccgctgcctccgctgctcccgacgcggagcccggagcccgcgccgagcccctggcctcgcggtgccatgctgccccggcggcggcgctgaaggatggcgacgccgctgcctccgccctccccgcggcacctgcggctgctgcggctgctgctctccggcctcgtcctcggcgccgccctgcgtggagccgccgccggccacccggatgtagccgcctgtcccgggagcctggactgtgccctgaagaggcgggcaaggtgtcctcctggtgcacatgcctgtgggccctgccttcagcccttccaggaggaccagcaagggctctgtgtgcccaggatgcgccggcctccaggcgggggccggccccagcccagactggaagatgagattgacttcctggcccaggagcttgcccggaaggagtctggacactcaactccgcccctacccaaggaccgacagcggctcccggagcctgccaccctgggcttctcggcacgggggcaggggctggagctgggcctcccctccactccaggaacccccacgcccacgccccacacctccatgggctcccctgtgtcatccgacccggtgcacatgtcgcccctggagccccggggagggcaaggcgacggcctcgcccttgtgctgatcctggcgttctgtgtggccggtgcagccgccctctccgtagcctccctctgctggtgcaggctgcatcgtgagatccgcctgactcagaaggccgactacgccactgcgaaggcccctggctcacctgcagctccccggatctcgcctggggaccaacggctggcacagagcgcggagatgtaccactaccagcaccaacggcaacagatgctgtgcctggagcgg

SEQ ID NO: 2871 - DNA, 2646 bp, Homo sapiens
  unsure 1013: unknown base
  unsure 1014: unknown base
  unsure 1015: unknown base
  unsure 1016: unknown base
  unsure 1017: unknown base
  unsure 1018: unknown base
  unsure 1019: unknown base
  unsure 1020: unknown base
  unsure 1021: unknown base
  unsure 1022: unknown base
  unsure 1023: unknown base
  unsure 1024: unknown base
  unsure 1025: unknown base
  unsure 1026: unknown base
  unsure 1027: unknown base
  unsure 1028: unknown base
  unsure 1029: unknown base
  unsure 1030: unknown base
  unsure 1031: unknown base
  unsure 1032: unknown base
  unsure 1033: unknown base
  unsure 1034: unknown base
  unsure 1035: unknown base
  unsure 1036: unknown base
  unsure 1037: unknown base
  unsure 1038: unknown base
  unsure 1039: unknown base
  unsure 1040: unknown base
  unsure 1041: unknown base
  unsure 1042: unknown base
  unsure 1043: unknown base
  unsure 1044: unknown base
  unsure 1045: unknown base
  unsure 1046: unknown base
  unsure 1047: unknown base
  unsure 1048: unknown base
  unsure 1049: unknown base
  unsure 1050: unknown base
  unsure 1051: unknown base
  unsure 1052: unknown base
  unsure 1053: unknown base
  unsure 1054: unknown base
  unsure 1055: unknown base
  unsure 1056: unknown base
  unsure 1057: unknown base
  unsure 1058: unknown base
  unsure 1059: unknown base
  unsure 1060: unknown base
  unsure 1061: unknown base
  unsure 1062: unknown base
  unsure 1063: unknown base
  unsure 1064: unknown base
  unsure 1065: unknown base
  unsure 1066: unknown base
  unsure 1067: unknown base
  unsure 1068: unknown base
  unsure 1069: unknown base
  unsure 1070: unknown base
  unsure 1071: unknown base
  unsure 1072: unknown base
  unsure 1073: unknown base
  unsure 1074: unknown base
  unsure 1075: unknown base
  unsure 1076: unknown base
  unsure 1077: unknown base
  unsure 1078: unknown base
  unsure 1079: unknown base
  unsure 1080: unknown base
  unsure 1081: unknown base
  unsure 1082: unknown base
  unsure 1083: unknown base
  unsure 1084: unknown base
  unsure 1085: unknown base
  unsure 1086: unknown base
  unsure 1087: unknown base
  unsure 1088: unknown base
  unsure 1089: unknown base
  unsure 1090: unknown base
  unsure 1091: unknown base
  unsure 1092: unknown base
  unsure 1093: unknown base
  unsure 1094: unknown base
  unsure 1095: unknown base
  unsure 1096: unknown base
  unsure 1097: unknown base
  unsure 1098: unknown base
  unsure 1099: unknown base
  unsure 1100: unknown base
  unsure 1101: unknown base
  unsure 1102: unknown base
  unsure 1103: unknown base
  unsure 1104: unknown base
  unsure 1105: unknown base
  unsure 1106: unknown base
  unsure 1107: unknown base
  unsure 1108: unknown base
  unsure 1109: unknown base
  unsure 1110: unknown base
  unsure 1111: unknown base
  unsure 1112: unknown base
cggggctcgtggcgtcgggcctggcgggctccccgttgggcgggggcggcggtccgagcggctgcggcagcggaagcgggtccgggtcgcgcagggcgggggcggcgcagcgggcggaggcggccgtgggccgcctgggcagaatgtcacgatggacgagggcggcacgcccctgctccccgacagcctggtctaccagatcttcctgagcctgggcccggccgacgtgctggccgccgggctggtgtgccgccaatggcaggccgtgtcgcgggacgagttcctgtggagggagcagttctaccgctactaccaggtggcccgcgacgtgccccgacacccagcggccatgtcctggtacgaggagttccagcggctgtatgacacggtgccctgcgtggaggtgcagacgctgcgggaacacacagaccaggtcctgcacctcagcttctcccattccgggtaccagttcgcgtcctgctccaaggactgcactgtgaagatctggagcaacgacctgaccatctcgctgctgcacagcgcggacatgcggccctacaactggagctacacccagttctcccagttcaacaaggacgactcgctactgctggcctcgggggtgttcctggggccgcacaactcctcatccggcgagattgctgtcatcagcctagactccttcgcgctgctgtcccgcgtgcggaacaagccctatgacgtgtttggctgttggctcaccgagaccagcctcatctcggggaacctgcaccgcatcggagatatcacctcctgctcggtgctgtggctcaacaatgccttccaggatgtggagtcagagaacgtcaacgtggtgaagcggctgttcaagatccagaacctcaatgccagcaccgtccgcacggtgatggtggccgactgcagccgcttcgacagccctgacctgctgctggaagccggtgacccggccacgtccccctgccgcatctttgacctgggcagcgacaacagannnnnnnnnnnnnnnnnnnnnnnnnnnnnnnnnnnnnnnnnnnnnnnnnnnnnnnnnnnnnnnnnnnnnnnnnnnnnnnnnnnnnnnnnnnnnnnnnnnntcggtacacccctgccgccatgctgcccgcctcggtcctaggagcttgggggaggccgggcaggggtcctgaggggcagacagcaagcaagtccacaggcaaagctgggatcgttcactcgcccctggggtcacaagcccagacctggggcctgtgggatgagcagtgaaaacaaacgcaggcagggccgctggccagcaagcaaccgacgggcctgattcaggtctggggcccccggagcaggcagtgcccacggacctctgtggtgctcacagccccagagacaccactgaggtaggaagctgccctggagtgatgtccttggggcattggacagggaccctcaccgtagccctccctgcaggcatcaagcagatcctgccacaccagatgaccacggcagggcccgtgctgggtgagggccggggctccgatgccttcttcgacgcgctggaccacgtcatagacatacacggacacatcatcggcatgggcctgtcgcccgacaacaggtgggcctcttgccagtgtcccaggcggggtgcccgcaggcggcccacacctagcacagtgcccctcgcccaggtacctgtacgtgaacagccgcgcctggcccaacggtgcggtggtggccgaccccatgcagccgccaccaatcgcggaggagattgacctgctggtgttcgacctcaagaccatgcgggaggtgaggcgggctctgcgtgcgcaccgcgcctacacgcccaacgacgagtgcttcttcatcttcctggacgtcagcagggacttcgtggccagcggggcggaggaccggcacggctacatctgggaccgccactacaacatctgtctggccaggctgcggcacgaggatgtggtcaactcagtggtcttcagtccccaggagcaggagctgctgctcacggccagcgacgacgccaccatcaaagcctggcgctccccacgcaccatgcgcgtcctccaggcacctcgcccacggcctcgcaccttcttctcctggcttgccagccagaggcgctgaggtgtgctgggtgcactggagccaccgggaccccttgaggacatcgccaggctctgtggctttttcccgagcgggagaggtggagatgcttatagcagttacgccttaggaaggggacaaccaggccccgccacacgctcacacacaaacctgctcacgcagctgtgatgcttggcacggggtggccagtgcagatggagcccaaggccccctcggcctcctgggcaacttggggtacacaggatactgggggtgccgctcctcactcaaccccaggctaggggtacacctgacccagctggcctcggcccggggcaccttcggctggtcctgtggggccctggacggtggcccagtggtggcaggggctgctcctggctgtggttgtgcgcccggggcttgggagcggccggtcacgctgctgtgggcccgagtgtgttgcatgtccacgcaccacccgttcagggccctgaataaacagttggcaacagc

SEQ ID NO: 2872 - protein, 333 aa, Homo sapiens
  unsure 288: unknown amino acid
  unsure 289: unknown amino acid
  unsure 290: unknown amino acid
  unsure 291: unknown amino acid
  unsure 292: unknown amino acid
  unsure 293: unknown amino acid
  unsure 294: unknown amino acid
  unsure 295: unknown amino acid
  unsure 296: unknown amino acid
  unsure 297: unknown amino acid
  unsure 298: unknown amino acid
  unsure 299: unknown amino acid
  unsure 300: unknown amino acid
  unsure 301: unknown amino acid
  unsure 302: unknown amino acid
  unsure 303: unknown amino acid
  unsure 304: unknown amino acid
  unsure 305: unknown amino acid
  unsure 306: unknown amino acid
  unsure 307: unknown amino acid
  unsure 308: unknown amino acid
  unsure 309: unknown amino acid
  unsure 310: unknown amino acid
  unsure 311: unknown amino acid
  unsure 312: unknown amino acid
  unsure 313: unknown amino acid
  unsure 314: unknown amino acid
  unsure 315: unknown amino acid
  unsure 316: unknown amino acid
  unsure 317: unknown amino acid
  unsure 318: unknown amino acid
  unsure 319: unknown amino acid
  unsure 320: unknown amino acid
  unsure 321: unknown amino acid
MDEGGTPLLPDSLVYQIFLSLGPADVLAAGLVCRQWQAVSRDEFLWREQFYRYYQVARDVPRHPAAMSWYEEFQRLYDTVPCVEVQTLREHTDQVLHLSFSHSGYQFASCSKDCTVKIWSNDLTISLLHSADMRPYNWSYTQFSQFNKDDSLLLASGVFLGPHNSSSGEIAVISLDSFALLSRVRNKPYDVFGCWLTETSLISGNLHRIGDITSCSVLWLNNAFQDVESENVNVVKRLFKIQNLNASTVRTVMVADCSRFDSPDLLLEAGDPATSPCRIFDLGSDNRXXXXXXXXXXXXXXXXXXXXXXXXXXXXXXXXXXGTPLPPCCPPRS

SEQ ID NO: 2873 - DNA, 556 bp, Homo sapiens
gattattgattaatttgggcaccgcgagggctcgagtccccccacaccactgcccggcctgcgggggagcacagacagcccgggccctcccggctgcaggtcccgggctttccccgcgcggttgccggctccgcccagaggagccgcgcccggcggaggggtaagaaaggcagggtcgcggcgtcaacgcggcggccgtctcgagtccagggcccgcgtcctccccgacctcccgacgccacctcacggcctcagggggactgggctcccggatctgaccggcttcaagctcaagccctacgtgagctacctcgcccctgagagcgaggagacgcccctgacggccgcgcagctcttcagcgaagccgtggcgcctgccatcgaaaaggacttcaaggacggtaccttcgaccctgacaacctggaaaagtacggcttcgagcccacacaggagggaaagctcttccagctctaccccaggaacttcctgcgctagctgggcgggggaggggcggcctgccctcatctcatttctattaaacgcctttgccagcta

SEQ ID NO: 2874 - DNA, 2201 bp, Homo sapiens
ctgagctgtccctgcaggactccagtggaagtgaaagaactgggcaccggggaaaagctaggatgtcccacactcctacaccatgcagggaactcgggcacaggccgggctgggccgggatcagatgggaagcagaagctcatcatgaccagaaactgtttccctacggagagcacttggagatggcaatgctgaacctcacactgtaggactcacacacgactctaacgggattgtaagaatcaagtcactctcatgggaagaatttttatatgggaaagcggctaaaactttcattggactggaatgtttggagattgttaaattccaaatcaggaaccacaaactgccctctaataagatatcagctgtctaagcgtgtgggtgccgcctttctgccagtagttctggttcttaagaaaagcaccataaatcagacatgaaaattctggctccaaaaatagcattttctttgtgcaaataaaaacgtgtgtatcaagtatgacgttcccccaacgtggacacacttggttcctcagaaagccaagcccgctgcagctgccacatcccagggcttatggtgcagcaggtgcttttttcaagacaggaatcaaagtgttaggaacacggcagacaggtgacacctggataccaaatgcaggatgaggagtactgcagaggtcacagggaagtcacagaacagtaatacgctagcaggggcatggggcgtgaagaacagaagaagacagtttgagaaaagcatctgcaaaatgctaaagagcagagcttacctcattgcctgtccccatcccatcccaggtcaccacctggctgaccccaggtccccgacccaacaacaacccctcccaagtccctaactccctcacttggacttgagacccttcacaacccagcagcgctccgcctccaacgtgacatcatgctttctggaaacttccccgtatgtcccactttcccacacttggtgccctggagcaccttccggcctctacatgctgtacgttcccctgtgatcaccctcctctcggcctctggccaacacagtcccacccatctgtgggtaacaagggggtgtgtgtgttcttttcagccttgctaaactgtctgaatcaaggatcacaaactacagcctgcaggccaaagccagcccacagcctgtgtttgtaaataaagctttattggaacaaagccacaccccttaatctacagatgatctgtggctactttcacaccacaacagagtaccatggttctgacagagactgggggaccctgtctaaatgacttctgacctggacctttactgaaaatcctcccaatcattctgttgacaagaatggtgtattactttttgcaataagaaacaagtaacctttgcagaattccacccatctttcaaggctgatcccagaagttccctctgcccacgcacctacctgatcctgatcacttcctaaactgcagcccggcccacccggctccagcatcatttgtggagtctcagctccataaatccagagggcaggtgggggtgtgtcctaactttcccgagcctactgtaccgaaacaggacagcagagtaggaagcctctgtgacttctgctccctccctagcttttccaccagaccctgcatggtcccaccctggctgtgtgaagcaaggatcagggagcgtggctctatgtcagtctccagaaccctgtccaccctggcgtggtggcagacatggctacctgcagctgagctgccagttcctctgagtcctcaaagaccaggccattttcttcatgtttcaccagctcatgtaaactgcagagagaaccaagggagcctgagagctgcctggggaagacaccagacgcctggggtgcccagctgggctcccacccaccccacgctcaagccaggctgggggttggaacagggtgtgtggtttctgggagctggttcttagatttggcatctgaagggtataaaggcctgggggggtgcacatcaaaatgaccaaatcgatttgaggagagagccttaaggaaggtttgtaccttctgtgctggatgctcttcaaggactgaagaattatttttgcatgtttttcttaattccatggccatggaacaagtaaaggcaaccccctggggactggttcagcacataaaagatgacttttctaggacacc

SEQ ID NO: 2875 - DNA, 2368 bp, Homo sapiens
ggctaccagggcatggtggacggaggctcaaacatcgcagaggccgactgggagagtgtctccagcatcctgcaagtgggcgggacgatcattggcagtgcgcggtgccaggccttccgcacgcgggaaggccgcctgaaggctgcttgcaacctgctgcagcgaggcatcaccaacctgtgtgtgatcggcggggacgggagcctcaccggggccaacctcttccggaaggagtggagtgggctgctggaggagctggccaggaacggccagatcgataaggaggccgtgcagaagtacgcctacctcaacgtggtgggcatggtgggctccatcgacaatgatttctgcggcaccgacatgaccatcggcacggactccgccctgcacaggatcatcgaggtcgtcgacgccatcatgaccacggcccagagccaccagaggaccttcgttctggaggtgatgggacgacactgtgggtacctggccctggtgagtgccttggcctgcggtgcggactgggtgttccttccagaatctccaccagaggaaggctgggaggagcagatgtgtgtcaaactctcggagaaccgtgcccggaaaaaaaggctgaatattattattgtggctgaaggagcaattgatacccaaaataaacccatcacctctgagaaaatcaaagagcttgtcgtcacgcagctgggctatgacacacgtgtgaccatcctcgggcacgtgcagagaggagggaccccttcggcattcgacaggatcttggccagccgcatgggagtggaggcagtcatcgccttgctagaggccaccccggacaccccagcttgcgtcgtgtcactgaacgggaaccacgccgtgcgcctgccgctgatggagtgcgtgcagatgactcaggatgtgcagaaggcgatggacgagaggagatttcaagatgcggttcgactccgagggaggagctttgcgggcaacctgaacacctacaagcgacttgccatcaagctgccggatgatcagatcccaaagaccaattgcaacgtagctgtcatcaacgtgggggcacccgcggctgggatgaacgcagccgtacgctcagctgtgcgcgtgggcattgccgacggccacaggatgctcgccatctatgatggctttgacggcttcgccaagggccagatcaaagaaatcggctggacagatgtcgggggctggaccggccaaggaggctccattcttgggacaaaacgcgttctcccggggaagtacttggaagagatcgccacacagatgcgcacgcacagcatcaacgcgctgctgatcatcggtggattcgaggcctacctgggactcctggagctgtcagccgcccgggagaagcacgaggagttctgtgtccccatggtcatggttcccgctactgtgtccaacaatgtgccgggttccgatttcagcatcggggcagacaccgccctgaacactatcaccgacacctgcgaccgcatcaagcagtccgccagcggaaccaagcggcgcgtgttcatcatcgagaccatgggcggctactgtggctacctggccaacatgggggggctcgcggccggagctgatgccgcatacattttcgaagagcccttcgacatcagggatctgcagtccaacgtggagcacctgacggagaaaatgaagaccaccatccagagaggccttgtgctcagaaatgagagctgcagtgaaaactacaccaccgacttcatttaccagctgtattcagaagagggcaaaggcgtgtttgactgcaggaagaacgtgctgggtcacatgcagcagggtggggcaccctctccatttgatagaaactttggaaccaaaatctctgccagagctatggagtggatcactgcaaaactcaaggaggcccggggcagaggaaaaaaatttaccaccgatgattccatttgtgtgctgggaataagcaaaagaaacgttatttttcaacctgtggcagagctgaagaagcaaacggattttgagcacaggattcccaaagaacagtggtggctcaagctacggcccctcatgaaaatcctggccaagtacaaggccagctatgacgtgtcggactcaggccagctggaacatgtgcagccctggagtgtctgacccagtcccgcctgcatgtgcctgcagccaccgtggactgtctgtttttgtaacacttaagttattttatcagcactttatgcacgtattattgacattaatacctaatcggcgagtgcccatctgccccacctgctccagtgcgtgctgtctgtggagtgtgtctcatgctttcagatgtgcatatgagcagaattaa

SEQ ID NO: 2876 - DNA, 2301 bp, Homo sapiens
gggtggggcgtgttgacccccttaaaggcgccagagcccgcggtcacggctcaggttcccggtgcttcgcgcgtctgccgttgtcacaggccagggaggtggcaccaccaggcgaagcttggcgagattgtgtcgtcaagcgcgtacgggcgccaattggccgggcgatgtggcgtggactggcgctggcgcgagcgattggctgcgcggcccgggggcggggccagtgggcggtgcgcgccgcagactgtgctcaaagcgggcgccatccgggaccggcggttgtctgtggccggaggctgatcagtgttctagaacagatcagacattttgtaatgatgcctgaaataaacactaaccacctcgacaagcaacaggttcaactcctggcagagatgtgtatccttattgatgaaaatgacaataaaattggagctgagaccaagaagaattgtcacctgaacgagaacattgagaaaggattattgcatcgagcttttagtgtcttcttattcaacaccgaaaataagcttctgctacagcaaagatcagatgctaagattacctttccaggttgttttacgaatacgtgttgtagtcatccattaagcaatccagccgagcttgaggaaagtgacgcccttggagtgaggcgagcagcacagagacggctgaaagctgagctaggaattcccttggaagaggttcctccagaagaaattaattatttaacacgaattcactacaaagctcagtctgatggtatctggggtgaacatgaaattgattacattttgttggtgaggaagaatgtaactttgaatccagatcccaatgagattaaaagctattgttatgtgtcaaaggaagaactaaaagaacttctgaaaaaagcagccagtggtgaaattaagataacgccatggtttaaaattattgcagcgacttttctctttaaatggtgggataacttaaatcatttgaatcagtttgttgaccatgagaaaatatacagaatgtgaatatgtaggtaaatgattacagaaaaatttatctgcttaacaaacttagaatgactttttccttttaaatttagttctatcattaatttatcattaaatttagttctatcatttggtactatcattaatgtattatatacactgatactttaaaacttgtgtggaaaaaactaacttataattttgtatcacacaccctggatatgtgttctgtttctaagcgacatttgtgagagattattgtaaaatgagagcgagcaaataaaacttaatttaatctttgcagatacatacttatgggaaatttgaacaaatgagtgaaactctgtttttagtaggctgtgataaacatttccggagcacttgcagaggacttgctatttgccaggtgctttatgtatcattaaatttttctcatagttcagaaaaatgtgcaaaggaaactattgtctcgctccttcaaaacagtcttaattaactttcatattagcagattaaactagcagagcaggttcaagggaaattaaatgatatggaccctaatttgtatcattctgagttgattgtgtggtttattcattctggaaacatgttgatacttacagtcagccactgcttttgataagtgatattgattaggttgaatcttcttgtaaatagtatttaccagttagcaaagtctgtgttttcagaattacagtgagcacagaggtgttcataaaatgggaattgagtcccactcggtaagagttgcttaaacttgacactgttgacatttgggctggataaaacccctgtggtggggtctgtgctgtgcattgcaggatggtgagcagcgtccctctcatgtgacacccacagttatgccggatgttgccagatgcccctaggggacagagtcaacccccaactgaggaccactgtcctacagagtcaggaaatattgtagggagaaaaaaataacaacaacaaaggcctgtgttaatgttaaatagatgagattatggaatgtgtatattaatgttaaaaattgtaccttgatcaatgtactttttataaacttgccatagatatctcagatttgaaacctcaagacagatttattattcttaaatgctgtatgataatgaagaaaaataaaaatttatttcttgcaaagttaaatgtttgttaaattcaatagaatgactcatttatggttaactttgggcaatttataatttcagacaagactgtttagcaagtattttattgaaaagtaaaaaaaattgcaatttaa

SEQ ID NO: 2877 - protein, 228 aa, Homo sapiens
MMPEINTNHLDKQQVQLLAEMCILIDENDNKIGAETKKNCHLNENIEKGLLHRAFSVFLFNTENKLLLQQRSDAKITFPGCFTNTCCSHPLSNPAELEESDALGVRRAAQRRLKAELGIPLEEVPPEEINYLTRIHYKAQSDGIWGEHEIDYILLVRKNVTLNPDPNEIKSYCYVSKEELKELLKKAASGEIKITPWFKIIAATFLFKWWDNLNHLNQFVDHEKIYRM

SEQ ID NO: 2878 - DNA, 1192 bp, Homo sapiens
ggggcttggttgaacggactcaccaggaaacgtgactttcgtgtccgacctctgctgtatcaggattcgattcttggtgttaaacaagacaacgctgaaggctcggtgcagcagccctgcaaagctttgtgtcttaggtttcagcgtgctgacgttctctgggccctgaagtcactgctgctggctggtgtgctggccacttggtcgtgctggcctgtctcccaccgggtggatgcccagcgagctctggatgctgtgtttttccagcgctcttgggaggtgggctgtgccactgcctggcccacctggcccacctggcccaccattacctgaagggaagcatgaacagcctttgacgtgggagtggcgactgctgagagggaactgtctgtacacaagcaatgtagccttatgggacctgagtggagccccaacccacgcagggcgtgtcttcatggcttttcctggccaatctgataccaagatgcagtggccagaagtacctgcacttccactcctgtcaagtctctgcatggctatggtgaggaagagctctgcactgggcaaggaagttggccgtcgagtgaaggaaatggtgatgctggtggcccctttccggcagtcaagttccctatcaaggacattcagttctcggaaagtggtgaaggcacatgcttccctgcatggtgcccgcctctctccactctctagaaatattagaggctaggctgctgctgtatgtcagggctagtccctcttctatgaatccagaataactctgaagaagccgagtaacaggcatgaagtgaagagaaatcgctgtaacaggaagacagcaaagcagatgctaatgaccacactatttaacgaactggaaccaacgagaaaatacggtattactgaagactgcacttccttgaacagagtgctcttctcagcaaatcggaaatgcctacacaaatcgctttacaagaaagactgtttcaaagcagcacctttctcaatgttctcgttcaggtgacaattcttcttggtctcagctccaattttattgtcattttcatcaataaggatacacatctctgccaggagttgaacctgttgcttgtcgaggtggttagtgtttatttcaggcatcattacaaaatgtctgatctgttctagaacactaatattaaaggaaaagagaaag

SEQ ID NO: 2879 - DNA, 2392 bp, Homo sapiens
cccgcgtgcatacggctgccggcatggcacattacaacttcaagaaaattacggtggtgccgtccgccaaggacttcatagacctcacgttgtcgaagactcaacgaaagactccaaccgttattcataaacattaccaaatacatcgcattagacatttttacatgagaaaagtcaaatttactcaacagaattaccatgatagactttcacaaattctaacagatttccccaaattggatgatattcatccgttctatgctgatttgatgaatattctctacgacaaggatcattacaagttggctctggggcaaataaatattgccaaaaatttagtggacaatgttgctaaagattatgtgcgactgatgaagtatggcgactctctctaccgctgcaaacagctgaagcgtgcggccctgggacggatgtgcacagtgatcaagaggcagaagcagagtttggagtatttggagcaagtgcgtcagcatttatcccgtttgccaaccattgatccgaataccaggaccctgcttttgtgtgggtacccaaatgttgggaagtccagcttcatcaacaaggtgacgagagcagacgtggatgtccagccctatgcgttcacaaccaagtctctgtttgttgggcacatggattataagtatctacgttggcaggttgtagacactcctgggatcctggaccaccctctggaggataggaacaccatcgagatgcaggccatcactgccctggcccacctccgtgctgcggtcctgtatgtgatggatttgtctgagcagtgtgggcatgggctgagggagcagctagaactcttccagaacatcagacctctcttcatcaacaagcctctcatagttgtagccaacaaatgtgatgtgaagagaatagctgaactttctgaagatgatcagaaaatatttacagatttgcagtctgaaggattccctgtaatagagaccagcaccctgactgaggaaggtgttattaaagttaaaacagaggcttgcgataggcttttggctcatcgagtggaaaccaaaatgaagggaaataaagtgaatgaggtgctgaatagactgcacctggctatcccaaccaggagggacgataaggagaggccccctttcatccctgaaggagtggtggctcgcaggaagaggatggaaactgaggagtccaggaagaagagggaacgagatcttgagctggaaatgggagatgattatattttggatcttcagaagtactgggatttaatgaatttgtctgaaaaacatgataagataccagaaatctgggaaggccataatatagctgattatattgatccagccatcatgaagaaattggaagaattagaaaaagaagaagagctgagaacagctgctggagagtatgacagtgtatctgagagtgaagacgaagagatgctggaaatccgacagctggcaaagcaaattcgagagaaaaagaagttgaaaattctggagtccaaagaaaagaatacacagggacccaggatgccgcgaactgctaagaaggttcagaggacagttttggagaaggagatgcgtagtcttggtgttgacatggacgataaagacgatgcccattacgcagtccaggcaagaagatcccggagcatcactaggaaaagaaagcgggaagactctgctcccccgtcctctgtggcccggagtgggagttgctctcgaactccacgtgacgtttctggtcttagggatgtcaagatggtgaagaaagccaagactatgatgaagaatgctcagaagaagatgaatcggttggggaagaaaggggaggcggatagacacgtgtttgatatgaagcccaagcacttgctgtctgggaagaggaaagctggtaaaaaggacaggagatagtatccgtttggttggcgtggcttcgctagagtgttgctgtttatttcctggtttggcacagtatggtttcatgaaattggagctctgtataaactgaaaaagacaaaataagtaaagcacttgttgctttgctgaaaactatggttaaccctatataggtgtgggaaatttttgtcactgcataatattacaaatattttgagtagacagtgtttccacatttaatggagtatcagttgcttcagattttcagaactgggaagatttactggtttaactaggttgtttttgatggagaaaaaccttattttcttttgtaagagctgggagcaaacacgtttatgagtgtgtcggaatcccgtgcttaaaatacgctcttaaattattttctagtcttattttacaatgtctcattgtagtctgtcttcaactattttatccaaaataaacctccagaagaaagt

SEQ ID NO: 2880 - protein, 634 aa, Homo sapiens
MAHYNFKKITVVPSAKDFIDLTLSKTQRKTPTVIHKHYQIHRIRHFYMRKVKFTQQNYHDRLSQILTDFPKLDDIHPFYADLMNILYDKDHYKLALGQINIAKNLVDNVAKDYVRLMKYGDSLYRCKQLKRAALGRMCTVIKRQKQSLEYLEQVRQHLSRLPTIDPNTRTLLLCGYPNVGKSSFINKVTRADVDVQPYAFTTKSLFVGHMDYKYLRWQVVDTPGILDHPLEDRNTIEMQAITALAHLRAAVLYVMDLSEQCGHGLREQLELFQNIRPLFINKPLIVVANKCDVKRIAELSEDDQKIFTDLQSEGFPVIETSTLTEEGVIKVKTEACDRLLAHRVETKMKGNKVNEVLNRLHLAIPTRRDDKERPPFIPEGVVARRKRMETEESRKKRERDLELEMGDDYILDLQKYWDLMNLSEKHDKIPEIWEGHNIADYIDPAIMKKLEELEKEEELRTAAGEYDSVSESEDEEMLEIRQLAKQIREKKKLKILESKEKNTQGPRMPRTAKKVQRTVLEKEMRSLGVDMDDKDDAHYAVQARRSRSITRKRKREDSAPPSSVARSGSCSRTPRDVSGLRDVKMVKKAKTMMKNAQKKMNRLGKKGEADRHVFDMKPKHLLSGKRKAGKKDRR

SEQ ID NO: 2881 - DNA, 1218 bp, Homo sapiens
tgctaaccaggccagtgacagaaatggattcgaaataccagtgtgtgaagctgaatgatggtcacttcatgcctgtcctgggatttggcacctatgcgcctgcagaggttcctaaaagtaaagctctagaggccgtcaaattggcaatagaagccgggttccaccatattgattctgcacatgtttacaataatgaggagcaggttggactggccatccgaagcaagattgcagatggcagtgtgaagagagaagacatattctacacttcaaagctttggagcaattcccatcgaccagagttggtccgaccagccttggaaaggtcactgaaaaatcttcaattggactatgttgacctctatcttattcattttccagtgtctgtaaagccaggtgaggaagtgatcccaaaagatgaaaatggaaaaatactatttgacacagtggatctctgtgccacatgggaggccatggagaagtgtaaagatgcaggattggccaagtccatcggggtgtccaacttcaaccacaggctgctggagatgatcctcaacaagccagggctcaagtacaagcctgtctgcaaccaggtggaatgtcatccttacttcaaccagagaaaactgctggatttctgcaagtcaaaagacattgttctggttgcctatagtgctctgggatcccatcgagaagaaccatgggtggacccgaactccccggtgctcttggaggacccagtcctttgtgccttggcaaaaaagcacaagcgaaccccagccctgattgccctgcgctaccagctgcagcgtggggttgtggtcctggccaagagctacaatgagcagcgcatcagacagaacgtgcaggtgtttgaattccagttgacttcagaggagatgaaagccatagatggcctaaacagaaatgtgcgatatttgacccttgatatttttgctggcccccctaattatccattttctgatgaatattaacatggagggcattgcatgaggtctgccagaaggccctgcgtgtggatggtgacacagaggatggctctatgctggtgactggacacatcgcctctggttaaatctctcctgcttggtgatttcagcaagctacagcaaagcccattggccagaaaggaaagacaataattttgttttttcattttgaaaaaattaaatgctctctcctaaagattcttcacct

SEQ ID NO: 2882 - protein, 323 aa, Homo sapiens
MDSKYQCVKLNDGHFMPVLGFGTYAPAEVPKSKALEAVKLAIEAGFHHIDSAHVYNNEEQVGLAIRSKIADGSVKREDIFYTSKLWSNSHRPELVRPALERSLKNLQLDYVDLYLIHFPVSVKPGEEVIPKDENGKILFDTVDLCATWEAMEKCKDAGLAKSIGVSNFNHRLLEMILNKPGLKYKPVCNQVECHPYFNQRKLLDFCKSKDIVLVAYSALGSHREEPWVDPNSPVLLEDPVLCALAKKHKRTPALIALRYQLQRGVVVLAKSYNEQRIRQNVQVFEFQLTSEEMKAIDGLNRNVRYLTLDIFAGPPNYPFSDEY

SEQ ID NO: 2883 - DNA, 1204 bp, Homo sapiens
ctctgaggagaagcagcagcaaacatttgctagtcagacaagtgacagggaatggattccaaacagcagtgtgtaaagctaaatgatggccacttcatgcctgtattgggatttggcacctatgcacctccagaggttccgagaagtaaagctttggaggtcacaaaattagcaatagaagctgggttccgccatatagattctgctcatttatacaataatgaggagcaggttggactggccatccgaagcaagattgcagatggcagtgtgaagagagaagacatattctacacttcaaagctttggtccacttttcatcgaccagagttggtccgaccagccttggaaaactcactgaaaaaagctcaattggactatgttgacctctatcttattcattctccaatgtctctaaagccaggtgaggaactttcaccaacagatgaaaatggaaaagtaatatttgacatagtggatctctgtaccacctgggaggccatggagaagtgtaaggatgcaggattggccaagtccattggggtgtcaaacttcaaccgcaggcagctggagatgatcctcaacaagccaggactcaagtacaagcctgtctgcaaccaggtagaatgtcatccgtatttcaaccggagtaaattgctagatttctgcaagtcgaaagatattgttctggttgcctatagtgctctgggatctcaacgagacaaacgatgggtggacccgaactccccggtgctcttggaggacccagtcctttgtgccttggcaaaaaagcacaagcgaaccccagccctgattgccctgcgctaccagctgcagcgtggggttgtggtcctggccaagagctacaatgagcagcgcatcagacagaacgtgcaggtttttgagttccagttgactgcagaggacatgaaagccatagatggcctagacagaaatctccactattttaacagtgatagttttgctagccaccctaattatccatattcagatgaatattaacatggagagctttgcctgatgtctaccagaagccctgtgtgtggatggtgacgcagaggacgtctctatgccggtgactggacatatcacctctacttaaatccgtcctgtttagcgacttcagtcaactacagctgagtccataggccagaaagacaataaatttttatcattttgaaat

SEQ ID NO: 2884 - protein, 323 aa, Homo sapiens
MDSKQQCVKLNDGHFMPVLGFGTYAPPEVPRSKALEVTKLAIEAGFRHIDSAHLYNNEEQVGLAIRSKIADGSVKREDIFYTSKLWSTFHRPELVRPALENSLKKAQLDYVDLYLIHSPMSLKPGEELSPTDENGKVIFDIVDLCTTWEAMEKCKDAGLAKSIGVSNFNRRQLEMILNKPGLKYKPVCNQVECHPYFNRSKLLDFCKSKDIVLVAYSALGSQRDKRWVDPNSPVLLEDPVLCALAKKHKRTPALIALRYQLQRGVVVLAKSYNEQRIRQNVQVFEFQLTAEDMKAIDGLDRNLHYFNSDSFASHPNYPYSDEY

SEQ ID NO: 2885 - DNA, 495 bp, Homo sapiens
atggatcccaaatatcagtgtgtggagctaaatgatggtcatttcatgcctgtattaggatttggcacctgtgtacctccagaggtgattgactgcagtggaatggtttctccgtttctttctataattgaagaaattgtttgttcttccaagaatagagttgtggaggttacaaaattagcaatagaagctggtttcttccatattgattctgctcatttatacaataatgaggagcaggtggaatgtcatccttacctcaaccagagcaaactgctggatttctgcaagtcaaaagacattgttctggttgcccacaccctgattgctctgtgctaccagctgcagcgtggggctgtggtcctggtcaagagctccaatgaacagcagatcagagagaacatgcaggtttttgactttgagttgactccagaggacatgaaagccattgacagcctcaacggaaatctccgacatgctaagttacaattttaa

SEQ ID NO: 2886 - protein, 164 aa, Homo sapiens [sequence omitted]

SEQ ID NO: 2887 - DNA, 770 bp, Homo sapiens
cattttcactgcgttcaagtatgcttttatgagctggtggtgccatagttttagattccctgtatcgaaaagctacaattacataaggacagatctgtctgggtcgttcaataacggtgttgcctgaaagttcgtaaaagtaatacttaattatattaaaaattacaacataaccagatttcccatgataccatggtcttgaatgaagacagtcggagtatttggaaatgtatacacctctttggctggatcacccagagtggtaacagcactgctgccaacacggagtccacactgacataccaattttacctgcttttcagtatcaaacagaagaaacccgtaagtgtcttgaagttcttcctgagtataactacttgcttttttttgttggtaaaaagttttgtatcttttctgatagggaccctgtctcgatcttctctaagagagaatgtagctgggagggtggtcttaattcattttcaccaagtataccctcagaattcttgacatagtcctgttctctgttaatgtcataaatgccgtccttggcgtggccgccgcccccgaggacctgagatcccggctcggcctccttcccatgcttctcccggccgtgctctgcgtcctcccgggccctcgcgacaccggcgcacgtgggaagcaccagtcgccggctccgcgctcccgcggggacccccctcaggggcacgccgtccgccccagccccggggtcctcgccgcgggcgctgacagggacgccgcggccg

SEQ ID NO: 2888 - protein, 105 aa, Homo sapiens [sequence omitted]

SEQ ID NO: 2889 - DNA, 3013 bp, Homo sapiens
caatgctacattaacccattatgtaagaccaataaatgcagagccagtgtttcaagcacaggaaataccagcaggcagaatggccagtttgcttaagaatggtgagcctgaagctgagttacataaagaaaccacaggtccaggcactgctggccctcagtccaacaccacatcttctctaaaaggtgaacgcaaagccatccacacgctgcaagatgtgtcaacatgtgaaacaaaggagctattgaatgtcggggtttcctccctttgtgctggtccctaccaaaatacagcagacaccaaggaaaacctcagtaaagagcctttggcctcctttgtttcagaatcctttgatacttctgtttgtggaatagccacagagcacgtagaaattgagaacagtggggaggggctcagggctgaggctggttctgaaaccctaggcagagatggagaggtcggtgtgaattccgacatgcactatgaactctctggagattctgatctagacctgcttggtgattgtagaaatcccagactggatttggaggattcttatactttaagaggtagttacaccaggaaaaaagatgttcccacagatggctatgagtcgtcgttgaacttccacaacaacaaccaagaggactggggctgctctagctgggttccaggcatggagacgagcctccctcccgggcactggactgctgcggtaaagaaagaagagaagtgtgtgccgccttacgtccaaatccgagatctccacgggatcctcaggacttacgccaacttctctataacaaaagaactcaaagataccatgagaacttcacacggcctgaggaggcacccgagtttcagtgcaaactgtggcctgcccagctcctggacaagcacttggcaggtggcagacgacctcacccagaacactttagacctggagtatctgcgttttgcacataaactaaaacagaccataaagaatggggattctcagcattctgcctcctctgccaatgtctttccaaaggagtcaccaacccagatctccattggtgctttcccttcgacaaaaatctctgaggccccatttctgcatcctgcacctaggagcagaagcccccttctggtaacagttgtggagtcagatcccagaccacaggggcagcccaggagaggctacacagccagcagtctggacagctcttcctcttggagagagagatgtagtcataatagagatcttagaaattctcaaagaaatcacactgtttcattccacctcaacaaactgaaatacaacagtactgtgaaggaatctcggaatgatatttcacttattctcaatgagtatgctgaattcaacaaggtgatgaagaatagcaaccaattcattttccaagacaaagagctaaatgatgtttctggagaagccactgctcaagagatgtatctgcctttcccaggacggtcagcctcctatgaagacataatcatagacgtgtgcaccaatttgcacgtcaaactaagaagtgttgtgaaagaggcttgtaaaagtaccttcctgttctaccttgtcgaaacagaagacaaatcattctttgtaagaacaaagaaccttctgaggaaaggaggccatacagaaattgaacctcagcacttctgtcaagctttccacagagagaatgatacactaatcatcatcatcagaaatgaagatatatcatcacatttgcatcagattccttctttgctgaagctgaagcatttccccagtgtcatctttgctggagtagacagccctggagatgttcttgatcacacctaccaagaactgtttcgtgcaggaggctttgtgatatcagatgacaagatactagaagctgtaacattagttcaactgaaggaaattatcaaaatcctggaaaaactaaatggaaatggaagatggaagtggttgcttcactacagggaaaataaaaagctaaaagaagatgaaagagtggattcaactgcacataagaagaacataatgttgaagtcatttcagagtgcaaatatcattgaattgcttcattatcaccagtgtgactctcgatcatcaacaaaagcagaaattctgaaatgtttgctaaacctgcaaattcagcatattgatgccaggtttgctgtcctcctaacagacaagcctactatccccagagaagtctttgaaaatagtggaatccttgttacagatgtaaataactttatagaaaacatagaaaaaatagcagctccatttaggagtagctattggtgactcaactacagcctgcctggatatggatgatgccaataaaaaattagtattttccctttggaaaacttgtgaacatgtgaatacacatgtgaacagtcttacatttgaaaaaccaatgttctacaacttggaaagttttcattttttatattttgctgaaatatgtcacagtggcattgcagttgtctgttagctttgggttgcagtgctagatattgttttaaattattttcattttaaacaagatgccttctaagctattgagcttattaaaaataattttacatgtttacttagttggagcaaaaataagtctattttaacaaatagctttgtttttgcatgctaatgtcagaaaggcatacgatgcacattatgctctgttttaaaggttttaccacccttgtaaaaactataatcttaaatggttttatttgctgttacacaaacaacactacataaaacattttttcctaaatggtacaaatttataaactatcatttttcacttacggtatttgtaaatactacactacaaaaatcagctttctgagaaagaaataatcatttatttatgatattgaaaatttctacagtaaacactcaaaaccaagcaaaaaacatttgtaagatacacggtatctatttggagcaacggtttttgtaactaatgtgtttcattttttaaataaagacaactaaaaataa

SEQ ID NO: 2890 - protein, 741 aa, Homo sapiens
MASLLKNGEPEAELHKETTGPGTAGPQSNTTSSLKGERKAIHTLQDVSTCETKELLNVGVSSLCAGPYQNTADTKENLSKEPLASFVSESFDTSVCGIATEHVEIENSGEGLRAEAGSETLGRDGEVGVNSDMHYELSGDSDLDLLGDCRNPRLDLEDSYTLRGSYTRKKDVPTDGYESSLNFHNNNQEDWGCSSWVPGMETSLPPGHWTAAVKKEEKCVPPYVQIRDLHGILRTYANFSITKELKDTMRTSHGLRRHPSFSANCGLPSSWTSTWQVADDLTQNTLDLEYLRFAHKLKQTIKNGDSQHSASSANVFPKESPTQISIGAFPSTKISEAPFLHPAPRSRSPLLVTVVESDPRPQGQPRRGYTASSLDSSSSWRERCSHNRDLRNSQRNHTVSFHLNKLKYNSTVKESRNDISLILNEYAEFNKVMKNSNQFIFQDKELNDVSGEATAQEMYLPFPGRSASYEDIIIDVCTNLHVKLRSVVKEACKSTFLFYLVETEDKSFFVRTKNLLRKGGHTEIEPQHFCQAFHRENDTLIIIIRNEDISSHLHQIPSLLKLKHFPSVIFAGVDSPGDVLDHTYQELFRAGGFVISDDKILEAVTLVQLKEIIKILEKLNGNGRWKWLLHYRENKKLKEDERVDSTAHKKNIMLKSFQSANIIELLHYHQCDSRSSTKAEILKCLLNLQIQHIDARFAVLLTDKPTIPREVFENSGILVTDVNNFIENIEKIAAPFRSSYW

SEQ ID NO: 2891 - DNA, 2274 bp, Homo sapiens
ggcggtcggtctcgccttgtcgccagctccattttcctctctttctcttcccctttccttcgcgcccaagagcgcctcccagcctcgtagggtggtcacggagcccctgcgccttttccttgctcgggtcctgcgtccgcgcctgccccgccatgaatgaggagtacgacgtgatcgtgctgggcaccggcctgacggaatgtatcctgtcaggtataatgtcagtgaatggcaagaaagttcttcatatggatcgaaacccttactacggaggagaaagtgcatctataacaccattggaagatttatacaaaagatttaaaataccaggatcaccacccgagtcaatggggagaggaagagactggaatgttgacttgattcccaagttccttatggctaatggtcagctggttaagatgctgctttatacagaggtaactcgctatctggattttaaagtgactgaagggagctttgtctataagggtggaaaaatctacaaggttccttccactgaagcagaagccctggcatctagcctaatgggattgtttgaaaaacgtcgcttcaggaaattcctagtgtatgttgccaacttcgatgaaaaagatccaagaacttttgaaggcattgatcctaagaagaccacaatgcgagatgtgtataagaaatttgatttgggtcaagacgttatagattttactggtcatgctcttgcactttacagaactgatgattacttagatcaaccgtgttatgaaaccattaatagaattaaactttacagtgaatctttggcaagatatggcaaaagcccatacctttatccactctatggccttggagaactgccccaaggatttgcaaggctaagtgctatttatggaggtacctatatgctgaataaacccattgaagaaatcattgtacagaatggaaaagtaattggtgtaaaatctgaaggagaaattgctcgctgtaagcagctcatctgtgaccccagctacgtaaaagatcgggtagaaaaagtgggccaggtgatcagagttatttgcatcctcagccaccccatcaagaacaccaatgatgccaactcctgccagatcattattccacagaaccaagtcaatcgaaagtcagatatctacgtctgcatgatctcctttgcgcacaatgtagcagcacaagggaagtacattgctatagttagtacaactgtggaaaccaaggagcctgagaaggaaatcagaccagctttggagctcttggaaccaattgaacagaaatttgttagcatcagtgacctcctggtaccaaaagacttgggaacagaaagccagatctttatttcccgcacatatgatgccaccactcattttgagacaacgtgtgatgacattaaaaacatctataagaggatgacaggatcagagtttgactttgaggaaatgaagcgcaagaagaatgacatctatggggaagactaacagcagtacatgttattatgtaattaggacacatttaaaatttggcaaataatgcatataatgaaatcaatattgtaaggcctgcttttgtaatgaaaatggagagaatgaagagcgctgtgccagtaaatactccccttcacctttctaattattaacttgttttcatggagtggctattcagcattggcagttaccacattctgttcaatttaaccaaactggcttttttttttttctagtgaagttaaacaaacattgggataccgacacagacaacttgagacagtttttttaatcttttaatcagtgtagctatgtgctgctgctgctcaagagctggatccatacaggttgtgtgtcatctgtcctcttgaggttcaggagattctaaattgaatattccacggtttgggacagcatccggaagttttccctatgactttatattttgtattatgtcaaatgttatggcagggcccaaatagcatagccacaagtttggtttatgtgggcataaaattctaaccaaaccccagacatagggagtcatttggagaaagcctgtatgtggtgttttaacctaataaagttgatgagagagaaggggagaggaagcgaacataaagcgggtcaagtgtagtgcatcttttgtatctcaggcgtggcttcttcagtggaccaagctgcaatgcagtattgacttgacagagcctctacttctgtctcaaaatggctccaaatgatttctgtactgcaaaataaagccaaattctggaaacta

SEQ ID NO: 2892 - protein, 445 aa, Homo sapiens
MNEEYDVIVLGTGLTECILSGIMSVNGKKVLHMDRNPYYGGESASITPLEDLYKRFKIPGSPPESMGRGRDWNVDLIPKFLMANGQLVKMLLYTEVTRYLDFKVTEGSFVYKGGKIYKVPSTEAEALASSLMGLFEKRRFRKFLVYVANFDEKDPRTFEGIDPKKTTMRDVYKKFDLGQDVIDFTGHALALYRTDDYLDQPCYETINRIKLYSESLARYGKSPYLYPLYGLGELPQGFARLSAIYGGTYMLNKPIEEIIVQNGKVIGVKSEGEIARCKQLICDPSYVKDRVEKVGQVIRVICILSHPIKNTNDANSCQIIIPQNQVNRKSDIYVCMISFAHNVAAQGKYIAIVSTTVETKEPEKEIRPALELLEPIEQKFVSISDLLVPKDLGTESQIFISRTYDATTHFETTCDDIKNIYKRMTGSEFDFEEMKRKKNDIYGED

SEQ ID NO: 2893 - DNA, 1566 bp, Homo sapiens
ggcacgagggactcagcgaagggtgggcgccgccgaggcctcctgccgctggcgggtttccgcggagtgccgcccggctccgctctgccgccggcgcggctcatgggcagagtcggccgggcgggccggcattaaactgaagaaaagatgtccctgtacgatgacctaggagtggagaccagtgactcaaaaacagaaggctggtccaaaaacttcaaacttctgcagtctcagcttcaggtgaagaaggcagctctcactcaggcaaagagccaaaggacgaaacaaagtacagtcctcgccccagtcattgacctgaagcgaggtggctcctcagatgaccggcaaattgtggacactccaccgcatgtagcagctgggctgaaggatcctgttcccagtgggttttctgcaggggaagttctgattcccttagctgacgaatatgaccctatgtttcctaatgattatgagaaagtagtgaagcgccaaagagaggaacgacagagacagcgggagctggaaagacaaaaggaaatagaagaaagggaaaaaaggcgtaaagacagacatgaagcaagtgggtttgcaaggagaccagatccagattctgatgaagatgaagattatgagcgagagaggaggaaaagaagtatgggcggagctgccattgccccacccacttctctggtagagaaagacaaagagttaccccgagattttccttatgaagaggactcaagacctcgatcacagtcttccaaagcagccattcctcccccagtgtacgaggaacaagacagaccgagatctccaaccggacctagcaactccttcctcgctaacatggggggcacggtggcgcacaagatcatgcagaagtacggcttccgggagggccagggtctggggaagcatgagcagggcctgagcactgccttgtcagtggagaagaccagcaagcgtggcggcaagatcatcgtgggcgacgccacagagaaagatgcatccaagaagtcagattcaaatccgctgactgaaatacttaagtgtcctactaaagtggtcttactaaggaacatggttggtgcgggagaggtggatgaagacttggaagttgaaaccaaggaagaatgtgaaaaatatggcaaagttggaaaatgtgtgatatttgaaattcctggtgcccctgatgatgaagcagtacggatatttttagaatttgagagagttgaatcagcaattaaagcggttgttgacttgaatgggaggtattttggtggacgggtggtaaaagcatgtttctacaatttggacaaattcagggtcttggatttggcagaacaagtttgattttaagaactagagcacgagtcatctccggtgatccttaaatgaactgcaggctgagaaaagaaggaaaaaggtcacagcctccatggctgttgcataccaagactcttggaaggacttctaagatatatgttgattgatcccttttttattttgtggttttttaatatagtataaaaatccttttaaaaaaacaaaaaaaaaaaaaaaaaa

SEQ ID NO: 2894 - protein, 401 aa, Homo sapiens
MSLYDDLGVETSDSKTEGWSKNFKLLQSQLQVKKAALTQAKSQRTKQSTVLAPVIDLKRGGSSDDRQIVDTPPHVAAGLKDPVPSGFSAGEVLIPLADEYDPMFPNDYEKVVKRQREERQRQRELERQKEIEEREKRRKDRHEASGFARRPDPDSDEDEDYERERRKRSMGGAAIAPPTSLVEKDKELPRDFPYEEDSRPRSQSSKAAIPPPVYEEQDRPRSPTGPSNSFLANMGGTVAHKIMQKYGFREGQGLGKHEQGLSTALSVEKTSKRGGKIIVGDATEKDASKKSDSNPLTEILKCPTKVVLLRNMVGAGEVDEDLEVETKEECEKYGKVGKCVIFEIPGAPDDEAVRIFLEFERVESAIKAVVDLNGRYFGGRVVKACFYNLDKFRVLDLAEQV

SEQ ID NO: 2895 - DNA, 1078 bp, Homo sapiens
ctgaccgaccttcagcagggctgtggctaccatgttctctcgcgcgggtgtcgctgggctgtcggcctggaccttgcagccgcaatggattcaagttcgaaatatggcaactttgaaagatatcaccaggagactaaagtccatcaaaaacatccagaaaattaccaagtctatgaaaatggtagcggcagcaaaatatgcccgagctgagagagagctgaaaccagctcgaatatatggattgggatctttagctctgtatgaaaaagctgatatcaaggggcctgaagacaagaagaaacacctccttattggtgtgtcctcagatcgaggactgtgtggtgctattcattcctccattgctaaacagatgaaaagcgaggttgctacactaacagcagctgggaaagaagttatgcttgttggaattggtgacaaaatcagaggcatactttataggactcattctgaccagtttctggtggcattcaaagaagtgggaagaaagccccccacttttggagatgcgtcagtcattgcccttgaattactaaattctggatatgaatttgatgaaggctccatcatctttaataaattcaggtctgtcatctcctataagacagaagaaaagcccatcttttcccttaataccgttgcaagtgctgacagcatgagtatctatgacgatattgatgctgacgtgctgcaaaattaccaagaatacaatctggccaacatcatctactactctctgaaggagtccaccactagtgagcagagtgccaggatgacagccatggacaatgccagcaagaatgcttctgagatgattgacaaattgacattgacattcaaccgtacccgccaagctgtcatcacaaaagagttgattgaaattatctctggtgctgcagctctgtaaagaaggaaaattcagccagttgattttgtttttagcttactgctgcctttgtccgaagaaactgttcctccattatttgaattactgaagacagcaagatatttgtaaattatcttaaaataaacaacttaaaataaaatcattgtttttctt

SEQ ID NO: 2896 - protein, 297 aa, Homo sapiens
MFSRAGVAGLSAWTLQPQWIQVRNMATLKDITRRLKSIKNIQKITKSMKMVAAAKYARAERELKPARIYGLGSLALYEKADIKGPEDKKKHLLIGVSSDRGLCGAIHSSIAKQMKSEVATLTAAGKEVMLVGIGDKIRGILYRTHSDQFLVAFKEVGRKPPTFGDASVIALELLNSGYEFDEGSIIFNKFRSVISYKTEEKPIFSLNTVASADSMSIYDDIDADVLQNYQEYNLANIIYYSLKESTTSEQSARMTAMDNASKNASEMIDKLTLTFNRTRQAVITKELIEIISGAAAL

SEQ ID NO: 2897 - DNA, 2351 bp, Homo sapiens
tcccagccttcccatccccccaccgaaagcaaatcattcaacgacccccgaccctccgacggcaggagccccccgacctcccaggcggaccgccctccctccccgcgcgcgggttccgggcccggcgagagggcgcgagcacagccgaggccatggaggtgacggcggaccagccgcgctgggtgagccaccaccaccccgccgtgctcaacgggcagcacccggacacgcaccacccgggcctcagccactcctacatggacgcggcgcagtacccgctgccggaggaggtggatgtgctttttaacatcgacggtcaaggcaaccacgtcccgccctactacggaaactcggtcagggccacggtgcagaggtaccctccgacccaccacgggagccaggtgtgccgcccgcctctgcttcatggatccctaccctggctggacggcggcaaagccctgggcagccaccacaccgcctccccctggaatctcagccccttctccaagacgtccatccaccacggctccccggggcccctctccgtctaccccccggcctcgtcctcctccttgtcggggggccacgccagcccgcacctcttcaccttcccgcccaccccgccgaaggacgtctccccggacccatcgctgtccaccccaggctcggccggctcggcccggcaggacgagaaagagtgcctcaagtaccaggtgcccctgcccgacagcatgaagctggagtcgtcccactcccgtggcagcatgaccgccctgggtggagcctcctcgtcgacccaccaccccatcaccacctacccgccctacgtgcccgagtacagctccggactcttcccccccagcagcctgctgggcggctcccccaccggcttcggatgcaagtccaggcccaaggcccggtccagcacaggcagggagtgtgtgaactgtggggcaacctcgaccccactgtggcggcgagatggcacgggacactacctgtgcaacgcctgcgggctctatcacaaaatgaacggacagaaccggcccctcattaagcccaagcgaaggctgtctgcagccaggagagcagggacgtcctgtgcgaactgtcagaccaccacaaccacactctggaggaggaatgccaatggggaccctgtctgcaatgcctgtgggctctactacaagcttcacaatattaacagacccctgactatgaagaaggaaggcatccagaccagaaaccgaaaaatgtctagcaaatccaaaaagtgcaaaaaagtgcatgactcactggaggacttccccaagaacagctcgtttaacccggccgccctctccagacacatgtcctccctgagccacatctcgcccttcagccactccagccacatgctgaccacgcccacgccgatgcacccgccatccagcctgtcctttggaccacaccacccctccagcatggtcaccgccatgggttagagccctgctcgatgctcacagggcccccagcgagagtccctgcagtccctttcgacttgcatttttgcaggagcagtatcatgaagcctaaacgcgatggatatatgtttttgaaggcagaaagcaaaattatgtttgccactttgcaaaggagctcactgtggtgtctgtgttccaaccactgaatctggaccccatctgtgaataagccattctgactcatatcccctatttaacagggtctctagtgctgtgaaaaaaaaaatgctgaacattgcatataacttatattgtaagaaatactgtacaatgactttattgcatctgggtagctgtaaggcatgaaggatgccaagaagtttaaggaatatgggagaaatagtgtggaaattaagaagaaactaggtctgatattcaaatggacaaactgccagttttgtttcctttcactggccacagttgtttgatgcattaaaagaaaataaaaaaaagaaaaaagagaaaagaaaaaaaaagaaaaaagttgtaggcgaatcatttgttcaaagctgttggcctctgcaaaggaaataccagttctgggcaatcagtgttaccgttcaccagttgccgttgagggtttcagagagcctttttctaggcctacatgctttgtgaacaagtccctgtaattgttgtttgtatgtataattcaaagcaccaaaataagaaaagatgtagatttatttcatcatattatacagaccgaactgttgtataaatttatttactgctagtcttaagaactgctttctttcgtttgtttgtttcaatattttccttctctctcaatttttggttgaataaactagattacattcagttggc

SEQ ID NO: 2898 - DNA, 1120 bp, Homo sapiens
tggcaccggcatcggctgacactgctgcctccagctagttatttcgtcctcttccgttcttcacccctacaccttggaggtgaacttctcacctgagggctgtaaagactcgtttgaaaatggagagccaagaaccaacggaatcttctcagaatggcaaacagtatatcatttcagaggagttaatttcagaaggaaaatgggtcaagcttgaaaaaacaacgtacatggatcctactggtaaaactagaacttgggaatcagtgaaacgtacaaccaggaaagagcagactgcggatggtgtcgcggtcatccccgtgctgcagagaacacttcactatgagtgtatcgttctggtgaaacagttccgaccaccaatggggggctactgcatagagttccctgcaggtctcatagatgatggtgaaaccccagaagcagctgctctccgggagcttgaagaagaaactggctacaaaggggacattgccgaatgttctccagcggtctgtatggacccaggcttgtcaaactgtactatacacatcgtgacagtcaccattaacggagatgatgccgaaaacgcaaggccgaagccaaagccagagtttgtggaagtcatttctttacccaagaatgacctgctgcagagacttgatgctctggtagctgaagaacatctcacagtggacgccagggtctattcctacgctctagcactgaaacatgcaaatgcaaagccatttgaagtgcccttcttgaaattttaagcccaaatatgacactggccatttttgtaaacgagaccaccaggccttcttcactaagactttgtattcaacttagtttaatgtagatttgccattagctttttcgtaaaataaaagcacagaacagatgtggtggtggtatggaattgtaattacaggtaggttgtgaccttcctttaaatttgttataactccagctaaaattaacaaagaatataaatgcaagtatgtttactccaatttttttaaagctcaacagcagttaactacagctcagttacttttctagtccagtctggtagacaggggtatttgtatagagaaatagacctgagttctcaattaggtca

SEQ ID NO: 2899 - DNA, 1542 bp, Homo sapiens
tgcgtttagggcgaagacggagttgtaaacttcttaaaattcctctctcgacacttcggtaattcctctttcgagactaaagctctttttgtatgcgtgtgtgtcaagcgtatgccccgggattctcctccgcttccttttctcggtcttccttcttgctttagggaccggaagagtccttgaaccaaaatagctcggcgggcacttccggggccggcgcccagagttccgggagggtgcaggcaggagagggaaaggcagcagcggcggcagctggaggatgaagaaggagcatgtgcttcactgccagttctccgcgtggtacccgttcttccgaggcgttaccatcaagagtgtcattcttccacttcctcagaatgtgaaggattatttactcgatgatggaactctggtggtttcaggaagggatgatccaccaacacattctcagccagacagtgatgatgaagcagaagaaatacagtggtctgatgatgagaacacagccacgcttacggcaccagaatttcctgagtttgccactaaagtccaggaacctatcaattccctcgggggcagtgtctttcctaagcttaattggagtgccccaagggatgcgtattggatagcaatgaatagttctctgaaatgtaaaaccctcagcgacatctttctgcttttcaagagttccgatttcatcactcgtgacttcactcagccgtttattcattgtactgatgattctccagatccatgtatagaatatgagctcgttctccgaaaatggtgtgaattgattcctggggctgagtttcgatgttttgtcaaggaaaacaagcttattggtatttctcaaagagactacacacaatactatgatcatatttctaaacaaaaggaagaaattcgcagatgcatacaagactttttcaagaaacacatacagtacaaattcttagatgaagactttgtgttcgatatatacagagacagtagggggaaggtgtggctcattgactttaatccatttggtgaagtcacagattcactgctgttcacctgggaagaactgatatctgagaacaacttaaacggcgattttagtgaagttgacgctcaagagcaggattccccagctttccgttgcacaaacagtgaagtgacagtccagcccagcccctatttgagttaccggctacccaaggactttgtagacctctctactgggagggacgctcacaagctaatagacttccttaagctgaagagaaatcagcaggaggacgactgatgagcgtactgtaactggagaagaggaggccccgccccaccgctccgggagctgctcatcagccgcaacttcctgccgaccctgatgcgggtgggccgagcagtgtggacatcagccactttttatattcatgtacattcacctggggaaaaaaacggagggactttgctacttgtaaaaataacataataaatagatcttaaacataggaaaaccatactgttctgataataaaatgctttctatgaaat

SEQ ID NO: 2900 - protein, 336 aa, Homo sapiens
MKKEHVLHCQFSAWYPFFRGVTIKSVILPLPQNVKDYLLDDGTLVVSGRDDPPTHSQPDSDDEAEEIQWSDDENTATLTAPEFPEFATKVQEPINSLGGSVFPKLNWSAPRDAYWIAMNSSLKCKTLSDIFLLFKSSDFITRDFTQPFIHCTDDSPDPCIEYELVLRKWCELIPGAEFRCFVKENKLIGISQRDYTQYYDHISKQKEEIRRCIQDFFKKHIQYKFLDEDFVFDIYRDSRGKVWLIDFNPFGEVTDSLLFTWEELISENNLNGDFSEVDAQEQDSPAFRCTNSEVTVQPSPYLSYRLPKDFVDLSTGRDAHKLIDFLKLKRNQQEDD

SEQ ID NO: 2901 - DNA, 1684 bp, Homo sapiens
ccggctcccgcagggccgcgccgaggcaggcgagcccccgcggcgcccaggcgcgggcccgggcccccgccgccgccgccgccgccgggcgcggcatttttattcaggcgacgcttaagggagcccggccgcgcccggtgcattgtgggagcggcccgcggcccgttttcgggaggaggcggagggcgcaaagcgagccggtggatccataaagaacccagccaacccgcagagggaggggaggggctgagctgtgaggagagcggggcccaagaaccatgtctacgcgggagtcctttaacccggaaagttacgaattggacaaaagcttccggctaaccagattcactgaactgaagggcacaggctgcaaagtgccccaagatgtcctgcaaaaattgctggaatctttacaggagaaccacttccaagaagatgagcagtttctgggagccgttatgccaaggcttggcattggaatggatacttgtgtcattcctttgaggcacggtgggctttccttggttcaaaccacagattacatttacccgatcgtagacgacccttacatgatgggcaggatagcgtgtgccaatgtcctcagtgacctctatgcaatgggggtcacggaatgtgacaatatgctgatgctccttggagtcagtaataaaatgaccgacagggaaagggataaagtgatgcctctgattatccaaggttttaaagacgcagctgaggaagcaggaacatctgtaacaggcggccaaacagtactaaacccctggattgtcctgggaggagtggctaccactgtctgccaacccaatgaatttatcatgccagacaatgcagtgccaggggacgtgctggtgctgacaaaacccctggggacacaggtggcagtggctgtgcaccagtggctggatatccctgagaaatggaataagattaaactagtggtcacccaagaagatgtagagctggcctaccaggaggcgatgatgaacatggcgaggctcaacaggacagctgcaggactcatgcacacgttcaatgcccacgccgccactgacatcacgggcttcgggattttgggccatgcgcagaacctggccaagcagcagaggaacgaggtgtcgtttgtaattcacaacctcccggtgctggccaagatggctgcggtgagcaaggcctgcggaaacatgttcggcctcatgcacgggacctgcccggagacttcaggcggccttctgatctgtttaccacgtgagcaagcagctcggttctgtgcagagataaagtcccccaaatatggtgaaggccaccaagcatggattattgggattgtagagaagggcaaccgcacagccagaatcatagacaaaccccggatcatcgaggtcgcaccacaagtggccactcaaaatgtgaatcccacacccggggccacctcttaatctagacagaaatagctgtttggttttgtttttaaatagatctatttcccttatcacttcaattaaagactataaacaacaaaaatctcattgtgtctacacatcggggtgaccttaggtcggtttgtaagtggatacaattaataaaataaaatccattgcctttttttcctgttacattaactgaagatgcacctaatcttgaggcagcttctgagttgagaatt

SEQ ID NO: 2902 - DNA, 3301 bp, Homo sapiens
gagagccctcctcaggggctgtctctgccttcccttcttcccatgtgtatctggggcagctgaggcagggctaggagaagagcccaggttcctcctgccacctccaagcgatgaagcagccctgggccaactccagcattctcgtgtgaactgcagaggagccctgcgcttccagctacttgcagccagacagcccacctgaggatattgaccataaggactcatatctcattacaagaagcatcatggccgagccagactacatagaagatgacaatcctgaactcattaggcctcagaaactgatcaatcctgtaaaaacctcccggaaccatcaagatcttcacagagaacttcttatgaatcaaaaaaggggtcttgctcctcagaacaaaccagaattgcagaaggtgatggaaaaaagaaaacgagaccaagtaataaagcagaaggaagaagaagcacagaagaagaaatctgacttggaaatagagctattaaaacggcagcagaagttggagcagcttgaacttgagaagcagaaattgcaagaagagcaagaaaatgcccccgagtttgtgaaggtgaaaggcaatctcaggagaacaggccaagaagtcgcccaagcccaggagtcctaggctgaggctgcaccaagacctcgtgtgtcaccccacagagctgtctgtgggtgccttctcaatctcagggcaaaagcccctggagaatatttcagccagcagagaattttgacttgcagtaggatttggtttgattttcctacgatctgggtggatgccttgcctgtgacagttgcagttcctattcgccaaatgaagggcagtgccccgcacgtaagttggaatgatggacctgtgttcagagacttaacagaaccaacaagcaaaacaagtgagaacaggaaaaaggaagaggacactggaatcaattcttgagagttgcactacttggtttttcttccattccaagtttcgtgggacccagagccttttttcttttaaaagctaaaaaacaagtgtttaattcctctttttgttatctgttagataattgagatcacctagaaatgcgtttaatctgttcactcactgtaaattttgaggacccagaattgtcttgtttaatttatactttcacccctgttgcagttaacaccagagaaggaacgtgaatgtcgagcacagccactacccttgttggcacttaatttagaaatagggtgagaagtttaaaagcccatcttgattttattttcattccttttggttctctgtgtaataatagcaggctacatagtgacattccagttccaagaaggtacatcctgtccattcattaattgctttgattactaggagggtttctgttcagttttgtttttaaatgtcttgctgatctagttctttcagatggaataaccttccagtcccttagagagtggaactagtccatataacccagcttcagtagcaaaagtagaagccgccacatcttttcatttctccaagaggagagtggggaaggttcccatgaccagctgggcagtcaggatttctctaggcattctaatgtgaaataagtgtagactgctgtcaaggaggcttcatcagaagatgtatagcatttgaatgtctaatgataatgcatatcattagaatccaagctttgaaaatttctgattaatgctcatgtatttctttatctttgtttttccttgtgaagaaagactttcaccactgtctgagtgatgatgctgttgataaggatgatgtcgatgactactatattgcatctctcaggaacagctgatgggaagggaggggctgctgagttcccttgttctagctagcagcacgctcctcagagagggggccgagttacagacagcagccgcattctcatgcaaaattagttttaaactgctagtgtgggcatcggtaccttttgcctgggtgataccgaagaattgttgaggatttagtatgctccgtagagacagttcagccagtcatttctgcattggagagacttctcatactttctttgaagactcatagaaagctggatctagagcttttgaatccttaattagcacagtagaaattagctttctatgggaatgctttagtgttagcagttgacaattaggcccatattcaatctgaatgggaacaaaagtaaatgcaatgataatatactgctagttagagaaacatgttagttgattatacctgaaatggattatttatctcatcagcaagtattatttgaataaaatgagaaatgcttaagaaaaattgttgctctacagtaatttggtttcgaagaatggaatggtaactattttttcccatcgttcttttgagagaaggaagtgtgatgactgatgatcttgaaaagcccatttctgattgcacgttgactggaattctttctttgtgtctgtggactagcgatgctgtttgtaaaatgaagattcgggactggctcatatctttttatctaactagatgtcagatcttgaaatctgtattctcgaagcaattctgccacttgatcgtattcacaggggccctggtaggctcctttagaaggaccatttctgttcctagagcttaactagaattcattcttcactgaaaaaaaaaaaagttacttaagaaagcatttctttcctaatctcactcaaatctgcagaattatttgtaattagtaatacaaaatctggccaaaaggagacttgtaaatagcgtaaagtggtgtcttatgctaaacggtggaatgtataggcagagaagctctttgaagttgtcagatgagctgggctcacaagcctgattcaaacaggctgtcggtctcctctcaccccttaatactgtgcagcccaaactcctaggactcttgaacatctgagcagttttgtgctttgagccactttttgacaaaaatggctccatttttccacagcgtggttttcttaaaatagtttaatgttttatagtctcatagtagtagtgttgctttctaagctataacagtcgactttattcttctactctgaaaaatcttgacttgtttgagtgtatataatatatataaagggagccttaatggattggttttcataatttaatattttttgtatttgctcttgtataattgtttttaacggaaagtattaaagaattgagggtggaattcttagaaccaaagttattcttaataaaaatcaccacatgcttggaccatgcaaaaaaaaaaaaaaaaaaaaaaaaaaaaa

SEQ ID NO: 2903 - protein, 131 aa, Homo sapiens
MAEPDYIEDDNPELIRPQKLINPVKTSRNHQDLHRELLMNQKRGLAPQNKPELQKVMEKRKRDQVIKQKEEEAQKKKSDLEIELLKRQQKLEQLELEKQKLQEEQENAPEFVKVKGNLRRTGQEVAQAQES

SEQ ID NO: 2904 - DNA, 1838 bp, Homo sapiens
cgcgccagagacgcagccgcgctcccaccacccacacccaccgcgccctcgttcgcctcttctccgggagccagtccgcgccaccgccgccgcccaggccatcgccaccctccgcagccatgtccaccaggtccgtgtcctcgtcctcctaccgcaggatgttcggcggcccgggcaccgcgagccggccgagctccagccggagctacgtgactacgtccacccgcacctacagcctgggcagcgcgctgcgccccagcaccagccgcagcctctacgcctcgtccccgggcggcgtgtatgccacgcgctcctctgccgtgcgcctgcggagcagcgtgcccggggtgcggctcctgcaggactcggtggacttctcgctggccgacgccatcaacaccgagttcaagaacacccgcaccaacgagaaggtggagctgcaggagctgaatgaccgcttcgccaactacatcgacaaggtgcgcttcctggagcagcagaataagatcctgctggccgagctcgagcagctcaagggccaaggcaagtcgcgcctgggggacctctacgaggaggagatgcgggagctgcgccggcaggtggaccagctaaccaacgacaaagcccgcgtcgaggtggagcgcgacaacctggccgaggacatcatgcgcctccgggagaaattgcaggaggagatgcttcagagagaggaagccgaaaacaccctgcaatctttcagacaggatgttgacaatgcgtctctggcacgtcttgaccttgaacgcaaagtggaatctttgcaagaagagattgcctttttgaagaaactccacgaagaggaaatccaggagctgcaggctcagattcaggaacagcatgtccaaatcgatgtggatgtttccaagcctgacctcacggctgccctgcgtgacgtacgtcagcaatatgaaagtgtggctgccaagaacctgcaggaggcagaagaatggtacaaatccaagtttgctgacctctctgaggctgccaaccggaacaatgacgccctgcgccaggcaaagcaggagtccactgagtaccggagacaggtgcagtccctcacctgtgaagtggatgcccttaaaggaaccaatgagtccctggaacgccagatgcgtgaaatggaagagaactttgccgttgaagctgctaactaccaagacactattggccgcctgcaggatgagattcagaatatgaaggaggaaatggctcgtcaccttcgtgaataccaagacctgctcaatgttaagatggcccttgacattgagattgccacctacaggaagctgctggaaggcgaggagagcaggatttctctgcctcttccaaacttttcctccctgaacctgagggaaactaatctggattcactccctctggttgatacccactcaaaaaggacacttctgattaagacggttgaaactagagatggacaggttatcaacgaaacttctcagcatcacgatgaccttgaataaaaattgcacacactcagtgcagcaatatattaccagcaagaataaaaaagaaatccatatcttaaagaaacagctttcaagtgcctttctgcagtttttcaggagcgcaagatagatttggaataggaataagctctagttcttaacaaccgacactcctacaagatttagaaaaaagtttacaacataatctagtttacagaaaaatcttgtgctagaatactttttaaaaggtattttgaataccattaaaactgcttttttttttccagcaagtatccaaccaacttggttctgcttcaataaatctttggaaaa

SEQ ID NO: 2905 - protein, 466 aa, Homo sapiens
MSTRSVSSSSYRRMFGGPGTASRPSSSRSYVTTSTRTYSLGSALRPSTSRSLYASSPGGVYATRSSAVRLRSSVPGVRLLQDSVDFSLADAINTEFKNTRTNEKVELQELNDRFANYIDKVRFLEQQNKILLAELEQLKGQGKSRLGDLYEEEMRELRRQVDQLTNDKARVEVERDNLAEDIMRLREKLQEEMLQREEAENTLQSFRQDVDNASLARLDLERKVESLQEEIAFLKKLHEEEIQELQAQIQEQHVQIDVDVSKPDLTAALRDVRQQYESVAAKNLQEAEEWYKSKFADLSEAANRNNDALRQAKQESTEYRRQVQSLTCEVDALKGTNESLERQMREMEENFAVEAANYQDTIGRLQDEIQNMKEEMARHLREYQDLLNVKMALDIEIATYRKLLEGEESRISLPLPNFSSLNLRETNLDSLPLVDTHSKRTLLIKTVETRDGQVINETSQHHDDLE

SEQ ID NO: 2906 - DNA, 1632 bp, Homo sapiens
atggagggagcagaacaaccacacaaggagcccatgccttggctacagtcaaacttcagcgtgtcctataaggcatgtcgtcgcatttgtgcaaacattcagcggcctcttatgttcacagatgactcccctggtggtgaggagatggcatttcctccctgtgtgcaggtaaagactcaaacactgattcagagctgctgtcccatctactcactgctcccatgttcggctggcgctgaggagacacctttagctgctgtgaccccatggtcacaaaagccacagagctcagagctgctcctcaaagaacatcctccctgtttgcttctttctagcccctctcctttctggtatccacggaacctatcctatgatgtgacagaagagtcaattaaggaattctttagaggattaattatcagtgcagtgcgtttaccacgtgaacccagcaatccagagaggagaattcgagtggacgttgctgatcaagcacaggatacagacagggacgatcgttcttttggccgtgatagaaatcgggattctgacaaaacagatacagactggagggctcgttctgccacagacagctttgatgactacccgcctagaaggggtgatgataggtttggagacaagtatcgagatcgttatgattcagaccagtctggccgtgggtattggtatgagtatcgggatggcccatgccgggatatggatcgatatggctggcgggatcgctatgatgaccgaggcagcagagactatgctagaggctatcattcctggataggcagtggcagaagggcatttggcagtgggtacccagggacaatgactacagaggaggcagggaccgctatgaagaccgatacaacagatgggatgatgggtcgtgcagctccagagatgatttctctcgggatgattataggtataatgatagacgtcccccgtccccctcaaagacccaaactgaatctaaagcctcataatactcctaagggagatgattcttctgctagtacctcccagtccggtcgagcttattttgtctttggaggggcaaagcccgttgatagagctgctagagaaacaaaaagacacccaagctggcgaagtgaagaaacccaggaaccggagaggcacccaagctggcgaagtgaagaaactcaggaactggaacggtggaggacaggaagtgagtcatcgcacactgggacctccgccacacccggcaaaagtcaatcagaccaggatgcaggaaggagagagactgaaaagtctctagaaaatgaaacactcagtaaggaggaagactgtcactctccaacttctaaatctaccaaaactgatcagccccaaaagagctcagacacacagcacgaataccctacaagtggtgggggaaaagtaactccagctcaaccgtctgagaaaggaccagcaaggaaagatgaaaataaagtaggtgtggtgaatgtcccaaaagaccacactgggaactctagccatggtccaggagacagagggaacaaagaccactggaaggagtcagataggaaagatggcaaaaaggagcatgactccagatctgcacctgagccaatatgtgaaatacggaatttgtga

SEQ ID NO: 2907 - protein, 543 aa, Homo sapiens
MEGAEQPHKEPMPWLQSNFSVSYKACRRICANIQRPLMFTDDSPGGEEMAFPPCVQVKTQTLIQSCCPIYSLLPCSAGAEETPLAAVTPWSQKPQSSELLLKEHPPCLLLSSPSPFWYPRNLSYDVTEESIKEFFRGLIISAVRLPREPSNPERRIRVDVADQAQDTDRDDRSFGRDRNRDSDKTDTDWRARSATDSFDDYPPRRGDDRFGDKYRDRYDSDQSGRGYWYEYRDGPCRDMDRYGWRDRYDDRGSRDYARGYHSWIGSGRRAFGSGYPGTMTTEEAGTAMKTDTTDGMMGRAAPEMISLGMIIGIMIDVPRPPQRPKLNLKPHNTPKGDDSSASTSQSGRAYFVFGGAKPVDRAARETKRHPSWRSEETQEPERHPSWRSEETQELERWRTGSESSHTGTSATPGKSQSDQDAGRRETEKSLENETLSKEEDCHSPTSKSTKTDQPQKSSDTQHEYPTSGGGKVTPAQPSEKGPARKDENKVGVVNVPKDHTGNSSHGPGDRGNKDHWKESDRKDGKKEHDSRSAPEPICEIRNL

SEQ ID NO: 2908 - DNA, 2758 bp, Homo sapiens
agaacatccagtcatggataaaaatgagctggttcagaaggccaaactggccgagcaggctgagcgatatgatgacatggcagcctgcatgaagtctgtaactgagcaaggagctgaattatccaatgaggaaaggaatctcctctcagttgcttataaaaatgttgtaggagcccataggtcatcttggagggtcgtctcaagtattgaacaaaagacggagggagctgagaaaaaacagcagatggctcgcgaatacagagagaaaattgagacggagctaagagatatctgcaatgatgtactgtctcttttggaaaagttcttgatccccagtgcttcacaagcagagagcaaagtcttctatttgaaaatggaaggagattactaccgttacttggctgaggttgccgctggggatgacaagaaagggattgtggatcagtcacaacaagcgtaccaagaagcttttgaaatcagcaaaaaggaaatgcaaccaacacatcctatcagactgggtctggcccttaacttctctgtgttctattatgagattctgaactccccagagaaagcctgctctcttgcaaagacagcttttgatgaagccattgctgaacttgatacattaagtgaagagtcatacaaagacagcacgctaataatgcaattactgagggacaacctgacactgtggacatcagatacccaagcagacgaaggtgaagcaggagaaggagtggaaaattaaccggccttccagcttttgtctgcctcattctaaaatttacacagtagaccatttgtcatccatgctgtcccacaaatagttttttgtttatgacttatgtcaggtttatgttacttctatttgaatttctctatttcccatacggtttctatgtttaatattaggggaggagaggaagttaacatttagggagttatctgttttcatcttgaggtgttcaatatggggacgtggaatttttatacaggttataaatgtttggcatagtacttttggtatattgtggcttcacaagggccagtgttaaaactgcttccatgtctaagcaaagaaaactgcctacatattggtttgtcctggtggggaataaaagggatcattggttccagtcacaggtgtagtaattgtgggtactttaaggtatggagcacttacaaggctgtggtagaaacagatgccccatggataccacatgttaaaccatgtataattgtggaatactcaatctcatacctttgaccacagctgcagaagtgttcttttagacacagttgtgacccattttactctgtataagggcagaaatggttcacattccattatttataaagttacctgctgttagcattcattatttttgctacactcattttatttgtatttaaatgttttaggcaacctaagaacaaatgtaaaagtaaagatgcagtaaaaatgaattgcttggtattcactacttcatgtatatcaagcacagcaataaaacaaaaacccatgtatttaactttttttaggttttttgcttttgtgattttttttgatacttgcctaacatgcatgtgctgtaaaaatagttaacagggaaataacttgagatgatggctagctttgtttaatgtcttatgaaattttcatgaacaatccaagcataattgttaagaacacacgtattaaattcatgtaagtggaataaacgttttatgaatggacttttcaactactttctctacagcttttcatgtaaattagtcttttggttctgaaacttctctaaaggaaattgtacatttttttgaaatgtattccttattctctcttggcagctaatgggcttttaccaagtttaaacacaaagtttatcataacaacaaaaatactactaatataactactgtttccatgtcccatgattccctctcttcctccccaccctgaaaaaaatcagttcctattttttctgggagagggggagattgattggaaaaaaatgtaatatgttccatttgaaatattggtaaatggcattttctaacttaggaagccacagtgttcttggcccatcatgacattgggtagcattaactataagttttgtgcttccaaataactttttggtttttaacaatttcttgatactcttatagcctgccttcagtgttgatcctttattctttctatctgtcaggtgcacaagattaccctccttttttagccttctgtctttcttgtcaccaaccattcctacttggtggccatgtacttggaaaaaggccgcatgatctttctggctccactcagtgtctaaggcaccctgcttcctttgcttgcatcccacagactatttccctcatcctatttactgcagcaaatctctccttagttgatgatactgtgtttatctccctttaaaaccctacctatcctgaatggtctgtcattgtctgcctttaatccttcctctttctcttcctctattctctaaataatgatggggctaagttatacccaaagctcactttacaaaatatttcgtcagtactttgcagaaaacaccaaacaaaaatgccattttaaaagaggtgtattttttatttcagaatgtaagctcctcaagaacagggacaatgttttctgtatgttctattgtgcctagtacactgtaaatgctcaataaatattgatgatgggaggcagtgaatcttgataagggtgagaaactgaaatccc

SEQ ID NO: 2909 - DNA, 2353 bp, Homo sapiens
gctcggagcctcggcggaccttgctgcctctgtctctttaacgcgagaggaagcgatgcagaggggtggaaaatggcagagctgcagatgttactagaggaggagatcccgtctggcaagagggcgctgatcgagagttaccagaacctgactcgggtggcagactactgtgaaaacaactacatacaggctacagacaagagaaaagctttagaggagaccaaagcctatacaacccaatctctagctagtgttgcttatcaaataaatgcattggccaacaatgtactccagttgctggatatccaagcctctcagcttcggagaatggagtcttccatcaatcatatctcacagactgtggatattcataaggagaaagtggcacgaagagagattggtattttgacaacaaataagaatacatcaagaactcacaaaataatagcacctgcgaatatggagcgccctgtaaggtatattcggaaacctatcgattacacagttctggatgatgtgggccatggtgtcaagtggctaaaagccaagcatggaaataaccagcctgcaagaactggcacactgtcgagaacaaatcctcctactcagaaaccgccaagtcctcccatgtcaggccggggaacactgggacggaatactccttataaaaccctggaacctgttaaacccccaacagttcctaatgactatatgaccagtcctgctaggcttggaagtcagcatagtccaggcaggacagcatctttaaatcagagaccaaggacacacagtggaagtagtggaggaagtggaagtcgagaaaacagtggtagcagtagtattggcattcccattgctgtgcctacaccttcgccacccactattggaccagaaaacatttctgtccctcctccttctggagctccaccagcaccacctctggcaccacttctcccagtgagcactgtgatagcagccccgggctcagctcctggttcccagtatggcacaatgaccaggcagatatctcgacacaactctactacttcttcgacatcttctggtggatacagacgaactccctctgtgactgctcaattttctgctcagcctcatgttaatggaggtccactttattctcaaaattcaatttctattgctccaccccctccccctatgcctcagttgactccacagatacctctcacaggcttcgtggccagggtgcaggaaaacattgctgatagtccaactccaccgccaccacctccaccagatgacattcccatgtttgatgactctccacctcccccaccaccaccaccagtggattatgaagatgaggaggctgcagtagttcagtataatgatccatatgcagatggggatcctgcttgggcccccaagaattatattgagaaagttgttgcaatatatgattatacaaaagacaaggatgatgagctgtcatttatggagggtgcaatcatttatgttataaagaagaatgatgatggctggtatgaaggagtctgcaatcgagtgactggtctgttccctgggaactatgttgaatcaatcatgcactatactgattaatttttttttttcttttgaagtagattcttattactcagtcatactgtgggactattatggttaacagaactgtcttaatatgttttaaaatgtgcccatattttcagaacatgctgttttattggtaaattgaatgtctacctgtaagcataaatctttgaggcagtttatgtattgctgaatagcaatttatacaagaagctgtccataactgattatgcttatgtacttacttacacatttttaactttatgaccagcctaaatattctgggggaagtggggtataatatttaacgaatcatgattcagattgtaccattacatgtttcagtgcagcatggttactaacgctatgtcagactaatattaaaatcagaaaatttaaatgctggtgctggtcagactttttttgttagattctctcatttaaaaaaaatactgtttgtttaaagcatgcataaaaatttatgtattgaaatatacttaaaaattcaagatgcttcccatttgtgtaatatttacctggaggactcgtacttaggtgtcttaacgtgaattgagtctccaaggtctccatgtgaaacaagcaaaaagagaattatctgtaatgttgtaatttgtacctaagttttttaatgagtgaaatttgcattataaactttttccattcataaatacataagtgaaccaaaggtttttgtcctttccttcactgatttgctttaaaaaaaataaaagataatgatttattg

SEQ ID NO: 2910 - DNA, 3974 bp, Homo sapiens
ggggaggccattttccgtttctgggaggagtgaggggcaacgggtcggagaaaaaggaaaaaagaagggctcagcgcctccccgccgggccgtggacagaggggcacagtttcggcaggcgggtgaggtcgctgagggcccgccggagatgttttccttgtcgagcacggtgcaaccccaggttacagttcctctgagtcatctcatcaatgccttccatacaccaaaaaacacttctgtttctctcagtggagtgtcagtttctcaaaaccagcatcgagatgtagttcctgagcatgaggctcccagcagtgagtgtatgttcagtgacttcctgacgaagcttaacattgtttcaattggcaaaggaaaaatattcgaagggtacagatccatgttcatggagccagcaaaaaggatgaagaagagcttggacacaaccgataactggcacatccgtccagaacccttctccctctcaatccctccttcacttaacttaagggaccttggattatctgaactaaaaattggacagattgatcagctggtagaaaatctacttcctggattttgtaaaggcaaaaacatttcttcccattggcatacatcccatgtctctgcacaatccttctttgaaaataaatatggtaacttagatatatttagtacattacgttcctcttgcttgtatcgacatcattcaagagctcttcaaagcatttgttcagatcttcagtactggccagttttcatacagtctcggggttttaaaactttgaaatcaaggacacgacgtctccagtctacctccgagagattagctgaaacacagaatatagcgccatcattcgtgaaggggtttcttttgcgggacagaggatcagatgttgagagtttggacaaactcatgaaaaccaaaaatatacctgaagctcaccaagatgcatttaaaactggttttgcggaaggttttctgaaagctcaagcactcacacaaaaaaccaatgattccctaaggcgaacccgtctgattctcttcgttctgctgctattcggcatttatggacttctaaaaaacccatttttatctgtccgcttccggacaacaacagggcttgattctgcagtagatcctgtccagatgaaaaatgtcacctttgaacatgttaaaggggtggaggaagctaaacaagaattacaggaagttgttgaattcttgaaaaatccacaaaaatttactattcttggaggtaaacttccaaaaggaattcttttagttggacccccagggactggaaagacacttcttgcccgagctgtggcgggagaagctgatgttcctttttattatgcttctggatccgaatttgatgagatgtttgtgggtgtgggagccagccgtatcagaaatctttttagggaagcaaaggcgaatgctccttgtgttatatttattgatgaattagattctgttggtgggaagagaattgaatctccaatgcatccatattcaaggcagaccataaatcaacttcttgctgaaatggatggttttaaacccaatgaaggagttatcataataggagccacaaacttcccagaggcattagataatgccttaatacgtcctggtcgttttgacatgcaagttacagttccaaggccagatgtaaaaggtcgaacagaaattttgaaatggtatctcaataaaataaagtttgatcaatccgttgatccagaaattatagctcgaggtactgttggcttttccggagcagagttggagaatcttgtgaaccaggctgcattaaaagcagctgttgatggaaaagaaatggttaccatgaaggagctggagttttccaaagacaaaattctaatggggcctgaaagaagaagtgtggaaattgataacaaaaacaaaaccatcacagcatatcatgaatctggtcatgccattattgcatattacacaaaagatgcaatgcctatcaacaaagctacaatcatgccacgggggccaacacttggacatgtgtccctgttacctgagaatgacagatggaatgaaactagagcccagctgcttgcacaaatggatgttagtatgggaggaagagtggcagaggagcttatatttggaaccgaccatattacaacaggtgcttccagtgattttgataatgccactaaaatagcaaagcggatggttaccaaatttggaatgagtgaaaagcttggagttatgacctacagtgatacagggaaactaagtccagaaacccaatctgccatcgaacaagaaataagaatccttctaagggactcatatgaacgagcaaaacatatcttgaaaactcatgcaaaggagcataagaatctcgcagaagctttattgacctatgagactttggatgccaaagagattcaaattgttcttgaggggaaaaagttggaagtgagatgataactctcttgatatggatgcttgctggttttattgcaagaatacaagtagcattgcagtagtctacttttacaacgctttcccctcattcttgatgtggtgtaattgaagggtgtgaaatgctttgtcaatcatttgtcacatttatccagtttgggttattctcattatgacacctattgcaaattagcatcccatggcaaatatattttgaaaaaataaagaactatcaggattgaaaacagctcttttgaggaatgtcaattagttattaagttgaaagtaattaatgattttatgtttggttactctactagatttgataaaaattgtgcctttagccttctatatacatcagtggaaacttaagatgcagtaattatgttccagattgaccatgaataaaatattttttaatctaaatgtagagaagttgggattaaaagcagtctcggaaacacagagccaggaatatagccttttggcatggtgccatggctcacatctgtaatcccagcacttttggaggctgaggcgggtggattgcttgaggccaggagttcgagaccagcctggccaacgtggtgaaacgctgtctctactaaaatacaaaaaaatagggctgggcgcggttgctcacgcctgtaatcccagcacttttcagaggccaaggcgggcaaatcacctgaggtcaagagtttgagaccagcctggccaacatggtgaaaccccatctctactaaacatgcaaaaattacctgggcatggtggcaggtgcttataatcccagctactctgggggccaaggcaggagaattgcttgagcctgggagatggaggttgcagtgagctgagatcatgccactgcactccagcctgggcaacagagcaagactctgcctcaaaaaaaaattaaaataaatttaaatacaaaaaaaaatagccaggtgtggggtgcatgcctggaatcccagctacttgagaggctgaggcacgagaattgcttgaacccaggaggtggaggttgcagtgagccaagatcacaggagccactgcactccagcctgggtgacagagtgagactctgtctcaaaaaaaaattaaataaattattataacctttcagaaatgctgtgtgcattttcatgttcttttttttagcattactgtcactctccctaatgaaatgtacttcagagaagcagtattttgttaaataaatacataacctcattctgaataatgtccctcattttgactataactgtgcttggtttcaaaagcaaaattaaacaaaaatctcagtcccctccgaagtgaactttgtgttaccctgcgtcagaaatgccaagttgtgtttacttttcattcagattttgtgaatatgaacatgctgttataggatctacagatgaatatttaactcaatagaaaaattattttagaacacattgtattggtattacaaccagattatattcttgacgttgacttcattaaaatt

SEQ ID NO: 2911 - DNA, 549 bp, Homo sapiens
accgccatcttccagtaattcgccaaagtgacgaacacaaagagaaagaggaggggcacccgatatatgttctttaggccttttagaaaacatggagttgttcctttggccacatatatgcgaatctataagaaaggtgatattgtagacatcaagggaatgggtactgttcaaaaaggaatgccccacaagtgttaccatggcaaaactggaagagtctacaatgttacccagcatgctgttggcattgttgtaaacacacaagttaagggcaagattcttgccaagagaattaatgtgtttattgagcacattaagcactctaagagccgagacagcttcctgaaacgcatgaaggaaaatgatcagaaaaagaaagaagccaaagagaaaggtacctgggttcaactaaagcgccagcctgctccacccagagaagcacactttgtgagaaccaatgggaaggagcctgagctgctggaacctattccctatgaattcatggcataataggtgttaaaaaaaaataataaaggatctctgggctac

SEQ ID NO: 2912 - protein, 160 aa, Homo sapiens
VTNTKRKRRGTRYMFFRPFRKHGVVPLATYMRIYKKGDIVDIKGMGTVQKGMPHKCYHGKTGRVYNVTQHAVGIVVNTQVKGKILAKRINVFIEHIKHSKSRDSFLKRMKENDQKKKEAKEKGTWVQLKRQPAPPREAHFVRTNGKEPELLEPIPYEFMA

SEQ ID NO: 2913 - DNA, 8297 bp, Homo sapiens
cactgctctgactgcgtcctccccaggctgaagtgtcctcaggtttcatgtggatttgcccagtaatggatggctccaccgaggccaggttggggaagttcagcctcgaggacactaggggacgaaaaacttcaaaaagaagactctttttattaatattttggcgttctttttggagaggaacttttgggatgtagcctttacctgtttcctgaatttgacatccaaaaagccttttggaaaacaccattctaaatttatcctgttctgaatcatcatcgcttctgatagatgcagttgcttgctgacatcgtgatctttgattttgtacaacgctatttgggctaacttttgggattttactttgtgcttagaatttgaaagtagtattcattggaaagagactccaagaaaatactcgaagacatcaaaagctggattcgagggtataacgtgttttgttttgttttttaaattagaaaaataaggaattgcagtgtgattttctttccccctttaacttagaggaacgaggattatacagaaatttgaaatttcaacaagaaaaacttaagcttccttggattcccacgtcaaaggaaagtttcaagctttcagaaggagttctcactcgaagataaagaacagctcgctaaccacgaaagaggaatcgatgctcagcttttagttgcacttcctaaagttgcagaattaagacaaatctttgaaccaaagaagaaagaattcttagaaatgaaaagaaaagaaagaattgccaggcgcctggaagggattgaaaatgacactcagcccatcctcttgcagagctgcacaggattggtgactcaccgcctgctggaggaagacacccctcgatacatgagagccagcgaccctgccagcccccacatcggccgatcaaatgaagaggaggaaacttctgattcttctctagaaaagcaaactcgatccaaatactgcacagaaacctccggtgtccacggtgactcaccctatggttcgggtaccatggacacccacagtctggagtccaaagccgaaagaattgcaaggtacaaagcagaaagaaggcgacagctggcagagaagtatgggctgactctggatcccgaggccgactccgagtatttatcccgctataccaagtccaggaaggagcctgatgctgtcgagaagcggggaggaaaaagtgacaaacaggaagagtcaagcagagatgctagttctctgtaccccgggaccgagacgatggggctcaggacctgtgccggtgaatccaaggactatgccctccatgtgggtgacggctcttccgacccggaggtgctgctgaacatagaaaaccaaagacgaggtcaagagctgagtgccacccggcaggcccatgacctgtccccagcagccgagagttcctcgaccttctctttctctgggcgagactcctccttcactgaagtgccacggtcccccaagcacgcccacagctcctccctgcagcaggcagcctcccggagcccctcctttggtgacccacagctatcccctgaggcccgacccagtacagggaaacccaaacatgagtggtttctccagaaagattccgaaggggacacaccttcacttatcaactggccttccagagttaaagttagagaaaaattggtgaaagaggaaagtgctcgaaacagccctgaactcgcctcagagtccgtaactcagaggagacaccagccagcgccagtccattacgtgtcatttcagtctgagcactcagcctttgatagggtccccagcaaggcagcaggctctacacgacagccaatccgtggctatgtccaacccgcagataccggtcacaccgccaagctagtgacgccagaaaccccagaaaatgcatctgagtgtagctgggtagcatcagccacccagaatgtccccaaacctcccagcttgacggttctagaaggtgacggaagggatagcccagttctccatgtctgcgagtcaaaagcagaagaagaagaaggggaaggagaaggagaagaaaaagaagaagatgtgtgcttcactgaagctctcgagcaaagcaagaaaaccctactggctttggagggtgatgggctagtgagaagcccagaagatccctctagaaatgaggactttggtaagcctgctgtgagcacagtcaccttagagcatcagaaggaactggaaaacgtggcacaaccccctcaagctccgcaccagcccactgagaggacaggcaggagcgagatggttctctacattcaaagtgagcctgtgtcccaagacgccaaaccaactggtcacaacagggaagcctcgaaaaagcgcaaggtccgtacccgctctctgtcagatttcacaggcccccctcagctccaggccttgaagtataaggacccagcttccaggagagagctggagctgcccagctccaagaccgaagggccttatggggagatcagcatgctggacacaaaagtctctgtcgcccagctccgaagtgcgttcctggcatctgccaacgcctgcaggagacctgaactcaaatcacgggtggagaggtcggctgaaggacctggcttgcccaccggtgtggaacgggagagagggtcccggaaaccaagacgctatttttctcctggtgaaagtagaaaaacttccgagagatttagaacccaacctataacttcagcagaacgaaaggaatcggataggtgcacttcacattcagaaacgccaactgtcgatgatgaagaaaaggtggatgaacgagccaagctgagcgtcgccgccaagaggttgcttttcagggagatggaaaaatcttttgatgaacaaaatgttccaaagcgacgctcaagaaacacagctgtggagcagaggctacgccgtctgcaggacaggtccctcacccagcccatcaccactgaagaggtggtcatcgcagccactgaacctatccccgcttcgtgttctgggggcacccaccctgtaatggcgagacttcctagccccactgtagctaggagcgctgtgcagcctgccagattgcaggcctctgctcaccaaaaggccttagccaaggaccagacaaatgagggcaaagagcttgctgagcaaggagaacctgattcctccactctaagcttggccgaaaagttggccttgtttaacaaattgtcccagccagtctcaaaagcgatttctacccggaacagaatagacacgagacagaggagaatgaacgctcgctatcaaactcagccagtcacactgggagaggtggagcaggtgcagagtggaaagctcattcctttctcacctgccgtgaacacatcagtgtctaccgtagcatccacggttgctccaatgtatgccggagatcttcgcacaaagccacctcttgaccacaatgcaagtgccactgactataagttttcttcttcaatagaaaattcggactctccagttagaagcattctgaaatcgcaagcttggcagcctttggtagagggtagcgagaacaagggaatgttgagagaatatggagagacagaaagcaagagagctttgacaggtcgagacagtgggatggagaagtatgggtcctttgaggaagcagaagcatcctaccccatcctgaaccgagccagggaaggagacagccataaggaatctaaatatgctgttcccagaagaggaagcctggaacgggcgaaccctcccatcacccacctcggggatgaaccgaaggaattttccatggctaaaatgaatgcacaaggaaacttggacttgagggacaggctgccctttgaagagaaggtggaggtggagaatgttatgaaaaggaagttttcactaagagcggcagagttcggggagcccacttccgagcagacggggacagctgctgggaaaactattgctcaaaccacagcccccgtgtcctggaagccccaggattcttcggaacagccacaggagaagctctgcaagaatccatgtgcgatgtttgctgctggagagatcaaaacgccgacaggggagggccttcttgactcacccagcaaaaccatgtctattaaagaaagattggcactgttgaagaaaagcggggaggaagattggagaaacagactcagcaggaggcaggagggcggcaaggcgccggccagcagcctgcacacccaggaagcagggcggtccctcatcaagaagcgggtcacagaaagtcgagagagccaaatgacgattgaggagaggaagcagctcatcactgtgagagaggaggcctggaagacgagaggcagaggagcggccaacgactcgacccagttcactgtggctggcaggatggtgaagaaaggtttggcgtcacctactgccataaccccagtagcctcacccatttgcggtaaaacaagaggcaccacacccgtttccaaacccctggaagatatcgaagccagaccagatatgcagttagaatcggacctgaagttggacaggctggaaacctttctaagaaggctgaataacaaagttggcgggatgcacgaaacggtgctcactgtcaccggcaaatctgtgaaggaggtgatgaagccagatgatgatgaaacctttgccaaattttaccgcagcgtggattataatatgccaagaagtcctgtggagatggatgaggacttcgatgtcattttcgatccttatgcacccaaattgacgtcttccgtggccgagcacaagcgggcagttaggcccaagcgccgggttcaggcctccaaaaaccccctgaaaatgctggcggcaagagaagatctccttcaggaatacactgagcagagattaaacgttgccttcatggagtcaaagcggatgaaagtagaaaagatgtcttccaactccaacttctcagaagtcaccctggcgggtttagccagtaaagaaaacttcagcaacgtcagcctgcggagcgtcaacctgacggaacagaactctaacaacagcgccgtgccctacaagaggctgatgctgttgcagattaaaggaagaagacatgtgcagaccaggctggtggaacctcgagcttcggcgctcaacagtggggactgcttcctcctgctctctccccactgctgcttcctgtgggtaggagagtttgcaaacgtcatagaaaaggcgaaggcctcagaacttgcaactttaattcagacaaagagggaacttggttgtagagctacttatatccaaaccattgaagaaggaattaatacacacactcatgcagccaaagacttctggaagcttctgggtggccaaaccagttaccaatctgctggagacccaaaagaagatgaactctatgaagcagccataatagaaactaactgcatttaccgtctcatggatgacaaacttgttcctgatgacgactactgggggaaaattccgaagtgctcccttctgcaacccaaagaggtactggtgtttgattttggtagtgaagtttacgtatggcatgggaaagaagtcacattagcacaacgaaaaatagcatttcagctggcaaagcacttatggaatggaacctttgactatgagaactgtgacatcaatcccctggatcctggagaatgcaatccgcttatccccagaaaaggacaggggcggcccgactgggcgatatttgggagacttactgaacacaatgagacgattttgttcaaagagaagtttctggattggacggaactgaagagatcgaatgagaagaaccccggggaacttgcccagcacaaggaagaccccaggactgatgtcaaggcatacgatgtgacacggatggtgtccatgccccagacgacagcaggcaccatcctggacggagtgaacgtcggccgtggctatggcctggtggaaggacacgacaggaggcagtttgagatcaccagcgtttccgtggatgtctggcacatcctggaattcgactatagcaggctccccaaacaaagcatcgggcagttccatgagggggatgcctatgtggtcaagtggaagttcatggtgagcacggcagtgggaagtcgccagaagggagagcactcggtgagggcagccggcaaagagaagtgcgtctacttcttctggcaaggccggcactccaccgtgagtgagaagggcacgtcggcgctgatgacggtggagctggacgaggaaaggggggcccaggtccaggttctccagggaaaggagcccccctgtttcctgcagtgtttccagggggggatggtggtgcactcggggaggcgggaagaggaagaagaaaatgtgcaaagtgagtggcggctgtactgcgtgcgtggagaggtgcccgtggaagggaatttgctggaagtggcctgtcactgtagcagcctgaggtccagaacttccatggtggtgcttaacgtcaacaaggccctcatctacctgtggcacggatgcaaagcccaggcccacacgaaggaggtcggaaggaccgctgcgaacaagatcaaggaacaatgtcccctggaagcaggactgcatagtagcagcaaagtcacaatacacgagtgtgatgaaggctccgagccactcggattctgggatgccttaggaaggagagacaggaaagcctacgattgcatgcttcaagatcctggaagttttaacttcgcgccccgcctgttcatcctcagcagctcctctggggattttgcagccacagagtttgtgtaccctgcccgagccccctctgtggtcagttccatgcccttcctgcaggaagatctgtacagcgcgccccagccagcacttttccttgttgacaatcaccacgaggtgtacctctggcaaggctggtggcccatcgagaacaagatcactggttccgcccgcatccgctgggcctccgaccggaagagtgcgatggagactgtgctccagtactgcaaaggaaaaaatctcaagaaaccagcccccaagtcttaccttatccacgctggtctggagcccctgacattcaccaatatgtttcccagctgggagcacagagaggacatcgctgagatcacagagatggacacggaagtttccaatcagatcaccctcgtggaagacgtcttagccaagctctgtaaaaccatttacccgctggccgacctcctggccaggccactcccggagggggtcgatcctctgaagcttgagatctatctcaccgacgaagacttcgagtttgcactagacatgacgagggatgaatacaacgccctgcccgcctggaagcaggtgaacctgaagaaagcaaaaggcctgttctgagtggggagacgccagaggagcctcacggtcacgtccaacaacaccactgcaccagggaaatggatatatatttttggactggtgtttttcacaaagtatttttcaatcagagttttcagaacctgacattgttaaagatactgcttgtcccggagttgtgtattttgtaaatgttcaagggaactgtttggaaacttctttccaccattcaggaggttatcagaattaataaaagtatctgttatgtgcacttaagccgcagctgctatagatagcactgccttcttgttccagctaggcaatgccttttttttttttttttgaagcagttctctttataaagtgttattttgatagtttgtggattctaaaatatatatatatttatataaacaccatataagtcaaatatgtatttaacaaagcaatatgtattcattcactttcaagatttgttttggtgtcaaaataacatgaaaaggtagatggagttgcttctgttgaattagctctgccaccaatatgtatcttcatacacgtttggaaatgtttcctgcagcattaggtatgacttgttctgagtactgcttccggtgctaaaatgaacaaagaatttgtacttaatggcatggactctggagaatctatgcgaatcaacctttctaccttaatatctccccaaaaatgtatagtgccttgtttttatgtacagtttatatacagaaaagtttgctctgcatttttgatgatggtttggaacattatctacaattttactctcaaatagtcaaaataaaaacatctcaatttctaataccggttgtaaacagtacacatgtcattttgtgatataggactcccaaataaaagtatcagaataaacacaacaattaactggt

SEQ ID NO: 2914 - DNA, 731 bp, Homo sapiens
cagacgctgctgccgaggaaaaccttgtattattaggcatggtcaaccccaccgtgttcttcgacattgccatcgacggcgagcccttgggccgcgtctccttttagctgtttgcagacaagttcccaaagacagcagaaaattttcgtgctctgagcactggagagaaaggatttagttataagggttcctgctttcacagaattattccagggtttatgtatcagggtcgtgacttcacacgccataatggcactggtggcaagtccatctatggggagaaatttgaagatgagaacttcatcctaaagcatacaggtcctggcatcttgtccatggcaaatgctggacccaacacaaatggttcccagtttttcatctgcactgccaagactgagtggttggatggcaagcatgtggtctttggcaaagtgaaagaaggcatgaatattatggaggccatggagcgctttgggtccaggaatggcaagaccagcaagaagatcaccattgctgactgtggacaactcgaataagtttgacttgtgttttatcttaaccaccagaccattccttctgtagttcaggagaacacccttccaccccatttgctcgcagtatcctagaatctttgtgctcttgctgcagttccatgttttccttgttccctcccatgcctagctggattgcagagttaagtttatgattatgaaataaaaaccaaataacaa

SEQ ID NO: 2915 - protein, 165 aa, Homo sapiens
GQPHRVLRHCHRRRALGPRLLLALFADKFPKTAENFRALSTGEKGFSYKGSCFHRIIPGFMYQGRDFTRHNGTGGKSIYGEKFEDENFILKHTGPGILSMANAGPNTNGSQFFICTAKTEWLDGKHVVFGKVKEGMNIMEAMERFGSRNGKTSKKITIADCGQLE

SEQ ID NO: 2916 - DNA, 4071 bp, Homo sapiens
atgaaagtgaccgtgtgcttcggacggacccgggtggtcgtgccgtgcggggacggccacatgaaagttttcagcctcatccagcaggcggtgacccgctaccggaaggccatcgccaaggatccaaactactggatacaggtgcatcgcttggaacatggagatggaggaatactagaccttgatgacattctttgtgatgtagcagacgataaagacagactggtagcagtgtttgatgagcaggatccacatcacggaggtgatggcaccagtgccagttccacgggtacccagagcccagagatatttggtagtgagcttggcaccaacaatgtctcagcctttcagccttaccaagcaacaagtgaaattgaggtcacaccttcagtccttcgagcaaatatgcctcttcatgttcgacgcagtagtgacccagctctaattggcctctccacttctgtcagtgatagtaatttttcctctgaagagccttcaaggaaaaatcccacacgctggtcaacaacagctggcttcctcaagcagaacactgctgggagtcctaaaacctgcgacaggaagaaagatgaaaactacagaagcctcccgcgggatactagtaactggtctaaccaatttcagagagacaatgctcgctcgtctctgagtgccagtcacccaatggtgggcaagtggctggagaaacaagaacaggatgaggatgggacagaagaggataacagtcgtgttgaacctgttggacatgctgacacgggtttggagcatatacccaacttttctctggatgatatggtaaagctcgtagaagtccccaacgatggagggcctctgggaatccatgtagtgcctttcagtgctcgaggcggcagaaccctggggttattagtaaaacgattggagaaaggtggtaaagctgaacatgaaaatctttttcgtgagaatgattgcattgtcaggattaatgatggcgaccttcgaaatagaagatttgaacaagcacaacatatgtttcgccaagccatgcgtacacccatcatttggttccatgtggttcctgcagcaaataaagagcagtatgaacaactatcccaaagtgagaagaacaattactattcaagccgttttagccctgacagccagtatattgacaacaggagtgtgaacagtgcagggcttcacacggtgcagagagcaccccgactgaaccacccgcctgagcagatagactctcactcaagactacctcatagcgcacacccctcgggaaaaccaccatccgctccagcctcggcacctcagaatgtatttagtacgactgtaagcagtggttataacaccaaaaaaataggcaagaggcttaatatccagcttaagaaaggtacagaaggtttgggattcagcatcacttccagagatgtaacaataggtggctcagctccaatctatgtgaaaaacattctcccccggggggcggccattcaggatggccgacttaaggcaggagacagacttatagaggtaaatggagtagatttagtgggcaaatcccaagaggaagttgtttcgctgttgagaagcaccaagatggaaggaactgtgagccttctggtctttcgccaggaagacgccttccacccaagggaactgaatgcagagccaagccagatgcagattccaaaagaaacgaaagcagaagatgaggatattgttcttacacctgatggcaccagggaatttctgacatttgaagtcccacttaatgattcaggatctgcaggccttggtgtcagtgtcaaaggtaaccggtcaaaagagaaccacgcagatttgggaatctttgtcaagtccattattaatggaggagcagcatctaaagatggaaggcttcgggtgaatgatcaactgatagcagtaaatggagaatccctgttgggcaagacaaaccaagatgccatggaaaccctaagaaggtctatgtctactgaaggcaataaacgaggaatgatccagcttattgttgcaaggagaataagcaagtgcaatgagctgaagtcacctgggagcccccctggacctgagctgcccattgaaacagcgttggatgatagagaacgaagaatttcccattccctctacagtgggattgaggggcttgatgaatcccccagcagaaatgctgccctcagtaggataatgggtgagtcaggtaaataccagctgtcccctacagtgaatatgccccaagatgacactgtcattatagaagatgacaggttgccagtgcttcctccacatctctctgaccagtcctcttccagctcccatgatgatgtggggtttgtgacggcagatgctggtacttgggccaaggctgcaatcagtgattcagccgactgctctttgagtccagatgttgatccagttcttgcttttcaacgagaaggatttggacgtcagagtatgtcagaaaaacgcacaaagcaattttcagatgccagtcaattggatttcgttaaaacacgaaaatcaaaaagcatggatttaggtatagctgacgagactaaactcaatacagtggatgaccagaaagcaggttctcccagcagagatgtgggtccttccctgggtctgaagaagtcaagctcgttggagagtctgcagaccgcagttgccgaggtgactttgaatggggatattcctttccatcgtccacggccgcggataatcagaggcaggggatgcaatgagagcttcagagctgccatcgacaaatcttatgataaacccgcggtagatgatgatgatgaaggcatggagaccttggaagaagacacagaagaaagttcaagatcagggagagagtctgtatccacagccagtgatcagccttcccactctctggagagacaaatgaatggaaaccaagagaaaggtgataagactgatagaaaaaaggataaaactggaaaagaaaagaagaaagatagagataaggagaaggataaaatgaaagccaagaagggaatgctgaagggcttgggagacatgttcaggtttggcaaacatcgaaaagatgacaagattgagaaaacgggtaaaataaaaatacaggaatcctttacatcagaagaggagaggatacgaatgaagcaggagcaggagaggattcaagccaaaactcgagaatttagggaacgacaagctcgagagcgtgactatgctgaaattcaagattttcatcggacatttggctgtgatgatgagttaatgtatgggggagtttcttcttatgaaggttccatggctctcaacgctagacctcagagcccacgagaagggcatatgatggatgctttgtatgcccaagtcaagaagccgcggaattccaaaccctcacctgtagacagtaacagatcaactcctagcaatcatgatcggatacagcgtctgaggcaagaatttcagcaagcaaagcaagatgaagatgtagaagatcgtcggcggacctatagttttgagcaaccctggccgaacgcacggccggcgacgcagagcgggcgacactcggtgtccgtggaggtgcagatgcagcggcagcggcaggaggagcgcgagagctcccagcaggcccagcgccagtacagctctctgcctcggcaaagcaggaaaaatgccagctcggtctcccaggactcttgggagcagaactactcccctggggaaggcttccagagtgccaaagagaaccccaggtactccagctaccaaggctccaggaacggctacctgggaggacatggcttcaacgccagggtcatgctggaaactcaggagctccttcgccaggaacagaggcggaaggagcagcagatgaagaagcagcctccttccgaggggcccagcaactatgactcgtataagaaagtccaggaccccagttacgcccctcccaaggggcccttccggcaagatgtgcccccctccccttctcaggttgcgaggctgaacagacttcagactcctgagaaagggaggcccttctattcctga

SEQ ID NO: 2917 - protein, 1356 aa, Homo sapiens
MKVTVCFGRTRVVVPCGDGHMKVFSLIQQAVTRYRKAIAKDPNYWIQVHRLEHGDGGILDLDDILCDVADDKDRLVAVFDEQDPHHGGDGTSASSTGTQSPEIFGSELGTNNVSAFQPYQATSEIEVTPSVLRANMPLHVRRSSDPALIGLSTSVSDSNFSSEEPSRKNPTRWSTTAGFLKQNTAGSPKTCDRKKDENYRSLPRDTSNWSNQFQRDNARSSLSASHPMVGKWLEKQEQDEDGTEEDNSRVEPVGHADTGLEHIPNFSLDDMVKLVEVPNDGGPLGIHVVPFSARGGRTLGLLVKRLEKGGKAEHENLFRENDCIVRINDGDLRNRRFEQAQHMFRQAMRTPIIWFHVVPAANKEQYEQLSQSEKNNYYSSRFSPDSQYIDNRSVNSAGLHTVQRAPRLNHPPEQIDSHSRLPHSAHPSGKPPSAPASAPQNVFSTTVSSGYNTKKIGKRLNIQLKKGTEGLGFSITSRDVTIGGSAPIYVKNILPRGAAIQDGRLKAGDRLIEVNGVDLVGKSQEEVVSLLRSTKMEGTVSLLVFRQEDAFHPRELNAEPSQMQIPKETKAEDEDIVLTPDGTREFLTFEVPLNDSGSAGLGVSVKGNRSKENHADLGIFVKSIINGGAASKDGRLRVNDQLIAVNGESLLGKTNQDAMETLRRSMSTEGNKRGMIQLIVARRISKCNELKSPGSPPGPELPIETALDDRERRISHSLYSGIEGLDESPSRNAALSRIMGESGKYQLSPTVNMPQDDTVIIEDDRLPVLPPHLSDQSSSSSHDDVGFVTADAGTWAKAAISDSADCSLSPDVDPVLAFQREGFGRQSMSEKRTKQFSDASQLDFVKTRKSKSMDLGIADETKLNTVDDQKAGSPSRDVGPSLGLKKSSSLESLQTAVAEVTLNGDIPFHRPRPRIIRGRGCNESFRAAIDKSYDKPAVDDDDEGMETLEEDTEESSRSGRESVSTASDQPSHSLERQMNGNQEKGDKTDRKKDKTGKEKKKDRDKEKDKMKAKKGMLKGLGDMFRFGKHRKDDKIEKTGKIKIQESFTSEEERIRMKQEQERIQAKTREFRERQARERDYAEIQDFHRTFGCDDELMYGGVSSYEGSMALNARPQSPREGHMMDALYAQVKKPRNSKPSPVDSNRSTPSNHDRIQRLRQEFQQAKQDEDVEDRRRTYSFEQPWPNARPATQSGRHSVSVEVQMQRQRQEERESSQQAQRQYSSLPRQSRKNASSVSQDSWEQNYSPGEGFQSAKENPRYSSYQGSRNGYLGGHGFNARVMLETQELLRQEQRRKEQQMKKQPPSEGPSNYDSYKKVQDPSYAPPKGPFRQDVPPSPSQVARLNRLQTPEKGRPFYS

SEQ ID NO: 2918 - DNA, 1441 bp, Homo sapiens
ctattctgaaacgtgttttgcccgaggcctggggtgcaggcaccgctgtacctggggtgaggggagctgccgggcctttcagcccggtggtctccacgatgctcccatctgtgtggacgacaatcagtgtcgctttttcggtgttcaggctgtccccgatctgaagggccgtcctaccagactagaaggaaaaaccgctccctgggccgtcctccagcagggctctctggctgttctcaccaagaagggacgctcacctaggcaccccatatcttttccaaagatacctctcaaagacttgaaaacagagccaagaacaagaacagacaatgccgaagtctgtgtggtgctgaggaaaatgcttgccatcatttgtcaaagggaaggaagaaaggtgctccacaaacaagaaacaccctcccttccacctgagccgctcccacaaggtcaccgtcttcatgcagagtttccaacagaccgagttggccgccacagacaaggccttgtgcaggaccgccctccagacctccttacagatggcaactggagaccagggcctcaaaaccacatttccacactggctgaagctgctgcaactgctgcctgcttccaaaatcagccttcaggcggcacagaccccgccacaggaagccagagtctccatgcccacacaccactgctggaacttgaaccctaccttggccaagtcatccggcaaactctggcctgcaggctctgttcaccccacggcccagctgctttgccgccgagtccgagtcctccatccggactccgccgagccttcccgaaggcgccgtccgggaccgcccgaagcgccggcccagcgaccagaaggcccaaagcgtgtcatccaagcccggctttcgctgggcacaaccctagtgggagcggtggggacagagccagctcggccagacggtcggcaggccccaggagggccatgagtcagagggcaaggctgaaactggatttggagatcttagcccaggctgacggaggctcccaagaagggggagcaggccacactcagcaccctgcgtgggaggggcacctgaccgccagatgggcggtccacctgagccgcacccttggaggggcctttggtgccctctgccggccgctccatgtgctgccttggaagcaagtactccacttactttggcttttgaaaactatttccctagccatcgacgagtacaagccccaggatgctaccaccaacccgtccctgatcctggccgcagcacagatgcccgcttaccaggagctggtggaggaggcgattgcctatggccggaagctgggcggcactttgtcctacagcttgacacagcaagaatattcctgttcccttaacgcatttccaggaccgtggccaatggcagacaccaggtcattaaacccagtcacagctgaatga

SEQ ID NO: 2919 - DNA, 3700 bp, Homo sapiens
agccgccgccacccgccgcgcccgacacccgggaggccccgccagcccgcgggagaggcccagcgggagtcgcggaacagcaggcccgagcccaccgcgccgggccccggacgccgcgcggaaaagatgaatttacaaccaattttctggattggactgatcagttcagtttgctgtgtgtttgctcaaacagatgaaaatagatgtttaaaagcaaatgccaaatcatgtggagaatgtatacaagcagggccaaattgtgggtggtgcacaaattcaacatttttacaggaaggaatgcctacttctgcacgatgtgatgatttagaagccttaaaaaagaagggttgccctccagatgacatagaaaatcccagaggctccaaagatataaagaaaaataaaaatgtaaccaaccgtagcaaaggaacagcagagaagctcaagccagaggatattactcagatccaaccacagcagttggttttgcgattaagatcaggggagccacagacatttacattaaaattcaagagagctgaagactatcccattgacctctactaccttatggacctgtcttactcaatgaaagacgatttggagaatgtaaaaagtcttggaacagatctgatgaatgaaatgaggaggattacttcggacttcagaattggatttggctcatttgtggaaaagactgtgatgccttacattagcacaacaccagctaagctcaggaacccttgcacaagtgaacagaactgcaccagcccatttagctacaaaaatgtgctcagtcttactaataaaggagaagtatttaatgaacttgttggaaaacagcgcatatctggaaatttggattctccagaaggtggtttcgatgccatcatgcaagttgcagtttgtggatcactgattggctggaggaatgttacacggctgctggtgttttccacagatgccgggtttcactttgctggagatgggaaacttggtggcattgttttaccaaatgatggacaatgtcacctggaaaataatatgtacacaatgagccattattatgattatccttctattgctcaccttgtccagaaactgagtgaaaataatattcagacaatttttgcagttactgaagaatttcagcctgtttacaaggagctgaaaaacttgatccctaagtcagcagtaggaacattatctgcaaattctagcaatgtaattcagttgatcattgatgcatacaattccctttcctcagaagtcattttggaaaacggcaaattgtcagaaggagtaacaataagttacaaatcttactgcaagaacggggtgaatggaacaggggaaaatggaagaaaatgttccaatatttccattggagatgaggttcaatttgaaattagcataacttcaaataagtgtccaaaaaaggattctgacagctttaaaattaggcctctgggctttacggaggaagtagaggttattcttcagtacatctgtgaatgtgaatgccaaagcgaaggcatccctgaaagtcccaagtgtcatgaaggaaatgggacatttgagtgtggcgcgtgcaggtgcaatgaagggcgtgttggtagacattgtgaatgcagcacagatgaagttaacagtgaagacatggatgcttactgcaggaaagaaaacagttcagaaatctgcagtaacaatggagagtgcgtctgcggacagtgtgtttgtaggaagagggataatacaaatgaaatttattctggcaaattctgcgagtgtgataatttcaactgtgatagatccaatggcttaatttgtggaggaaatggtgtttgcaagtgtcgtgtgtgtgagtgcaaccccaactacactggcagtgcatgtgactgttctttggatactagtacttgtgaagccagcaacggacagatctgcaatggccggggcatctgcgagtgtggtgtctgtaagtgtacagatccgaagtttcaagggcaaacgtgtgagatgtgtcagacctgccttggtgtctgtgctgagcataaagaatgtgttcagtgcagagccttcaataaaggagaaaagaaagacacatgcacacaggaatgttcctattttaacattaccaaggtagaaagtcgggacaaattaccccagccggtccaacctgatcctgtgtcccattgtaaggagaaggatgttgacgactgttggttctattttacgtattcagtgaatgggaacaacgaggtcatggttcatgttgtggagaatccagagtgtcccactggtccagacatcattccaattgtagctggtgtggttgctggaattgttcttattggccttgcattactgctgatatggaagcttttaatgataattcatgacagaagggagtttgctaaatttgaaaaggagaaaatgaatgccaaatgggacacgggtgaaaatcctatttataagagtgccgtaacaactgtggtcaatccgaagtatgagggaaaatgagtactgcccgtgcaaatcccacaacactgaatgcaaagtagcaatttccatagtcacagttaggtagctttagggcaatattgccatggttttactcatgtgcaggttttgaaaatgtacaatatgtataatttttaaaatgttttattattttgaaaataatgttgtaattcatgccagggactgacaaaagacttgagacaggatggttattcttgtcagctaaggtcacattgtgcctttttgaccttttcttcctggactattgaaatcaagcttattggattaagtgatatttctatagcgattgaaagggcaatagttaaagtaatgagcatgatgagagtttctgttaatcatgtattaaaactgatttttagctttacaaatatgtcagtttgcagttatgcagaatccaaagtaaatgtcctgctagctagttaaggattgttttaaatctgttattttgctatttgcctgttagacatgactgatgacatatctgaaagacaagtatgttgagagttgctggtgtaaaatacgtttgaaatagttgatctacaaaggccatgggaaaaattcagagagttaggaaggaaaaaccaatagctttaaaacctgtgtgccattttaagagttacttaatgtttggtaacttttatgccttcactttacaaattcaagccttagataaaagaaccgagcaattttctgctaaaaagtccttgatttagcactatttacatacaggccatactttacaaagtatttgctgaatggggaccttttgagttgaatttattttattatttttattttgtttaatgtctggtgctttctatcacctcttctaatcttttaatgtatttgtttgcaattttggggtaagacttttttatgagtactttttctttgaagttttagcggtcaatttgcctttttaatgaacatgtgaagttatactgtggctatgcaacagctctcacctacgcgagtcttactttgagttagtgccataacagaccactgtatgtttacttctcaccatttgagttgcccatcttgtttcacactagtcacattcttgttttaagtgcctttagttttaacagttcactttttacagtgctatttactgaagttatttattaaatatgcctaaaatacttaaatcgga

SEQ ID NO: 2920 - protein, 798 aa, Homo sapiens
MNLQPIFWIGLISSVCCVFAQTDENRCLKANAKSCGECIQAGPNCGWCTNSTFLQEGMPTSARCDDLEALKKKGCPPDDIENPRGSKDIKKNKNVTNRSKGTAEKLKPEDITQIQPQQLVLRLRSGEPQTFTLKFKRAEDYPIDLYYLMDLSYSMKDDLENVKSLGTDLMNEMRRITSDFRIGFGSFVEKTVMPYISTTPAKLRNPCTSEQNCTSPFSYKNVLSLTNKGEVFNELVGKQRISGNLDSPEGGFDAIMQVAVCGSLIGWRNVTRLLVFSTDAGFHFAGDGKLGGIVLPNDGQCHLENNMYTMSHYYDYPSIAHLVQKLSENNIQTIFAVTEEFQPVYKELKNLIPKSAVGTLSANSSNVIQLIIDAYNSLSSEVILENGKLSEGVTISYKSYCKNGVNGTGENGRKCSNISIGDEVQFEISITSNKCPKKDSDSFKIRPLGFTEEVEVILQYICECECQSEGIPESPKCHEGNGTFECGACRCNEGRVGRHCECSTDEVNSEDMDAYCRKENSSEICSNNGECVCGQCVCRKRDNTNEIYSGKFCECDNFNCDRSNGLICGGNGVCKCRVCECNPNYTGSACDCSLDTSTCEASNGQICNGRGICECGVCKCTDPKFQGQTCEMCQTCLGVCAEHKECVQCRAFNKGEKKDTCTQECSYFNITKVESRDKLPQPVQPDPVSHCKEKDVDDCWFYFTYSVNGNNEVMVHVVENPECPTGPDIIPIVAGVVAGIVLIGLALLLIWKLLMIIHDRREFAKFEKEKMNAKWDTGENPIYKSAVTTVVNPKYEGK

SEQ ID NO: 2921 - DNA, 5616 bp, Homo sapiens
gcttcagtcccgcgaccgaagcagggcgcgcagcagcgctgagtgccccggaacgtgcgtcgcgcccccagtgtccgtcgcgtccgccgcgccccgggcggggatggggcggccagactgagcgccgcacccgccatccagacccgccggccctagccgcagtccctccagccgtggccccagcgcgcacgggcgatggcgaaggcgacgtccggtgccgcggggctgcgtctgctgttgctgctgctgctgccgctgctaggcaaagtggcattgggcctctacttctcgagggatgcttactgggagaagctgtatgtggaccaggcagccggcacgcccttgctgtacgtccatgccctgcgggacgcccctgaggaggtgcccagcttccgcctgggccagcatctctacggcacgtaccgcacacggctgcatgagaacaactggatctgcatccaggaggacaccggcctcctctaccttaaccggagcctggaccatagctcctgggagaagctcagtgtccgcaaccgcggctttcccctgctcaccgtctacctcaaggtcttcctgtcacccacatcccttcgtgagggcgagtgccagtggccaggctgtgcccgcgtatacttctccttcttcaacacctcctttccagcctgcagctccctcaagccccgggagctctgcttcccagagacaaggccctccttccgcattcgggagaaccgacccccaggcaccttccaccagttccgcctgctgcctgtgcagttcttgtgccccaacatcagcgtggcctacaggctcctggagggtgagggtctgcccttccgctgcgccccggacagcctggaggtgagcacgcgctgggccctggaccgcgagcagcgggagaagtacgagctggtggccgtgtgcaccgtgcacgccggcgcgcgcgaggaggtggtgatggtgcccttcccggtgaccgtgtacgacgaggacgactcggcgcccaccttccccgcgggcgtcgacaccgccagcgccgtggtggagttcaagcggaaggaggacaccgtggtggccacgctgcgtgtcttcgatgcagacgtggtacctgcatcaggggagctggtgaggcggtacacaagcacgctgctccccggggacacctgggcccagcagaccttccgggtggaacactggcccaacgagacctcggtccaggccaacggcagcttcgtgcgggcgaccgtacatgactataggctggttctcaaccggaacctctccatctcggagaaccgcaccatgcagctggcggtgctggtcaatgactcagacttccagggcccaggagcgggcgtcctcttgctccacttcaacgtgtcggtgctgccggtcagcctgcacctgcccagtacctactccctctccgtgagcaggagggctcgccgatttgcccagatcgggaaagtctgtgtggaaaactgccaggcattcagtggcatcaacgtccagtacaagctgcattcctctggtgccaactgcagcacgctaggggtggtcacctcagccgaggacacctcggggatcctgtttgtgaatgacaccaaggccctgcggcggcccaagtgtgccgaacttcactacatggtggtggccaccgaccagcagacctctaggcaggcccaggcccagctgcttgtaacagtggaggggtcatatgtggccgaggaggcgggctgccccctgtcctgtgcagtcagcaagagacggctggagtgtgaggagtgtggcggcctgggctccccaacaggcaggtgtgagtggaggcaaggagatggcaaagggatcaccaggaacttctccacctgctctcccagcaccaagacctgccccgacggccactgcgatgttgtggagacccaagacatcaacatttgccctcaggactgcctccggggcagcattgttgggggacacgagcctggggagccccgggggattaaagctggctatggcacctgcaactgcttccctgaggaggagaagtgcttctgcgagcccgaagacatccaggatccactgtgcgacgagctgtgccgcacggtgatcgcagccgctgtcctcttctccttcatcgtctcggtgctgctgtctgccttctgcatccactgctaccacaagtttgcccacaagccacccatctcctcagctgagatgaccttccggaggcccgcccaggccttcccggtcagctactcctcttccggtgcccgccggccctcgctggactccatggagaaccaggtctccgtggatgccttcaagatcctggaggatccaaagtgggaattccctcggaagaacttggttcttggaaaaactctaggagaaggcgaatttggaaaagtggtcaaggcaacggccttccatctgaaaggcagagcagggtacaccacggtggccgtgaagatgctgaaagagaacgcctccccgagtgagctgcgagacctgctgtcagagttcaacgtcctgaagcaggtcaaccacccacatgtcatcaaattgtatggggcctgcagccaggatggcccgctcctcctcatcgtggagtacgccaaatacggctccctgcggggcttcctccgcgagagccgcaaagtggggcctggctacctgggcagtggaggcagccgcaactccagctccctggaccacccggatgagcgggccctcaccatgggcgacctcatctcatttgcctggcagatctcacaggggatgcagtatctggccgagatgaagctcgttcatcgggacttggcagccagaaacatcctggtagctgaggggcggaagatgaagatttcggatttcggcttgtcccgagatgtttatgaagaggattcctacgtgaagaggagccagggtcggattccagttaaatggatggcaattgaatccctttttgatcatatctacaccacgcaaagtgatgtatggtcttttggtgtcctgctgtgggagatcgtgaccctagggggaaacccctatcctgggattcctcctgagcggctcttcaaccttctgaagaccggccaccggatggagaggccagacaactgcagcgaggagatgtaccgcctgatgctgcaatgctggaagcaggagccggacaaaaggccggtgtttgcggacatcagcaaagacctggagaagatgatggttaagaggagagactacttggaccttgcggcgtccactccatctgactccctgatttatgacgacggcctctcagaggaggagacaccgctggtggactgtaataatgcccccctccctcgagccctcccttccacatggattgaaaacaaactctatggcatgtcagacccgaactggcctggagagagtcctgtaccactcacgagagctgatggcactaacactgggtttccaagatatccaaatgatagtgtatatgctaactggatgctttcaccctcagcggcaaaattaatggacacgtttgatagttaacatttctttgtgaaaggtaatggactcacaaggggaagaaacatgctgagaatggaaagtctaccggccctttctttgtgaacgtcacattggccgagccgtgttcagttcccaggtggcagactcgtttttggtagtttgttttaacttccaaggtggttttacttctgatagccggtgattttccctcctagcagacatgccacaccgggtaagagctctgagtcttagtggttaagcattcctttctcttcagtgcccagcagcacccagtgttggtctgtgtccatcagtgaccaccaacattctgtgttcacatgtgtgggtccaacacttactacctggtgtatgaaattggacctgaactgttggatttttctagttgccgccaaacaaggcaaaaaaatttaaacatgaagcacacacacaaaaaaggcagtaggaaaaatgctggccctgatgacctgtccttattcagaatgagagactgcggggggggcctgggggtagtgtcaatgcccctccagggctggaggggaagaggggccccgaggatgggcctgggctcagcattcgagatcttgagaatgattttttttaaatcatgcaacctttccttaggaagacatttggttttcatcatgattaagatgattcctagatttagcacaatggagagattccatgccatctttactatgtggatggtggtatcagggaagagggctcacaagacacatttgtcccccgggcccaccacatcatcctcacgtgttcggtactgagcagccactacccctgatgagaacagtatgaagaaagggggctgttggagtcccagaattgctgacagcagaggctttgctgctgtgaatcccacctgccaccagcctgcagcacaccccacagccaagtagaggcgaaagcagtggctcatcctacctgttaggagcaggtagggcttgtactcactttaatttgaatcttatcaacttactcataaagggacaggctagctagctgtgttagaagtagcaatgacaatgaccaaggactgctacacctctgattacaattctgatgtgaaaaagatggtgtttggctcttatagagcctgtgtgaaaggcccatggatcagctcttcctgtgtttgtaatttaatgctgctacaagatgtttctgtttcttagattctgaccatgactcataagcttcttgtcattcttcattgcttgtttgtggtcacagatgcacaacactcctccagtcttgtgggggcagcttttgggaagtctcagcagctcttctggctgtgttgtcagcactgtaacttcgcagaaaagagtcggattaccaaaacactgcctgctcttcagacttaaagcactgataggacttaaaatagtctcattcaaatactgtattttatataggcatttcacaaaaacagcaaaattgtggcattttgtgaggccaaggcttggatgcgtgtgtaatagagccttgtggtgtgtgcgcacacacccagagggagagtttgaaaaatgcttattggacacgtaacctggctctaatttgggctgtttttcagatacactgtgataagttcttttacaaatatctatagacatggtaaacttttggttttcagatatgcttaatgatagtcttactaaatgcagaaataagaataaactttctcaaattattaaaaatgcctacacagtaagtgtgaattgctgcaacaggtttgttctcaggagggtaagaactccaggtctaaacagctgacccagtgatggggaatttatccttgaccaatttatccttgaccaataacctaattgtctattcctgagttataaaagtccccatccttattagctctactggaattttcatacacgtaaatgcagaagttactaagtattaagtattactgagtattaagtagtaatctgtcagttattaaaatttgtaaaatctatttatgaaaggtcattaaaccagatcatgttcctttttttgtaatcaaggtgactaagaaaatcagttgtgtaaataaaatcatgtatc

SEQ ID NO: 2922 - DNA, 635 bp, Homo sapiens
gatgagagcattcacctccagctgcagaagaaacacagggacaagatgctgcgcatgcagaaaggtgacccacaagtctatgaagaacttttcagttacttctgccccaagttcctgtcgcctgtagtgcccaactatgataatgtgcaccccaactaccacaaagagcccttcctgcagcagctgaaggtgttttctgatgaagtacagcagcaggcccagctttcaaccatccacagcttcctcaagctctacaccaccatgcctgtggccaagctggctggcttcctggacctcacagagcaggagttcaggatccagcttcttgtcttcaaacacaagatgaagaacctggtgtggaccagcggcatctcaatcctggatggtgaatttcagtcagcctcagaggttgacttctacattgataagcttaatcgaaccctgaagaagatgggacagagaccctgatgacattcacacacattatttaggaacctgttttgatatattacaggcaggaagtgtttttgctaccgtgaaacctttacctagatcagccatcagcctgtctactcagttaacaagttaaggaccgacgtgtttcaagtggatatcagtaaaggatctttggagcc

SEQ ID NO: 2923 - DNA, 966 bp, Homo sapiens
atgaaggaagactgtctgccgagttctcacgtgcccatcagtgacagcaagtccattcagaagtcggagctcttaggcctgctgaaaacctacaactgctaccatgagggcaagagcttccagctgagacaccgtgaggaagaagggactctgatcatcgaggggctcctcaacattgcctgggggctgaggcggcccatccggctgcagatgcaggatgaccgggagcaggtgcacctcccctccacctcatggatgcccagacggcctagctgccctctaaaggagccatcgccccagaacgggaacatcacagccaaggggccaagcattcagccagtgcacaaggctgagagttccacagacagctcggggcccctggaggaggcagaggaggccccccagctgatgcggaccaagagcgacgccagttgcatgagccagaggaggcccaagtgccgcgcccccggtgaggcccagcgcatccggcgacaccggttctctatcaacggccacttctacaatcataagacctccgtgtttactccagcctatggatccgtgaccaatgtgagggtcaacagcaccatgacaaccctgcaggtgctcaccctgctgctgaacaaatttagggtggaagatggccccagtgagttcgcactctacatcgttcacgagtctggggagcggacaaaattaaaagactgcgagtacccgctgatttccagaatcctgcatgggccatgtgagaagatcgccaggatcttcctgatggaagctgacttgggcgtggaagtcccccatgaagtcgctcagtacattaagtttgaaatgccggtgctggacagttttgttgaaaaattaaaagaagaggaagaaagagaaataatcaaactgaccatgaagttccaagccctgcgtctgacgatgctgcagcgcctggagcagctggtggaggccaagtaa

SEQ ID NO: 2924 - protein, 321 aa, Homo sapiens
MKEDCLPSSHVPISDSKSIQKSELLGLLKTYNCYHEGKSFQLRHREEEGTLIIEGLLNIAWGLRRPIRLQMQDDREQVHLPSTSWMPRRPSCPLKEPSPQNGNITAKGPSIQPVHKAESSTDSSGPLEEAEEAPQLMRTKSDASCMSQRRPKCRAPGEAQRIRRHRFSINGHFYNHKTSVFTPAYGSVTNVRVNSTMTTLQVLTLLLNKFRVEDGPSEFALYIVHESGERTKLKDCEYPLISRILHGPCEKIARIFLMEADLGVEVPHEVAQYIKFEMPVLDSFVEKLKEEEEREIIKLTMKFQALRLTMLQRLEQLVEAK

SEQ ID NO: 2925 - DNA, 2120 bp, Homo sapiens
cacactgctcagggaagagcctgctacggtggactgtgagactcagtgcactgtcctcctcccagcgaccccacgctggaccccctgccggaccctccacccttcggcccccaagcttcccaggggcttcctttggactggactgtccctgctcatccattctcctgccacccccagacctcctcagctccaggttgccacctcctctcgccagagtgatgaggtcccggcttctgctctccgtggcccatctgcccacaattcgggagaccacggaggagatgctgcttgggggtcctggacaggagcccccaccctctcctagcctggatgactacgtgaggtctatatctcgactggcacagcccacctctgtgctggacaaggccacggcccagggccaacccaggccaccccacaggccagcccaggcctgccggaagggccgccctgctgtgtccctgcgagacatcaccgcacgtttcagtggccagcagcccacactgcccatggctgatactgtggaccccctggactggctttttggggagtcccaggaaaagcagccaagccagagggacctgccaaggaggactggcccctctgctggcctctggggtccacatagacagatggacagcagcaagcccatgggggcccccagagggaggctctgtgaagccaggatgcctgggcattccctggcaagaccaccgcaggatgggcagcagagctctgacctaagaagctggacttttgggcagtctgcccaagccatggcctcccgccaccgcccccgccccagcagtgtcctcagaacactctactcgcacctcccggtgatccatgaactctgacccctccccagtaaaggcttctgtagagagcatgctgggtctgcatctcctctcgtctcctccatggtggtcactgcccctggcaggtctctgaaagggaaatgcttttctgcagaggcccctgcttgggcagttcacagtgagaccgaccccctctgaatatgataacagcctgtttcacatgaggagatgttaccaatcccgttcgctctgacccttgctggctgatcaccttgagcaacttacttaacatctgtgttcctcagtttctcatgggtaatatagggataattactggcacctgcctcccaggccattctgacgtgtaaccgcatataggagcccactggctgagtagctaccatcatcgctggtggggaaactggtggtaggggtgtgagggtagtgggggtgtcagccccccaggtgtttcagaacaaggcctcgggcactcccaagtctgcctcttggctcccaccctcaaagcccatgttctgtgaggcccaagagaacacatggagtcttagcaaatgcactaatgtattccgggggactgtcacctggcaccactggggcactctgctggctacaactcatacgtcctgtggtggcattgggagagttcccccatgatgagggccaagatagaatctgtaccactcagtgctaccatccccacccctacaccacttccacacaggggcctcatggcatggtcagggtcccagctgtgggtgagagcagggcactgtccagctgtccactggggaagtcaagatgtcctaaggcccaggtcagggcatctggagtctgaaggaccctagttcctagaggcatctggcagcaagaaggtgaggcatcagggaacgggaatcaggctgggactgatcagaggtgaagggacagagagaggagaggaggaagattgagctgggggcaacagccaagctcacctgggcaggtctctgccacctccttgctctgtgagctgtcagtctaggttattctctttttttgtggctatttttaattgctttggatttgttaaatgttttctgtcttctgttaagtgtgttttctctggagatagaatgtaaaccatattaaaaggaaaaagtttcagacaagcaattacccagtttccttatctataaaatggggacatcagcaatgttcttcacaccctgcaagggctgggaatctgcgcatgtgaacttggagctgcatttatgagcactgtagacaaatgtttgtatctgtcac

SEQ ID NO: 2926 - DNA, 2591 bp, Homo sapiens
gtcgtggaagcaggactgcgccgcgtcttcctcaaggtggggttcggggggccaccgaatcgctgtcacgccggcaggttgagaacaaaaacatgcacctggagtttccccggagccctctgcgtggttgagcttcggtggaatttcggggctcttggctgccagccgcgcttgcctggtagcaacagaaaccagtcctgctcgcctccgtggacatttcattaccatccagaagtgtctcccactgaaggcatccgtggttgtttttaagccacaaaaaagccacacccaagatcacctgacacccaccctgacaagtgtccatgatgctgggccctgagggaggtgaaggctttgtggtcaagctccgtggcctgccctggtcctgctctgttgaggacgtgcagaacttcctctctgactgcacgattcatgatggggccgcaggtgtccatttcatctacactagagagggcaggcagagtggtgaggcttttgttgaacttggatcagaagatgatgtaaaaatggccctgaaaaaagacagggaaagcatgggacaccggtacattgaggtgttcaagtcccacagaaccgagatggattgggtgttgaagcacagtggtcccaacagtgccgacagcgccaacgatggcttcgtgcggcttcgaggactcccatttggatgcacaaaggaagaaattgttcagttcttctcagggttggaaattgtgccaaacgggatcacattgcctgtggaccccgaaggcaagattacaggggaagcgttcgtgcagtttgcctcgcaggagttagctgagaaggctctagggaaacacaaggagaggatagggcacaggtacattgaggtgtttaagagcagccaggaggaagttaggtcatactcagatccccctctgaagttcatgtccgtgcagcggccagggccctatgaccggcccgggactgccaggaggtacattggcatcgtgaagcaggcaggcctggaaaggatgaggcctggtgcctacagcacaggctacgggggctacgaggagtacagtggcctcagtgatggctacggcttcaccaccgacctgttcgggagagacctcagctactgtctctccggaatgtatgaccacagatacggcgacagtgagttcacagtgcagagcaccacaggccactgtgtccacatgaggggcctgccgtacaaagcgaccgagaacgacatttacaacttcttctctcctctcaaccctgtgagagtccatattgagattggcccagatggaagagtgacgggtgaagcagatgttgagtttgctactcatgaagaagctgtggcagctatgtccaaagacagggccaatatgcagcacagatatatagaactcttcttgaattcaacaacaggggccagcaatggggcgtatagcagccaggtgatgcaaggcatgggggtgtctgctgcccaggccacttacagtggcctggagagccagtcagtgagtggctgttacggggccggctacagtgggcagaacagcatgggtggctatgactagttttgttaggaacatttgagttacttcaatcattttcacaggcagccaacaagcaattaagagcagttataatagaggaagctgggggacccattttgcaccatgagtttgtgaaaaatctggattaaaaaattacctcttcagtgttttctcatgcaaaattttcttctagcatgtgataatgagtaaactaaaactattttcagcttttctcaattaacattttggtagtatacttcagagtgatgttatctaagtttaagtagtttaagtatgttaaatgtggatcttttacaccacatcacagtgaacacactggggagacgtgcttttttggaaaactcaaaggtgctagctccctgattcaaagaaatatttctcatgtttgttcattctagtttatattttcatttaaaatcctttaggttaagtttaagctttttaaaagttagttttgagaattgagacacaatactaatactgtaggaattggtgaggccttgacttaaaactttctttgtactgtgatttccttttgggtgtattttgctaagtgaaacttgttaaattttttgttaactaaatttttttcttaaaataaagactttttcacaatgactggcacagattactcagcaaaagatagcaaaacgggtggttgaagataattcattttaatcgtaatgtattttagtgtgaatttaaaaatttcatacatcaaatctatgatctcccttatattcttatgatgaggctaaataaaagtctaataaaaatgttaaatatgtgaatggtggaaatggtgactagcagcacacattctgggaagcatcaaatagacacacggccccagccacctgcaacttatgtgcactgttgtaaaccattcagaattttcctgctaggcccttgatgctggagtcacatctgttgatagctggagaactttagtttcaagtactacattgtgaaagcaattattttgtttctagtttttataaaatgctgatttaaactttt

SEQ ID NO: 2927 - DNA, 400 bp, Homo sapiens
cgtgtgcaccctagcgtcagcctcgagtttgaccagcagcaggggtcggtgtgtccctctgaatctgagatctatgaggcaggagctgaggacaggatggcaggagcgcccatggctgctgctgtacagcctgctgaggtgactgttgaagttggtgaggacctccacatgcaccacgttcgtgaccgggagatgcctgaagctttggagtttaacctttctgccaatccagaggcaagcacaatattccagaggaactctcaaacagatgctttggagtttaacccttctgccaatccagaggcaaacacaatattccagaggaactctcaaacagatggtgagacgacattgttttttccgccaagagaaagaataaaatctcttgtttgatcaggtt

SEQ ID NO: 2928 - protein, 137 aa, Homo sapiens
MGNILTCRVHPSVSLEFDQQQGSVCPSESEIYEAGAEDRMAGAPMAAAVQPAEVTVEVGEDLHMHHVRDREMPEALEFNLSANPEASTIFQRNSQTDALEFNPSANPEANTIFQRNSQTDGETTLFFPPRERIKSLV

SEQ ID NO: 2929 - DNA, 781 bp, Homo sapiens
gaatttccgtttccggcggtgtccaagcggacctaaggagtcgcagttgtgaacaggttagagttacttgttattggtaaatagccactatggagactaaggaccagaagaaacacagaaagaaaaacagtggacccaaagctgcaaagaaaaagaagtggcatctgcaggatctccagctaggagacgaagaaaatgcccagaagagaaatgccaatgcttttgcagttcagtctgctgtgtggatgtctcgatcctttcacaggactctggatttgaagacacaaaagcatcatattccagtggttgatggaactccactagagccgccaccaatagcggtagtggtgacggggcctccaaagttggaaagagcactttgatataatgcctcattcggaacttcacctggcagaagttcaccgagatcagaggccctgtgacgatcgtgtcaggtaaaaagcgcagactcaccattattgaatgtgggtgtgacattaacatgatgattgatctggctaaagtagcagatctggtaagtgagcaggggcagcctggggtgctgatggagacttacagcattgtgataggttatttaccccgtgatgaagggaagagagttttgtgattattaaaaggatcatggtcattatcagggatatagtagatgtgattgaattgatgatgataataataatagtaataaatgttgtcatattaataatacaaatggaatgtgcacaatgaaatgtgttccaaaatctaaaagcagatcacagga

SEQ ID NO: 2930 - DNA, 2166 bp, Homo sapiens
atggcattcaagaccctttgtggtgaggtagatgagcgtcaggaaggatcatcctcctcatccgcagatccaacagccggtaacattccggcctacagcacgtccctacctcagctgaaccgctgggaccaacacgccgtaccgcagccgcgcacgcccagcacgccactcccggcctgcccggggcctgacgtcatcacatcgcgacgctcgctgatcccgcccggattacctgggctctggacgagaagcgcctcgtcccttagccacaccccccggggagccaggggcatctggcatccggcaagtggcagctccctcatcatcctgtctgatccaaattcaacccacattcagccagctctgaaggtacggctggctgtatgtggcaaacagagcagccacgaccacaaactgccgggacttcacaattggctttgtagttttgctgagggactgtccaggtttggagaagtcctagcctatcacagggatacctggtttgaactgctgacctcatatctttaccgtgacctcggtgggccagagatgcaggcagctggccatgaagacgcacttccccgaggaagaggagacaggctcacccgctgcagggcagtcccacagcctgcctgcaatggagccttcaagaatacaaacacttctagaacaagttatcaggaacatggcatggttgggccttctctgaacgggccccagggtaagccatctgataagggagaaacatctgccaacaccctcagccacagcgtcactgggctcaagggccacaaaggaggcaaaagcctgcagggaaaagaaatccaagacagtaaaacagaagaacgagtatttgcctgtaactatctgtgtcagaggttctctggtgaggtgccagagcacccaggaccagcacacaagacacagtcatacactgagatggaggacaaggttccctacagggacgaagatgagacaacagagcgacaaacacaggaaagtgacttcaggcatccattaggagggacaagcagtagccctacttatgggtggcaagatgtcaccttcattctggcaaagctgattgaagaatgcagcattagatgtgcagctatacagacctgccagatcaacaagccctcgggcaatgcctatgatgctgcttcactggctgcacagtcacagggacctccccagaactgctgtgcaaagggtcaacttcccagacccccagaggccaatgtcttcatggtgctcctggtggagccaccagctgctcccagcccggctgccacacagagagtacggcagcctcacactgctggttatcccagaggcttggagcagggttggagggatgaagcaggcctggactgcgtccttaggaagacagaagccatcgtcgatatggccgttcccttgtcccctccctcctgctcctacagcaagcataccagggctgactcctctccacaccgcagcatggagaattcagagggcaataatagcaactgcttgcttgtaaagtgcttggagctcagaggagaaaaggtgtcagacaagtgtaaaatgttactactggcacaggccagaggatggaatggaaaatcccagcagaaattgggaactcagaggaagccatttgtcagctcctctgaacaaatggatacaggaaaaggggccttcctctggcagccaggcacagcccagaccactgctgcccacagccctcaccaagagaggaacatagaggggaagcggggaggggaggaggaggctagtaatatagctcatagtcagactcagaccaatctgctggtcttggacaaggagttttgtgagcagagaactcatgctgctctccttgggcacatggaaattggaatcctaaggagtcctcacaaagccccagagaaatctggccattctccaggggaccgagcatcccccatggtgctgcatgggagtccccagaagctaccaccccccaaccagctttggacacccctgctcttattttctgcatccccagaactacctgccctagtgctgagctcatggaagttcctcaggaagcatcttcacatggatgttgaagagaaaaaaatctccaggtcccacggggtgctgtgggagtccaaaatcaggactccaaaaggcctgtga

SEQ ID NO: 2931 - DNA, 2760 bp, Homo sapiens
agtgctcttggccgggaggaggctgtgctgcaccagcacctcttgctccacatctccagagagcccagggccctgtggccgagtgtgtccagcccagtgtcatggggagcttccatatctcatggctccttgctgggccaagccctccagaaccccaaacccccaaagactgatgaatgccagagtggccaccttgcttatctgtggccccggccctggtgatcaccatggcagctgggaagggagccccgttgagcccatcggctgaaaacagatggcgacttagcgaacctgagctgggccggggctgcaagccagtgctgctcgagaagacgaaccgcctgggccctgaggctgctgtgggcagggcgggccgggatgtgggcagtgcggagctggcactgttggtagccccaggcaagccccgacctggcaagccgctgcccccgaagacacgtggagagcagaggcagagcgccttcacggagctgccgaggatgaaggaccggcaggtggatgctcaggcccaggagagggagcacgatgaccccacaggccaacctggtgccccacagctgacccagaacatccccagaggcccagctggcagcaaagtcttctctgtgtggcccagcggagcacgaagtgagcaaagaagcgcctttagcaaaccaaccaagcgaccagcagagaggcctgagctaacctcagtcttccctgcaggggaatctgcagatgccctgggggagctgtctggactcctcaacactacagacctcgcttgttggggtcgactttcaactcccaagcttttggttggtgatttgtggaacttgcaagcattgccacagaatgctccactctgtagcacttttctgggtgcccctacactgtggctggagcatacccaggcccaggtgcccccaccctcatcatcctccaccacttcgtgggccctcctgccacccaccctcacctccctgggcttgtccacccagaactggtgtgcaaagtgcaacctgtcctttcgcctaacgtccgacctggtctttcacatgcgatcccaccacaaaaaggagcatgcggggcctgacccacattctcagaagcggagagaagaggcccttgcctgccctgtgtgccaggagcacttccgggagcgccaccacctctcccggcacatgacttctcacagctagcaggtgaccgcagaatgacctgctgggtgcagcagccagcctttggcagaggggggctccctgggcctgcgttgagggggctgtcatggtcctttgcagagctgctgcttttggcattcatagataaacagctcaggcataatttgaaaaagccacacctgcatgatgtgttttgaaggaaatgaagtcctgaaataaagtgatgggctttgcaaatccagggtagaggccctaacaggcacagagagcaggggcaactcctggcacacatcatgggctttggaggcacacaagcctggattcgaatctgggctctttcacatactagctgtgaccctggacaaagagctttaacctgctgagtccccattttctcatctgtgaaatggagatgataacactgtgtcttaggttggcattcaggtcacatgaaaggtgtgtggaaagtggccagcattctgcctgcagaccctgagcactgagtcaacaaggtttgtgatgatgtctgtactagttagctattgttattaacaagatctccatggcagacaagctaaagcatctgcctaagtcgtgagtctgtgggttggctcaggttaagctgagcaggtggggatctcagccagcctcccagactgcacctcttctattgctctcctctgtccaccgttccaggcagcagcactcccacctggctgctctgatgtcctcgctccctccattcctgcctctcaccatgcacgcatccattgtccacacacacacaaccagataatcttctgaaagtgtaactcagatgatgcctccaaccctgtggctgcccttcacacttacaggcctaaccccagcaggacctgccagctgcttcatgaacaagtccctgcctcatgttaattgcaagcactcatttcactctccctgtgtgccaggcaatagcataagcactggaagaatacagatgttatagtgagtcctacaatagccctggaaggcaagagctgtttcctttccatttctacaatgagtcaattgcagatgatgctataacacttccagtgtttctgacacttccctgaagctatacctgctaccttcatgggccgagcttgcccttatgaggcccacaggtggcagtgggcagaggggaccccgctataccacctcgctgctgttccactgtctgctcccgtgttctgaccacagctctggtgccgtttctcaagcctgggcttcattcaacattttctatctagctcttcatggtgctgctcctgctatggttccacagggcttcttctcgcaggtcagctccttagagaggtctcccagattccccgtaaagcagccctgcagcctctgcctctctcagccgcatcaccctgttgcttccttcacagcatgtctcaccatctgcaaccatctttctgtttgtcgtcttgttgatttgctgcctccacactgtcagctccttgggaacagagattggtttgtttactgtgcatccctggtgcccagaacagggcatggcatattgttggtgcataataaatattgtggaaat

SEQ ID NO: 2932 - protein, 340 aa, Homo sapiens
MPEWPPCLSVAPALVITMAAGKGAPLSPSAENRWRLSEPELGRGCKPVLLEKTNRLGPEAAVGRAGRDVGSAELALLVAPGKPRPGKPLPPKTRGEQRQSAFTELPRMKDRQVDAQAQEREHDDPTGQPGAPQLTQNIPRGPAGSKVFSVWPSGARSEQRSAFSKPTKRPAERPELTSVFPAGESADALGELSGLLNTTDLACWGRLSTPKLLVGDLWNLQALPQNAPLCSTFLGAPTLWLEHTQAQVPPPSSSSTTSWALLPPTLTSLGLSTQNWCAKCNLSFRLTSDLVFHMRSHHKKEHAGPDPHSQKRREEALACPVCQEHFRERHHLSRHMTSHS

SEQ ID NO: 2933 - DNA, 1940 bp, Homo sapiens
ggcctgctcactcctcagctgcaggagccagacgtgtggagtcccagcagaggccaacctgtgtctcttcatctccctgggaaaggtgcccccgaggtgaaagagatggcctggtggaaatcctggattgaacaggagggtgtcacagtgaagagcagctcccacttcaacccagaccctgatgcagagaccctctacaaagccatgaaggggatcgggaccaacgagcaggctatcatcgatgtgctcaccaagagaagcaacacgcagcggcagcagatcgccaagtccttcaaggctcagttcggcaaggacctcactgagaccttgaagtctgagctcagtggcaagtttgagaggctcattgtggcccttatgtacccgccatacagatacgaagccaaggagctgcatgacgccatgaagggcttaggaaccaaggagggtgtcatcattgagatcctggcctctcggaccaagaaccagctgcgggagataatgaaggcgtatgaggaagactatgggtccagcctggaggaggacatccaagcagacacaagtggctacctggagaggatcctggtgtgcctcctgcagggcagcagggatgatgtgagcagctttgtggacccaggactggccctccaagacgcacaggatctgtatgcggcaggcgagaagattcgtgggactgatgagatgaaattcatcaccatcctgtgcacgcgcagtgccactcacctgctgagagtgtttgaagagtatgagaaaattgccaacaagagcattgaggacagcatcaagagtgagacccatggctcactggaggaggccatgctcactgtggtgaaatgcacccaaaacctccacagctactttgcagagagactctactatgccatgaagggagcagggacgcgtgatgggaccctgataagaaacatcgtttcaaggagcgagattgacttaaatcttatcaaatgtcacttcaagaagatgtacggcaagaccctcagcagcatgatcatggaagacaccagcggtgactacaagaacgccctgctgagcctggtgggcagcgacccctgaggcacagaagaacaagagcaaagaccatgaagccagagtctccaggactcctcactcaacctcggccatggacgcaggttgggtgtgaggggggtcccagcctttcggtcttctatttccctatttccagtgctttccagccgggtttctgacccagagggtggaaccggcctggactcctcttcccaacttcctccaggtcatttcccagtgtgagcacaatgccaaccttagtgtttctccagccagacagatgcctcagcatgaagggcttggggacttgtggatcattccttcctccctgcaggagcttcccaagctggtcacagagtctcctgggcacaggttatacagaccccagccccattcccatctactgaaacagggtctccacaagaggggccagggaatatgggtttttaacaagcgtcttacaaaacacttctctatcatgcagccggagagctggctgggagcccttttgttttagaacacacatccttcagcagctgagaaacgaacacgaatccatcccaaccgagatgccattaacattcatctaaaaatgttaggctctaaatggacgaaaaattctctcgccatcttaataacaaaataaactacaaattcctgacccaaggacactgtgttataagaggcgtgggctcccctggtggctgaccaggtcagctgccctggccttgcacccctctgcatgcagcacagaagggtgtgaccatgccctcagcaccactcttgtccccactgaacggcaactgagactgggtacctggagattctgaagtgcctttgctgtggttttcaaaataataaagatttgtattcaactc

SEQ ID NO: 2934 - DNA, 1174 bp, Homo sapiens
gaatttccgtttccggcggtgtccaagcggacctaaggagtcgcagttgtgaacaggttagagttacttgttattggtaaatagccactatggagactaaggaccagaagaaacacagaaagaaaaacggtggacccaaagctgcaaagaaaaagaagtggcatctgcaggatctccagctaggagactaagaaaatgcccagaagagaaatgccaatgcttttgcagttcagtctgctgtgtggatgtctcgatcctttcacaggactctggatttgaagacacaaaagcatcatattccagtggttgatggaactccactagagccgccaccaataccggtagtggtgacggggcctccaaagttggaaagagcactttgatataatgcctcattcggaacttcacctggcagaagttcaccgagatcagaggccctgtgacgatcgtgtcaggtaaaaagcgcagactcaccattattgaatgtgggtgtgacattaacatgatgattgatctggctaaagtagcagatctggtactgatgcttatagatgccagctttgggtttgaaatggaaatgtttgagtttctaaacatctgtcaagcacatggctttcctaaaattctgggagttctcacccacctcgactccttcaagcataacaagcaactgaagaagacaaagaagcgattaaaacacaggttctggacagaagtttaccaggttgccaaactgttctacctttctggaatggtgcatggagaatatcaaaaccaagaaatccacaatctgggccattttattacagttatgaagtttaggcctctcatggcaaacttttcacccttatatcctggcagacaggatggaagatttgacaaacccggaggatatccaaacaaacatcaaatgtgaccggcaggtgtcactttatggttatttaagaggagcacacttcaaagataaaagccaaattcacatgccaggacaaggtggggctcacccatgagctggtccagagtctcatctccacctactccaccattgatgccaagatggcttcaagtcgagtgacgctgctttccaattccaaaccacttgggtcagaggctatagataatcaagggtaagtctgctttttttctatttttaataaaaagatatattacagaa

SEQ ID NO: 2935 - DNA, 2125 bp, Homo sapiens
cgggggcgagggggcggcaggcaggtgtagcgctgccctgggcgggcttgcacccccacacccaagtgagcggcctgctcactcctcagctgcaggagccagacgtgtggagtcccagcagaggccaacctgtgtctcttcatctccgtgagaaaggtgcccccgaagtgaaagagatggcctggtggaaagcctggattgaacaggagggtgtcacagtgaagagcagctcccacttcaacccagaccctgatgcagagaccctctacaaagccatgaaggggatcggtgtcgggtcccaactgctcagccaccaagcagctgccttcgccttcccctcctccgccctcaccagtgtgtcaccctgggggcagcagggtcacttgtgctgtaaccctgcagggaccaacgagcaggctatcatcgatgtgctcaccaagagaagcaacacgcagcggcagcagatcgccaagtccttcaaggctcagttcggcaaggacctcactgagaccttgaagtctgagctcagtggcaagtttgagaggctcattgtggcccttatgtacccgccatacagatacgaagccaaggagctgcatgacgccatgaagggcttaggaaccaaggagggtgtcatcattgagatcctggcctctcggaccaagaaccagctgcgggagataatgaaggcgtatgaggaagactatgggtccagcctggaggaggacatccaagcagacacaagtggctacctggagaggatcctggtgtgcctcctgcagggcagcagggatgatgtgagcagctttgtggacccggcactggccctccaagacgcacaggatctgtatgcggcaggcgagaatattcgtgggactgatgagatgaaattcatcaccatcctgtgcacgcgcagtgccactcacctgctgagagtgtttgaagagtatgagaaaattgccaacaagagcattgaggacagcatcaagagtgagacccatggctcactggaggaggccatgctcactgtggtgaaatgcacccaaaacctccacagctactttgcagagagactctactatgccatgaagggagcagggacgcgtgatgggaccctgataagaaacatcgtttcaaggagcgagattgacttaaatcttatcaaatgtcacttcaagaagatgtacggcaagaccctcagcagcatgatcatggaagacaccagcggtgactacaagaacgccctgctgagcctggtgggcagcgacccctgaggcacagaagaacaagagcaaagaccatgaagccagagtctccaggactcctcactcaacctcggccatggacgcaggttgggtgtgaggggggtcccagcctttcggtcttctatttccctatttccagtgctttccagccgggtttctgacccagagggtggaaccggcctggactcctcttcccaacttcctccaggtcatttcccagtgtgagcacaatgccaaccttagtgtttctccagccagacagatgcctcagcatgaagggcttggggacttgtggatcattccttcctccctgcaggagcttcccaagctggtcacagagtctcctgggcacaggttatacagaccccagccccattcccatctactgaaacagggtctccacaagaggggccagggaatatgggtttttaacaagcgtcttacaaaacacttctctatcatgcagccggagagctggctgggagcccttttgttttagaacacacatccttcagcagctgagaaacgaacacgaatccatcccaaccgagatgccattaacattcatctaaaaatgttaggctctaaatggacgaaaaattctctcgccatcttaataacaaaataaactacaaattcctgacccaaggacactgtgttataagaggcgtgggctcccctggtggctgaccaggtcagctgccctggccttgcacccctctgcatgcagcacagaagggtgtgaccatgccctcagcaccactcttgtccccactgaacggcaactgagactgggtacctggagattctgaagtgcctttgctgtggttttcaaaataataaagatttgtattcaactc

SEQ ID NO: 2936 - protein, 431 aa, Homo sapiens
MPKARQSPGARGRQAGVALPWAGLHPHTQVSGLLTPQLQEPDVWSPSRGQPVSLHLPGKGAPEVKEMAWWKSWIEQEGVTVKSSSHFNPDPDAETLYQAMKGIGVGSQLLSHQAAAFAFPSSALTSVSPWGQQGHLCCNPAGTNEQAIIDVLTKRSNTQRQQIAKSFKAQFGKDLTETLKSELSGKFERLIVALMYPPYRYEAKELHDAMKGLGTKEGVIIEILASRTKNQLREIMKAYEEDYGSSLEEDIQADTSGYLERILVCLLQGSRDDVSSFVDPGLALQDAQDLYAAGEKIRGTDEMKFITILCTRSATHLLRVFEEYEKIANKSIEDSIKSETHGSLEEAMLTVVKCTQNLHSYFAERLYYAMKGAGTRDGTLIRNIVSRSEIDLNLIKCHFKKMYGKTLSSMIMEDTSGDYKNALLSLVGSDP

SEQ ID NO: 2937 - DNA, 1533 bp, Homo sapiens
gctaatactgaaattgtcaggtcggtgtaactgtgacagtccggaagcaatggaggcttcagtgagcaggaccagctgcctttctcaccaccacagcttgatctctctcacaacttcctctccacctccactgacctctgggttggttttctcctgcacgatctttccacgtgtcaggggcctggaggcaccctacaagagctgactttacatttccttcctagaggtaatcccagaacaaaagagagcagttttatttatttttttcaagagaattaaattgtttattgattacacatgataatggatgatacacaagcttcattcccatctataatttaatctggtaccattattcaattagatatgttacataggatgtgccaacaattacttttataaccaataattccatgattttgcttgggtaatcccttttaatggtgactgaaatcatgactgaccgagtcagtggctagaaaaggggctttgcctttgtaacttttgatgaccatgactccgtcgataagattgtcattcagaaataccatactgtgaatgaccacaactgtgaagttaggaaagccctgtcaaagcaagagatggctagtgcttcatccagccaaagaggtcgaagtggttctggaaactttggtggtggtcgtggaggtggtttcagtgggaatgacaactttggtattggaggaaacttcagtggtcttggtggctttggtggcagtcgtggtggtggtggatatggtggcagtggggatggctgtaatggatttggtaatgatggaagcaattttggaggtggtggaagctacaatgattttggcaattacaacaatgagtcttcaaattttggacccatgaagggaggaaattttggaggcagaagctctggcccctgtggcaatggaggcctatactttgcaaaaccatgaaaccaaggtggctattggcggttccagcagcagcagtagctatggcagtggcagattttaattaggaaacaaagcttagcaggagaggagagccagagaaatgacagggaatctacaggttacgacagatttgtgaactcagccaagcacagtggtggcagggcctagctgctacaaagaagacatgttttagacaaatactcatgtgtatgggcaaaaaactcgaggactgtatttgtgactaactgtataacaggttattttagtttctgttctgtgggaagtgtaaagcattccagctaagggttttaatataggttttttttttgcacccatgctgttgattgctaaatgtaatagtctgatcatgacgctgaataaatgtcttttgttttaatgtgctgtgtaaagttagtttactctgaagctatcttggtaaatttccccaacagtgtgaagttagaattccttcagggtgatgccaagttctatttggaatttatatacaacctgcttgggtggagaagccattgtcttcagaaacctttggtgtagttgaactgatagttactgttgtgacctgaag

SEQ ID NO: 2938 - protein, 114 aa, Homo sapiens
MASASSSQRGRSGSGNFGGGRGGGFSGNDNFGIGGNFSGLGGFGGSRGGGGYGGSGDGCNGFGNDGSNFGGGGSYNDFGNYNNESSNFGPMKGGNFGGRSSGPCGNGGLYFAKP

SEQ ID NO: 2939 - DNA, 2057 bp, Homo sapiens
gtctgggtggggcctgggagccacaggagatgcccaaagccaggcagagcccgggggcgaggggacggcaggcaggtgtggcgctgccctgggcgggcttgcacccccacacccaagtgagcggcctgctcactcctcagctgcaggagccagacgtgtggagtcccagcagaggccaacctgtgtctcttcatctccctgggaaaggtgcccccgaggtgaaagagatggcctggtggaaatcctggattgaacaggagggtgtcacagtgaagagcagctcccacttcaacccagaccctgatgcagagaccctctaccaagccatgaaggggatcgggaccaacgagcaggctatcatcgatgtgctcaccaagagaagcaacacgcagcggcagcagatcgccaagtccttcaaggctcagttcggcaaggacctcactgagaccttgaagtctgagctcagtggcaagtttgagaggctcattgtggcccttatgtacccgccatacagatacgaagccaaggagctgcatgacgccatgaagggcttaggaaccaaggagggtgtcatcattgagatcctggcctctcggaccaagaaccagctgcgggagataatgaaggcgtatgaggaagactatgggtccagcctggaggaggacatccaagcagacacaagtggctacctggagaggatcctggtgtgcctcctgcagggcagcagggatgatgtgagcagctttgtggacccaggactggccctccaagacgcacaggatctgtatgcggcaggcgagaagattcgtgggactgatgagatgaaattcatcaccatcctgtgcacgcgcagtgccactcacctgctgagagtgtttgaagagtatgagaaaattgccaacaagagcattgaggacagcatcaagagtgagacccatggctcactggaggaggccatgctcactgtggtgaaatgcacccaaaacctccacagctactttgcagagagactctactatgccatgaagggagcagggacgcgtgatgggaccctgataagaaacatcgtttcaaggagcgagattgacttaaatcttatcaaatgtcacttcaagaagatgtacggcaagaccctcagcagcatgatcatggaagacaccagcggcgactacaagaacgccctgctgagcctggtgggcagcgacccctgaggcacagaagaacaagagcaaagaccatgaagccagagtctccaggactcctcactcaacctcggccatggacgcaggttgggtgtgaggggggtcccagcctttcagtcttctatttccctatttccagtgctttccagccgggtttctgacccagagggtggaaccggcctggactcctcttcccaacttcctccaggtcatttcccagtgtgagcacaatgccaaccttagtgtttctccagccagacagatgcctcagcatgaagggcttggggacttgtggatcattccttcctccctgcaggagcttcccaagctggtcacagagtctcctgggcacaggttatacagaccccagccccattcccatctactgaaacagggtctccacaagaggggccagggaatatgggtttttaacaagcgtcttacaaaacacttctctatcatgcagccggagagctggctgggagcccttttgttttagaacacacatccttcagcagctgagaaacgaacacgaatccatcccaaccgagatgccattaacattcatctaaaaatgttaggctctaaatggacgaaaaattctctcgccatcttaataacaaaataaactacaaattcctgacccaaggacactgtgttataagaggcgtgggctcccctggtggctgaccaggtcagctgccctggccttgcacccctctgcatgcagcacagaagggtgtgaccatgccctcagcaccactcttgtccccactgaacggcaactgagactgggtacctggagattctgaagtgcctttgctgtggttttcaaaataataaagatttgtattc

SEQ ID NO: 2940 - protein, 327 aa, Homo sapiens
MAWWKSWIEQEGVTVKSSSHFNPDPDAETLYKAMKGIGTNEQAIIDVLTKRSNTQRQQIAKSFKAQFGKDLTETLKSELSGKFERLIVALMYPPYRYEAKELHDAMKGLGTKEGVIIEILASRTKNQLREIMKAYEEDYGSSLEEDIQADTSGYLERILVCLLQGSRDDVSSFVDPGLALQDAQDLYAAGEKIRGTDEMKFITILCTRSATHLLRVFEEYEKIANKSIEDSIKSETHGSLEEAMLTVVKCTQNLHSYFAERLYYAMKGAGTRDGTLIRNIVSRSEIDLNLIKCHFKKMYGKTLSSMIMEDTSGDYKNALLSLVGSDP

SEQ ID NO: 2941 - DNA, 1174 bp, Homo sapiens; identical to SEQ ID NO: 2934

SEQ ID NO: 2942 - DNA, 400 bp, Homo sapiens
cgtgtgcaccctagcgtcagcctcgagtttgaccagcaacaggggtcggtgtgtccctctgaatctgagatctatgaggcagtagctggggacaggatggcaggagcgcccatggctgctgctgtgcagcctgctgaggtgactgttgaagttggtgaggacctccacatgcaccacgttcgtgaccgggagatgcctgaagctttggagtttaacctttctgccaatccagaggcaagcacaatattccagaggaactctcaaacagatgctttggagtttaacccttctgccaatccagaggcaagcacaatattccagaggaactctcaaacagatggtgagacgacattgttttttccgccaagagaaagaataaaagctcttgtttgatcaggtt

SEQ ID NO: 2943 - protein, 98 aa, Homo sapiens
MAGAPMAAAVQPAEVTVEVGEDLHMHHVRDREMPEALEFNLSANPEASTIFQRNSQTDALEFNPSANPEASTIFQRNSQTDGETTLFFPPRERIKALV

SEQ ID NO: 2944 - DNA, 1099 bp, Homo sapiens
ggtaaatagccactatggagactaaggaccagaagaaacacagaaagaaaaacagtggacccaaagctgcaaagaaaaagaagtggcatctgcaggatctccagctaggagacgaagaaaatgcccagaagagaaatgccaatgcttttgcagttcagtctgctgtgtggatgtctcgatcctttcacaggactctggatttgaagacacaaaagcatcatattccagtggttgatggaactccactagagccgccaccaataccggtagtggtgacggggcctccaaagttggaaagagcactttgatataatgcctcattcggaacttcacctggcagaagttcaccgagatcagaggccctgtgacgatcgtgtcaggtaaaaagcgcagactcaccattattgaatgtgggtgtgacattaacatgatgattgatctggctgaagtagcagatctggtactgatgcttatagatgccagctttgggtttgaaatggaaatgtttgagtttctaaacatctgtcaagcacatggctttcctaaaattctgggagttctcacccacctcgactccttcaagcataacaagcaactgaagaagacaaagaagcgattaaaacacaggttctggacagaagtttaccaggttgccaaactgttctacctttctggaatggtgcatggagaatatcaaaaccaagaaatccacaatctgggccattttattacagttatgaagtttaggcctctcatggcaaacttttcacccttatatcctggcagacaggatggaagatttgacaaacccggaggatatccaaacaaacatcaaatgtgaccggcaggtgtcactttatggttatttaagaggagcacacttcaaagataaaagccaaattcacatgccaggacaaggtggggctcacccatgagctggtccagagtctcatctccacctactccaccattgatgccaagatggcttcaagtcgagtgacgctgctttccaattccaaaccacttgggtcagaggctatagataatcaagggtaagtctgctttttttctatttttaataaaaagatatattacagaa

SEQ ID NO: 2945 - DNA, 1871 bp, Homo sapiens
atggggcagccgagagagttctggcatctcaggtcccaggttccagttccaacctgccacctgctcaccgtgcagccttggtgcctgcttcctcaccccaccccagctggagggcgtgagcgcaggcacagtgcttcctccctgcttgcggctctgtgcctgaggaaggcggttctgcggccccatcctgctgtcctgcctggagttggagggtgtgtggtcctttcctctgggcggatgaaggctcccttgaggggcggcctggctctggggacagggccagctcccacgaagctgcagcttctccatgactggcagagcgagcctgggccgagtggctggcagcaaggcccttctccgcctctcttcccggcaggcacttccctcgtccagcacctgatgaccgtcctcatccgcaaacacagccagctcttcacggcaccggtcccggaagggcccacctccccgcgcgggggcctgcaatgcgcagtggggtggggctccgaggaggtcaccagggacagccaaggagagcccggcggccccggcctgcccgcgcacaggacctcttccctggacggggcggccgtggcggtgctctccagaacagcccccacggggccggggagccggtgcagccctgggaagaaggtgcagaccctgcccagttggaagtcctccttccggcagccgaggtccctatcgggaagcccgaaggggggcggctcatccctggaggtgcccatcatctcctccggcgggaactggcttatgaacgggctgtcctccctgcgcggacaccgccgggcctcgtcgggagaccggctcaaggactcgggctccgtgcagagactctccacctacgacaatgtgcccgcgccgggcctggtccccggcatacccagcgtggccagtatggcgtggtccggggcctcgtccagcgagtcgtcggtggggggctcactcagcagctgcacggcctgccgcgccagcgactcgtctgcccgcagttccctgcacaccgactgggccctggagccctccccgctccccagcagcagcgaggaccccaagtccctggacctggaccacagcatggacgaggcgggcgcgggtgccagcaacagcgagcccagcgagccggacagccccacccgggaacacgcgcgccgctccgaggccttacaggggctggtcactgagctcagggccgagctgtgccgccagcggactgagtacgagaggagtgtgaaaagaatcgaagaagggagtgctgacctgagaaaacgaatgtcccggttagaagaagaactggaccaggaaaagaaaaaatacatcatgctggaaataaagctgcggaactctgaacgggcgcgggaggatgcggagaggaggaaccagctgttgcagagggaaatggaggagtttttttcgaccctaggaagcttgactgttggggcaaaaggtgccagggccccaaagtaaaaggaatggcagagctcacttctgtaccacgtctgctggtctccagccttgtatggagttagaagcgtctgtatctctggagcagccaggcgctctggagccagctggagagagagagatcctgatacctctgtggggactgtggggacttttgggaccccacacactccaggtgggatcagatgctgctccaaccatgcagttcctggtgagggtcagaaggggacggtaccaagagcagcgcttagcccttacccaggaaatatccttcatggccacagaaatggagggcgcccaggatccaggcagccaccgggaacagtcagctttctttattaaatgtgctcacaaagcaaaaaaaaaaaaaaaaaaaaaaaaaaaaaaaa

SEQ ID NO: 2946 - protein, 494 aa, Homo sapiens
MGQPREFWHLRSQVPVPTCHLLTVQPWCLLPHPTPAGGRERRHSASSLLAALCLRKAVLRPHPAVLPGVGGCVVLSSGRMKAPLRGGLALGTGPAPTKLQLLHDWQSEPGPSGWQQGPSPPLFPAGTSLVQHLMTVLIRKHSQLFTAPVPEGPTSPRGGLQCAVGWGSEEVTRDSQGEPGGPGLPAHRTSSLDGAAVAVLSRTAPTGPGSRCSPGKKVQTLPSWKSSFRQPRSLSGSPKGGGSSLEVPIISSGGNWLMNGLSSLRGHRRASSGDRLKDSGSVQRLSTYDNVPAPGLVPGIPSVASMAWSGASSSESSVGGSLSSCTACRASDSSARSSLHTDWALEPSPLPSSSEDPKSLDLDHSMDEAGAGASNSEPSEPDSPTREHARRSEALQGLVTELRAELCRQRTEYERSVKRIEEGSADLRKRMSRLEEELDQEKKKYIMLEIKLRNSERAREDAERRNQLLQREMEEFFSTLGSLTVGAKGARAPK

SEQ ID NO: 2947 - DNA, 2421 bp, Homo sapiens
ggaggaggcaagagccgacgcgaggggaggggagcgcagcggcggggctaacgggcgggcaagcgggcgggcggcaacagcatgtccctcggccagcgcgggcggcctcttagcgcggcgggggctgctctgggcgcgccccgggcgaagtgcgcccagtctccggccccggcccctcggcgcgcccgacttcccggccgcccctgagcccagcagccgcgggtcccgggatcggctaagagtagctgcaacgcctcgccggacggagtcctttcctttcccgggacgctgggccatgagctccgcggcccacctgaggcacaggggagtctgctcggccaggacagcctccccgaagtcccgctgccctcgcctctgcactgcgggacgccagcgctcggccctggcggaggcgtcttcggaagagcatcggggtgggggcatggaatccgcggaacctgcgggccaggcccgggcggcggccaccaagctgtcggaggctgtgggcgcggcgctgcaggagccccggcggcagaggcgcctggtgcttgttatcgtgtgcgtggcgctgttactggacaacatgctgtacatggtcatcgtgcccatagtgcccgactacatcgcccacatgcgcgggggcggcgagggccccacccggactcccgaggtgtgggagcccaccctgccgctgcccactccggccaatgccagcgcctacacggccaacacctcggcgtccccgacagctgcgtggccagcgggctcagcccttcggccccgctaccctacggagagcgaagacgtgaagatcggggtgctgtttgcttccaaggctatcctgcagctgctagtgaaccccttgagcgggcccttcatcgaccgcatgagctacgacgtgccgctgctgatcggcctgggcgtcatgttcgcctctacagtcctgttcgccttcgccgaggactacgccacgctgttcgcggcgcgcagcctgcagggcctgggctcagccttcgccgacacgtctggcatagccatgatcgccgataagtacccggaggagccggagcgcagtcgtgcactgggcgtggcgctggccttcattagcttcggaagcctagtggccccgcccttcgggggcatcctctatgagttcgccggcaagcgcgtgcccttcttggtgctagctgccgtgtcgctctttgacgcgctgttgctgctggcagtggccaaacccttctcggcggctgcacgggctcgggccaacctgccagtgggcactcccatccaccgcctcatgctagacccctacattgccgtggtggccggcgcgctcaccacctgtaacattcccctcgccttcctcgaacccaccattgccacgtggatgaagcatacgatggcggcttccgagtgggagatgggcatggcctggctgccggccttcgtgcctcatgtgctgggcgtctacctcaccgtgcgcctggcggcgcgctacccacacctgcagtggctgtacggcgcgcttgggctggctgtgatcggcgccagctcgtgcatcgtgcccgcctgccgctccttcgcgccgctagtggtctcactatgcggcctctgttttggcatagccctagtcgacacagcactgctgcccacgctcgccttcctggtggacgtgcgccatgtctcagtctatggcagcgtctacgccatcgccgacatctcctattcggtggcctacgcgctcgggcccatagtggcaggccacattgtgcactcgctgggctttgagcagctcagccttggcatgggactggccaacctgctctatgctcccgtcttgctgctgctccgcaacgtgggcctcctgacgcgctcccgttccgagcgcgatgtgctgcttgatgagccaccgcaaggtctgtacgatgcggtgcgcctgcgtgagcgtcctgtgtctggccaggacggcgagcctcgcagcccgcctggcccttttgatgagtgcgaggacgactacaactactactacacccgcagctagcatccccactcctcctccagcccacccaaccgccttgggtcaagggggctgctctgcaagcccactggccagctctggctcagggcccacctcctccagcgagtaccccagccactcctcaaccttgacttctgcccaaatcccctccctgtgacccgttccatatccctttctctcttgtccaatggggcttggagcaccgaggccagcgaagccatcgcgctccttgcggaggtgaagaggaccctgagtccccacctgcggctcccctgtgtagagcctgcatctgtctgtccttccttccattgctcccagtgccaaacttgggccgctgcaccgcggcgcctccgcccaaatcaataaactgtgtctgtcccagg

SEQ ID NO: 2948 - protein, 532 aa, Homo sapiens
MESAEPAGQARAAATKLSEAVGAALQEPRRQRRLVLVIVCVALLLDNMLYMVIVPIVPDYIAHMRGGGEGPTRTPEVWEPTLPLPTPANASAYTANTSASPTAAWPAGSALRPRYPTESEDVKIGVLFASKAILQLLVNPLSGPFIDRMSYDVPLLIGLGVMFASTVLFAFAEDYATLFAARSLQGLGSAFADTSGIAMIADKYPEEPERSRALGVALAFISFGSLVAPPFGGILYEFAGKRVPFLVLAAVSLFDALLLLAVAKPFSAAARARANLPVGTPIHRLMLDPYIAVVAGALTTCNIPLAFLEPTIATWMKHTMAASEWEMGMAWLPAFVPHVLGVYLTVRLAARYPHLQWLYGALGLAVIGASSCIVPACRSFAPLVVSLCGLCFGIALVDTALLPTLAFLVDVRHVSVYGSVYAIADISYSVAYALGPIVAGHIVHSLGFEQLSLGMGLANLLYAPVLLLLRNVGLLTRSRSERDVLLDEPPQGLYDAVRLRERPVSGQDGEPRSPPGPFDECEDDYNYYYTRS

SEQ ID NO: 2949 - DNA, 1851 bp, Homo sapiens
ggcacgagctcggctcctggaaagatggaggcagcggagacagaggcggaagctgcagccctagaggtcctggctgaggtggcaggcatcttggaacctgtaggcctgcaggaggaggcagaactgccagccaagatcctggttgagtttgtggtggactctcagaagaaagacaagctgctctgcagccagcttcaggtagcggatttcctgcagaacatcctggctcaggaggacactgctaagggtctcgaccccttggcttctgaagacacgagccgacagaaggcaattgcagctaaggaacaatggaaagagctgaaggccacctacagggagcacgtagaggccatcaaaattggcctcaccaaggccctgactcagatggaggaagcccagaggaaacggacacaactccgggaagcctttgagcagctccaggccaagaaacaaatggccatggagaaacgcagagcagtccagaaccagtggcagctacaacaggagaagcatctgcagcatctggcggaggtttctgcagaggtgagggagcgtaagacagggactcagcaggagcttgacagggtgtttcagaaacttggaaacctgaagcagcaggcagaacaggagcgggacaagctgcagaggtatcagaccttcctccagcttctgtataccctgcagggtaagctgttgttccctgaggctgaggctgaggcagagaatcttccagatgataaaccccagcagccgactcgaccccaggagcagagtacaggagacaccatggggagagaccctggtgtgtccttcaaggctgttggtctacaacctgctggagatgtaaatttgccatgacttcctggaggacagcagcatggagaaagatcctagaaaaggtcagacccaactcaggccttggtgtccctggactgcaagtgtggaaggagggaaagcctggtttacctctctctgcatctgagctctgctacccatggagcagatggatggtgggaacaggaaagagcttatgttacacctcattcccatgcttagcccacccagagctaacccctgtcttcttccccaggcctctgacttccctcacctcccaaccatcattacaggaaagactgtgaactcctgagttcagcttgatttctgactacatcccagcaagctctggcatctgtggattaaaatccctggatctctctcagttgtgtatttgttcatcttcatatgctggcaggaacaactattaatacagatactcagaagccaataacatgacaggagctgggactggtttgaacacagggtgtgcagatggggagggggtactggccttgggcctcctatgatgcagacatggtgaatttaattcaaggaggaggagaatgttttaggcaggtggttatatgtgggaagataattttattcatggatccaaatgtttgttgagtccttttgtgctaaggttcttgcggtgaaccagaattataacagtgagctcatctgactgttttaggatgtacagcctagtgttaacattcttggtatctttttgtgccttatctaaaacatttctcgatcactggtttcagatgttcatttattatattcttttcaaagattcagagattggcttttgtcatccactattgtatgttttgtttcattgacctctagtgataccttgatctttcccactttctgttttcggattggagaagatgtaccttttttgtcaactcttacttttatcagatgatcaactcacgtatttggatctttatttgttttctcaaataaatatttaaggttaaaaaaaaaaaaaaaaaaaaaaaa

SEQ ID NO: 2950 - protein, 277 aa, Homo sapiens
MEAAETEAEAAALEVLAEVAGILEPVGLQEEAELPAKILVEFVVDSQKKDKLLCSQLQVADFLQNILAQEDTAKGLDPLASEDTSRQKAIAAKEQWKELKATYREHVEAIKIGLTKALTQMEEAQRKRTQLREAFEQLQAKKQMAMEKRRAVQNQWQLQQEKHLQHLAEVSAEVRERKTGTQQELDRVFQKLGNLKQQAEQERDKLQRYQTFLQLLYTLQGKLLFPEAEAEAENLPDDKPQQPTRPQEQSTGDTMGRDPGVSFKAVGLQPAGDVNLP

SEQ ID NO: 2951 - DNA, 636 bp, Homo sapiens
gatcgcggagtcggtgctttagtacgccgctggcacctttactctcgccggccgcgcgaacccgtttgagctcggtatcctagtgcacacgcctttgcaagcgacggcgccatgagtctgacttccagttccagcgtacgagttgaatggatcgcagcagttaccattgctgctgggacagctgcaattggttatctagcttacaaaagattttatgttaaagatcatcgaaataaagctatgataaaccttcacatccagaaagacaaccccaagatagtacatgcttttgacatggaggatttgggagataaagctgtgtactgccgttgttggaggtccaaaaagttcccattctgtgatggggctcacacaaaacataacgaagagactggagacaatgtgggccctctgatcatcaagaaaaaagaaacttaaatggacacttttgatgctgcaaatcagcttgtcgtgaagttacctgattgtttaattagaatgactaccacctctgtctgattcaccttcgctggattctaaatgtggtatattgcaaactgcagctttcacatttatggcatttgtcttgttgaaacatcgtggtgcacatttgtttaaacaaaaaaaaaaaaaaaa

SEQ ID NO: 2952 - protein, 108 aa, Homo sapiens
MSLTSSSSVRVEWIAAVTIAAGTAAIGYLAYKRFYVKDHRNKAMINLHIQKDNPKIVHAFDMEDLGDKAVYCRCWRSKKFPFCDGAHTKHNEETGDNVGPLIIKKKET

SEQ ID NO: 2953 - DNA, 527 bp, Homo sapiens
ggaaagaaggccaagggaaagaaggtggttccggcccctgctgtcatgaagaagcaggaggctaagaaagtggtgaatcccctgtttgagaaacggcctaagaattttggcattggacaggacatccagcccaaaagacacttcacccgctttgtgaaatggccctgctatatcaggttgcagcggcagagagccatcctctataaggggctgaaagtgcctcctgcgattaaccagttcacccaggccctggaccgccaaacagctactcagctgcttaagctggcccacaagtacagaccagagacaaaagacactttggctaagctggtggaagctatcaggaccaattacaacgacagatacagatacgatgagatccgctgtcactggggcagcaacgtcctgggtcctaagtccgtggctcgtatcgccaagctcgaaaaggcaaaggctaaagaacttgccactaaactgggttaaatgtacactgttgagttttctgtacataaaaataattaaaataa

SEQ ID NO: 2954 - protein, 145 aa, Homo sapiens
MKKQEAKKVVNPLFEKRPKNFGIGQDIQPKRHFTRFVKWPCYIRLQRQRAILYKGLKVPPAINQFTQALDRQTATQLLKLAHKYRPETKDTLAKLVEAIRTNYNDRYRYDEIRCHWGSNVLGPKSVARIAKLEKAKAKELATKLG

SEQ ID NO: 2955 - DNA, 2316 bp, Homo sapiens
ccgttgtggcgagcgctacacgaggcaaacgacttctcccttctttgaactggaccccgcgagcaccagagtcggcgtaactatcgcctgacaggcatttaaatcaaacggtattgagatggattgggttatgaaacataatggtccaaatgacgctagtgatgggacagtacgacttcgtggactaccatttggttgcagcaaagaggaaatagttcagttctttcaagggttggaaatcgtgccaaatgggataacattgacgatggactaccaggggagaagcacaggggaggccttcgtgcagtttgcttcaaaggagatagcagaaaatgctctggggaaacacaaggaaagaatagggcacaggtatattgagatcttcagaagtagcaggagtgaaatcaaaggattttatgatccaccaagaagattgctgggacagcgaccgggaccatatgatagaccaataggaggaagagggggttattatggagctgggcgtggaagtatgtatgacagaatgcgacgaggaggtgatggatatgatggtggttatggaggttttgatgactatggtggctataataattacggctatgggaatgatggctttgatgacagaatgagagatggaagaggtatgggaggacatggctatggtggagctggtgatgcaagttcaggttttcatggtggtcatttcgtacatatgagagggttgccttttcgtgcaactgaaaatgacattgctaatttcttctcaccactaaatccaatacgagttcatattgatattggagctgatggcagagccacaggagaagcagatgtagagtttgtgacacatgaagatgcagtagctgccatgtctaaagataaaaataacatgcaacatcgatatattgaactcttcttgaattctactcctggaggcggctctggcatgggaggttctggaatgggaggctacggaagagatggaatggataatcagggaggctatggatcagttggaagaatgggaatggggaacaattacagtggaggatatggtactcctgatggtttgggtggttatggccgtggtggtggaggcagtggaggttactatgggcaaggcggcatgagtggaggtggatggcgtgggatgtactgaaagcaaaaacaccaacatacaagtcttgacaacagcatctggtctactagactttcttacagatttaatttcttttgtattttaagaactttataatgactgaaggaatgtgttttcaaaatattatttggtaaagcaacagattgtgatgggaaaatgttttctgtaggtttatttgttgcatactttgacttaaaaataaatttttatattcaaaccactgatgttgatactttttatatactagttactcctaaagatgtgctgccttcataagatttgggttgatgtattttactattagttctacaagaagtagtgtggtgtaattttagaggataatggttcacctctgcgtaaactgcaagtcttaagcagacatctggaatagagcttgacaaataattagtgtaacttttttctttagttcctcctggacaacactgtaaatataaagcctaaagatgaagtggcttcaggagtataaattcagctaattatttctatattattatttttcaaatgtcatttatcaggcatagctctgaaacattgatgatctaagaggtattgatttctgaatattcataattgtgttacctgggtatgagagtgttggaagctgaattctagccctagattttggagtaaaaccccttcagcacttgaccgaaataccaaaaatgtctccaaaaaattgatagttgcaggttatcgcaagatgtcttagagtagggttaaggttctcagtgacacaagaattcagtattaagtacataggtatttactatggagtataattctcacaattgtattttcagttttctgcccaatagagtttaaataactgtataaatgatgactttaaaaaaatgtaagcaacaagtccatgtcatagtcaataaaaacaatcctgcagttgggttttgtatctgatccctgcttggagttttagtttaaagaatctatatgtagcaaggaaaaggtgctttttaattttaatccctttgatcaatatggcttttttccaaattggctaatggatcaaaatgaaacctgttgatgtgaattcagttattgaacttgttacttgtttttgccagaaatgttattaataaatgtcaatgtgggagataaaaaaaaaaaaaaaaaaaaaa

SEQ ID NO: 2956 - protein, 346 aa, Homo sapiens
MDWVMKHNGPNDASDGTVRLRGLPFGCSKEEIVQFFQGLEIVPNGITLTMDYQGRSTGEAFVQFASKEIAENALGKHKERIGHRYIEIFRSSRSEIKGFYDPPRRLLGQRPGPYDRPIGGRGGYYGAGRGSMYDRMRRGGDGYDGGYGGFDDYGGYNNYGYGNDGFDDRMRDGRGMGGHGYGGAGDASSGFHGGHFVHMRGLPFRATENDIANFFSPLNPIRVHIDIGADGRATGEADVEFVTHEDAVAAMSKDKNNMQHRYIELFLNSTPGGGSGMGGSGMGGYGRDGMDNQGGYGSVGRMGMGNNYSGGYGTPDGLGGYGRGGGGSGGYYGQGGMSGGGWRGMY

SEQ ID NO: 2957 - DNA, 2575 bp, Homo sapiens
gcatggccaaggccgggcggccgccttgcccccgcttcctttcacgctgtcgctgcccgtaggtggttgtggccactgtgcccggagggaggcggcggtggccagtaatgcctgggaaactcctctggggggacattatggagctggaagcacccttggaggagtccgagagccagaagaaggagaggcaaaagagtgacagaaggaagtcaaggcaccattatgactcggatgagaaatcagaaacaagagaaaatggtgttacagatgacctggatgctcccaaggccaaaaaatctaaaatgaaagagaagctaaatggagacactgaagaaggatttaatagactttcagatgaattctccaaatctcataagtcaagaagaaaagatctaccaaatggagatatagatgaatatgaaaaaaaatcaaagcgagtatcatctttagatacttctactcataaatcaagtgataataaactagaggagaccttaacacgtgaacagaaagaaggagccttctccaattttcctatttctgaagagactataaagcttctgaaaggtcgaggggtaacatatctctttcctattcaagttaagacctttggtcctgtatatgaaggaaaagatttaatagctcaagcacggacaggaacaggaaagacattctcttttgccatccccttaattgaaagactccaaagaaatcaagaaacaattaaaaaaagccgctcaccaaaggtacttgttttggctccaacaagggaactggcaaaccaagtagccaaagacttcaaagatataactaggaaactcagcgtggcgtgtttttatggtggaacatcatatcaaagccaaattaatcatattcgaaatggtattgacatcttggttggaacacctggtcgtatcaaagaccatctgcagagtggccgattggatctttctaaactgcgacatgttgtgcttgatgaagtggatcagatgttagatttaggtttcgctgaacaagttgaagatattattcatgaatcctacaaaactgattctgaagacaatcctcagactttacttttttctgcaacttgcccacagtgggtatacaaagttgcaaaaaaatacatgaaatccagatatgaacaggttgaccttgttggaaaaatgactcaaaaggctgcaactactgtggaacatttggccatccagtgtcattggtctcagaggccagcagttattggagatgtccttcaagtctacagtgggtctgaagggagggctattattttctgtgagaccaagaagaatgtaactgaaatggccatgaatccacacataaaacagaatgcccagtgtttacatggggacattgcacagtcacaaagagaaattacactaaaaggcttcagagaaggtagttttaaagttttggtggcaaccaatgtggctgcccgtggtttggacattcctgaagttgacctggtgattcaaagttctcctcctcaggatgttgagtcctatatccatcgctctggacgcacaggtagagctggacggacagggatttgtatatgtttttatcaaccaagagaaagaggtcaactaagatatgtggaacaaaaagcaggaattacttttaaacgtgtaggtgttccttctacaatggatttagttaaatctaaaagcatggatgccatcaggtctctggcttccgtttcttatgctgctgttgattttttccgaccatcagctcagagactgatagaagagaaaggtgcagtggatgcattggctgcagctttagcccacatttctggtgcatcaagctttgaaccacgatctttgatcacctctgataaggggtttgtgaccatgactctggaaagcctagaggaaatacaggatgtcagctgtgcttggaaagaacttaacagaaagctgagtagtaatgcagtgtctcagattaccagaatgtgcctcctgaaaggaaatatgggtgtttgctttgatgttcctacaactgagtcagaaaggttacaggcagagtggcatgattccgactggatactctcagtgccagccaaattacctgaaattgaagaatattatgatggaaacacatcttctaattccagacagaggagtggctggtcaagtggtcgatcaggccggtcaggccggtcaggtggtcgatctggcggccggtcaggtagacagagtcgacaaggaagtcgctcaggaagtcgacaagatggtagaagacgaagtgggaatagaaatcgatcaagaagtgggggccacaaacggagttttgactgagtatttgatagttaatctaccagtgtgagcttgcctatttctgcctaatcatgtacattatccaccaaaaattaggtcatcatagttgaggtatgtgtctgctatttgcaaagaagttggtcgtatttttttaaaaagtatttcacaagaatggaacaaatctacttatccagttatacctttgaataaaaaaacctccttttattgtctcttttcaaaaaaaaaaaaaaaaaaaaaaaaaaaaaaaaaaaaaa

SEQ ID NO: 2958 - protein, 737 aa, Homo sapiens
MPGKLLWGDIMELEAPLEESESQKKERQKSDRRKSRHHYDSDEKSETRENGVTDDLDAPKAKKSKMKEKLNGDTEEGFNRLSDEFSKSHKSRRKDLPNGDIDEYEKKSKRVSSLDTSTHKSSDNKLEETLTREQKEGAFSNFPISEETIKLLKGRGVTYLFPIQVKTFGPVYEGKDLIAQARTGTGKTFSFAIPLIERLQRNQETIKKSRSPKVLVLAPTRELANQVAKDFKDITRKLSVACFYGGTSYQSQINHIRNGIDILVGTPGRIKDHLQSGRLDLSKLRHVVLDEVDQMLDLGFAEQVEDIIHESYKTDSEDNPQTLLFSATCPQWVYKVAKKYMKSRYEQVDLVGKMTQKAATTVEHLAIQCHWSQRPAVIGDVLQVYSGSEGRAIIFCETKKNVTEMAMNPHIKQNAQCLHGDIAQSQREITLKGFREGSFKVLVATNVAARGLDIPEVDLVIQSSPPQDVESYIHRSGRTGRAGRTGICICFYQPRERGQLRYVEQKAGITFKRVGVPSTMDLVKSKSMDAIRSLASVSYAAVDFFRPSAQRLIEEKGAVDALAAALAHISGASSFEPRSLITSDKGFVTMTLESLEEIQDVSCAWKELNRKLSSNAVSQITRMCLLKGNMGVCFDVPTTESERLQAEWHDSDWILSVPAKLPEIEEYYDGNTSSNSRQRSGWSSGRSGRSGRSGGRSGGRSGRQSRQGSRSGSRQDGRRRSGNRNRSRSGGHKRSFD

SEQ ID NO: 2959 - DNA, 3319 bp, Homo sapiens
ctacctcttcctctccacgcggttgagaagaccggtcggcctgggcaacctgcgctgaagatgccgggaaaactccgtagtgacgctggtttggaatcagacaccgcaatgaaaaaaggggagacactgcgaaagcaaaccgaggagaaagagaaaaaaagagaagccaaaatctgataagactgaagagatagcagaagaggaagaaactgttttccccaaagctaaacaagttaaaaagaaagcagagccttctgaagttgacatgaattctcctaaatccaaaaaggcaaaaaagaaagaggagccatctcaaaatgacatttctcctaaaaccaaaagtttgagaaagaaaaaggagcccattgaaaagaaagtggtttcttctaaaaccaaaaaagtgacaaaaaatgaggagccttctgaggaagaaatagatgctcctaagcccaagaagatgaagaaagaaaaggaaatgaatggagaaactagagagaaaagccccaaactgaagaatggatttcctcatcctgaaccggactgtaaccccagtgaagctgccagtgaagaaagtaacagtgagatagagcaggaaatacctgtggaacaaaaagaaggcgctttctctaattttcccatatctgaagaaactattaaacttctcaaaggccgaggagtgaccttcctatttcctatacaagcaaagacattccatcatgtttacagcgggaaggacttaattgcacaggcacggacaggaactgggaagacattctcctttgccatccctttgattgagaaacttcatggggaactgcaagacaggaagagaggccgtgcccctcaggtactggttcttgcacctacaagagagttggcaaatcaagtaagcaaagacttcagtgacatcacaaaaaagctgtcagtggcttgtttttatggtggaactccctatggaggtcaatttgaacgcatgaggaatgggattgatatcctggttggaacaccaggtcgtatcaaagaccacatacagaatggcaaactagatctcaccaaacttaagcatgttgtcctggatgaagtggaccagatgttggatatgggatttgctgatcaagtggaagagattttaagtgtggcatacaagaaagattctgaagacaatccccaaacattgcttttttctgcaacttgccctcattgggtatttaatgttgccaagaaatacatgaaatctacatatgaacaggtggacctgattggtaaaaagactcagaaaacggcaataactgtggagcatctggctattaagtgccactggactcagagggcagcagttattggggatgtcatccgagtatatagtggtcatcaaggacgcactatcatcttttgtgaaaccaagaaagaagcccaggagctgtcccagaattcagctataaagcaggatgctcagtccttgcatggagacattccacagaagcaaagggaaatcaccctgaaaggttttagaaatggtagttttggagttttggtggcaaccaatgttgctgcacgtgggttagacatccctgaggttgatttggttatacaaagctctccaccaaaggatgtagagtcctacattcatcgatccgggcggacaggcagagctggaaggacgggggtgtgcatctgcttttatcagcacaaggaagaatatcagttagtacaagtggagcaaaaagcgggaattaagttcaaacgaataggtgttccttctgcaacagaaataataaaagcttccagcaaagatgccatcaggcttttggattccgtgcctcccactgccattagtcacttcaaacaatcagctgagaagctgatagaggagaagggagctgtggaagctctggcagcagcactggcccatatttcaggtgccacgtccgtagaccagcgctccttgatcaactcaaatgtgggttttgtgaccatgatcttgcagtgctcaattgaaatgccaaatattagttatgcttggaaagaacttaaagagcagctgggcgaggagattgattccaaagtgaagggaatggtttttctcaaaggaaagctgggtgtttgctttgatgtacctaccgcatcagtaacagaaatacaggagaaatggcatgattcacgacgctggcagctctctgtggccacagagcaaccagaactggaaggaccacgggaaggatatggaggcttcaggggacagcgggaaggcagtcgaggcttcaggggacagcgggacggaaacagaagattcagaggacagcgggaaggcagtagaggcccgagaggacagcgatcaggaggtggcaacaaaagtaacagatcccaaaacaaaggccagaagcggagtttcagtaaagcatttggtcaataattagaaatagaagatttatatagcaaaaagagaatgatgtttggcaatatagaactgaacattatttttcatgcaaagttaaaagcacattgtgcctccttttgaccacttgccaagtccctgtctctttcagacacagacaagcttcatttaaattatttcatctgatcattatcatttataactttattgttacttcatcagtttttccttttgaaaggtgtatgaattcattacatttttattctaatgtattatctgtagattagaagataaaatcaagcatgtatctgcctatactttgtgagttcacctgtctttatactcaaaagtgtcccttaatagtgtccttccctgaaataaatacctaagggagtgtaacagtctctggaggaccactttgagcctttggaagttaaggtttcctcagccacctgccgaacagtttctcatgtggtcctattatttgtctactgagacttaatactgagcaatgttttgaaacaagatttcaaactaatctgggttgtaatacagtttataccagtgtatgctctagacttggaagatgtagtatgtttgatgtggattacctatacttatgttcgttttgatacatttttagcttctcattataaggtgattcatgctttagtgaattcttcatagatagtatatataaaagtacattttaatagaaagccagggttttaaggaatttcacatgtataaggtggctccatagctttatttgtaagtaggctggataaatggtgcttaaatggtaatgtactccacttcttcctattggaagattaacattatttaccaagaaggacttaagggagtaaggggcgcagattagcattgctcaagagtatgtaaaaaaaaaaaaaaaaaaaaaaa

SEQ ID NO: 2960 - protein, 715 aa, Homo sapiens
MNSPKSKKAKKKEEPSQNDISPKTKSLRKKKEPIEKKVVSSKTKKVTKNEEPSEEEIDAPKPKKMKKEKEMNGETREKSPKLKNGFPHPEPDCNPSEAASEESNSEIEQEIPVEQKEGAFSNFPISEETIKLLKGRGVTFLFPIQAKTFHHVYSGKDLIAQARTGTGKTFSFAIPLIEKLHGELQDRKRGRAPQVLVLAPTRELANQVSKDFSDITKKLSVACFYGGTPYGGQFERMRNGIDILVGTPGRIKDHIQNGKLDLTKLKHVVLDEVDQMLDMGFADQVEEILSVAYKKDSEDNPQTLLFSATCPHWVFNVAKKYMKSTYEQVDLIGKKTQKTAITVEHLAIKCHWTQRAAVIGDVIRVYSGHQGRTIIFCETKKEAQELSQNSAIKQDAQSLHGDIPQKQREITLKGFRNGSFGVLVATNVAARGLDIPEVDLVIQSSPPKDVESYIHRSGRTGRAGRTGVCICFYQHKEEYQLVQVEQKAGIKFKRIGVPSATEIIKASSKDAIRLLDSVPPTAISHFKQSAEKLIEEKGAVEALAAALAHISGATSVDQRSLINSNVGFVTMILQCSIEMPNISYAWKELKEQLGEEIDSKVKGMVFLKGKLGVCFDVPTASVTEIQEKWHDSRRWQLSVATEQPELEGPREGYGGFRGQREGSRGFRGQRDGNRRFRGQREGSRGPRGQRSGGGNKSNRSQNKGQKRSFSKAFGQ

SEQ ID NO: 2961 - DNA, 1182 bp, Homo sapiens
gaattccgctagactaagttggtcatgatgcagaagctactcaaatgcagtcggcttgtcctggctcttgccctcatcctggttctggaatcctcagttcaaggttatcctacgcagagagccaggtaccaatgggtgcgctgcaatccagacagtaattctgcaaactgccttgaagaaaaaggaccaatgttcgaactacttccaggtgaatccaacaagatcccccgtctgaggactgacctttttccaaagacgagaatccaggacttgaatcgtatcttcccactttctgaggactactctggatcaggcttcggctccggctccggctctggatcaggatctgggagtggcttcctaacggaaatggaacaggattaccaactagtagacgaaagtgatgctttccatgacaaccttaggtctcttgacaggaatctgccctcagacagccaggacttgggtcaacatggattagaagaggattttatgttataaaagaggattttcccaccttgacaccaggcaatgtagttagcatattttatgtaccatggttatatgattaatcttgggacaaagaattttatagaaatttttaaacatctgaaaaagaagcttaagttttatcatccttttttttctcatgaattcttaaaggattatgctttaatgctgttatctatcttattgttcttgaaaatacctgcattttttggtatcatgttcaaccaacatcattatgaaattaattagattcccatggccataaaatggctttaaagaatatatatatatttttaaagtagcttgagaagcaaattggcaggtaatatttcatacctaaattaagactctgacttggattgtgaattataatgatatgccccttttcttataaaaacaaaaaaaaaataatgaaacacagtgaatttgtagagtgggggtatttgacatattttacagggtggagtgtactatatactattacctttgaatgtgtttgcagagctagtggatgtgtttgtctacaagtatgattgctgttacataacaccccaaattaactcccaaattaaaacacagttgtgctgtcaatacctcatactgctttacctttttttcctggatatctgtgtattttcaaatgttactatatattaaagcagaaatataacc

SEQ ID NO: 2962 - protein, 158 aa, Homo sapiens
MMQKLLKCSRLVLALALILVLESSVQGYPTQRARYQWVRCNPDSNSANCLEEKGPMFELLPGESNKIPRLRTDLFPKTRIQDLNRIFPLSEDYSGSGFGSGSGSGSGSGSGFLTEMEQDYQLVDESDAFHDNLRSLDRNLPSDSQDLGQHGLEEDFML

SEQ ID NO: 2963 - DNA, 1683 bp, Homo sapiens
gaacgccggtggcggggctggtagcccggcagccgcaggtggggccacgagcgctggctgagggaccgagccggagagccccggagcccccgtaacccgcgcggggagcgcccaggatgccgcgcggggactcggagcaggtgcgctactgcgcgcgcttctcctacctctggctcaagttttcacttatcatctattccaccgtgttctggctgattggggccctggtcctgtctgtgggcatctatgcagaggttgagcggcagaaatataaaacccttgaaagtgccttcctggctccagccatcatcctcatcctcctgggcgtcgtcatgttcatggtctccttcattggtgtgctggcgtccctccgtgacaacctgtaccttctccaagcattcatgtacatccttgggatctgcctcatcatggagctcattggtggcgtggtggccttgaccttccggaaccagaccattgacttcctgaacgacaacattcgaagaggaattgagaactactatgatgatctggacttcaaaaacatcatggactttgttcagaaaaagttcaagtgctgtggcggggaggactaccgagattggagcaagaatcagtaccacgactgcagtgcccctggacccctggcctgtggggtgccctacacctgctgcatcaggaacacgacagaagttgtcaacaccatgtgtggctacaaaactatcgacaaggagcgtttcagtgtgcaggatgtcatctacgtgcggggctgcaccaacgccgtgatcatctggttcatggacaactacaccatcatggcgggcatcctcctgggcatcctgcttccccagttcctgggggtgctgctgacgctgctgtacatcacccgggtggaggacatcatcatggagcactctgtcactgatgggctcctggggcccggtgccaagcccagcgtggaggcggcaggcacgggatgctgcttgtgctaccccaattagggcccagcctgccatggcagctccaacaaggaccgtctgggatagcacctctcagtcaacatcgtggggctggacagggctgcggcccctctgcccacactcagtactgaccaaagccagggctgtgtgtgcctgtgtgtaggtcccacggcctctgcctccccagggagcagagcctgggcctcccctaagaggctttccccgaggcagctctggaatctgtgcccacctggggcctggggaacaaggccctcctttctccaggcctgggctacgggggagggagagcctgaggctctgctcagggcccatttcatctctggcagtgccttggcggtggtattcaaggcagttttgtagcacctgtaattggggagagggagtgtgcccctcggggcaggagggaagggcatctggggaagggcaggagggaagagctgtccatgcagccacgcccatggccaggttggcctcttctcagcctcccaggtgccttgagccctcttgcaagggcggctgcttccttgagcctagtttttttacgtgatttttgtaacattcatttttttgtacagataacaggagtttctgactaatcaaagctggtatttccccgcatgtcttattcttgcccttcccccaaccagtttgttaatcaaacaataaaaacatgttttttttt

SEQ ID NO: 2964 - DNA, 1282 bp, Homo sapiens
gggctctctccttgtcagtcggcgccgcgtgcgggctggtggctctgtggcagcggcggcggcaggactccggcactatgagcggcttcagcaccgaggagcgcgccgcgcccttctccctggagtaccgagtcttcctcaaaaatgagaaaggacaatatatatctccatttcatgatattccaatttatgcagataaggatgtgtttcacatggtagttgaagtaccacgctggtctaatgcaaaaatggagattgctacaaaggaccctttaaaccctattaaacaagatgtgaaaaaaggaaaacttcgctatgttgcgaatttgttcccgtataaaggatatatctggaactatggtgccatccctcagacttgggaagacccagggcacaatgataaacatactggctgttgtggtgacaatgacccaattgatgtgtgtgaaattggaagcaaggtatgtgcaagaggtgaaataattggcgtgaaagttctaggcatattggctatgattgacgaaggggaaaccgactggaaagtcattgccattaatgtggatgatcctgatgcagccaattataatgatatcaatgatgtcaaacggctgaaacctggctacttagaagctactgtggactggtttagaaggtataaggttcctgatggaaaaccagaaaatgagtttgcgtttaatgcagaatttaaagataaggactttgccattgatattattaaaagcactcatgaccattggaaagcattagtgactaagaaaacgaatggaaaaggaatcagttgcatgaatacaactttgtctgagagccccttcaagtgtgatcctgatgctgccagagccattgtggatgctttaccaccaccctgtgaatctgcctgcacagtaccaacagacgtggataagtggttccatcaccagaaaaactaatgagatttctctggaatacaagctgatattgctacatcgtgttcatctggatgtattagaagtaaaagtagtagcttttcaaagctttaaatttgtagaactcatctaactaaagtaaattctgctgtgactaatccaatatactcagaatgttatccatctaaagcatttttcatatctcaactaagataacttttagcacatgcttaaatatcaaagcagttgtcatttggaagtcacttgtgaatagatgtgcaaggggagcacatattggatgtatatgttaccatatgttaggaaataaaattattttgctgaaaaaaaaaaaaaaaaaa

SEQ ID NO: 2965 - protein, 289 aa, Homo sapiens
MSGFSTEERAAPFSLEYRVFLKNEKGQYISPFHDIPIYADKDVFHMVVEVPRWSNAKMEIATKDPLNPIKQDVKKGKLRYVANLFPYKGYIWNYGAIPQTWEDPGHNDKHTGCCGDNDPIDVCEIGSKVCARGEIIGVKVLGILAMIDEGETDWKVIAINVDDPDAANYNDINDVKRLKPGYLEATVDWFRRYKVPDGKPENEFAFNAEFKDKDFAIDIIKSTHDHWKALVTKKTNGKGISCMNTTLSESPFKCDPDAARAIVDALPPPCESACTVPTDVDKWFHHQKN

SEQ ID NO: 2966 - DNA, 4070 bp, Homo sapiens
atgagctgctcaaggctcattacacgttgggccggctctcggacaacacccctgagcactacctggtgcaaggccgctacttcctggtgcgggatgtcactgagaagatggatgtgctgggcaccgtgggaagctgtggggcccccaacttccggcaggtgcagggtgggctcactgtgttcggcatgggacagcccagcctctcagggttcaggcgggtcctccagaaactccagaaggacggacatagggagtgtgtcatcttctgtgtgcgggaggaacctgtgcttttcctgcgtgcagatgaggactttgtgtcctacacacctcgagacaagcagaaccttcatgagaacctccagggccttggacccggggtccgggtggagagcctggagctggccatccggaaagagatccacgactttgcccagctgagcgagaacacataccatgtgtaccataacaccgaggacctgtggggggagccccatgctgtggccatccatggtgaggacgacttgcatgtgacggaggaggtgtacaagcggcccctcttcctgcagcccacctacaggtaccaccgcctgcccctgcccgagcaagggagtcccctggaggcccagttggacgcctttgtcagtgttctccgggagacccccagcctgctgcagctccgtgatgcccacgggcctcccccagccctcgtcttcagctgccagatgggcgtgggcaggaccaacctgggcatggtcctgggcaccctcatcctgcttcaccgcagtgggaccacctcccagccagaggctgcccccacgcaggccaagcccctgcctatggagcagttccaggtgatccagagctttctccgcatggtgccccagggaaggaggatggtggaagaggtggacagagccatcactgcctgtgccgagttgcatgacctgaaagaagtggtcttggaaaaccagaagaagttagaaggtatccgaccggagagcccagcccagggaagcggcagccgacacagcgtctggcagagggcgctgtggagcctggagcgatacttctacctgatcctgtttaactactaccttcatgagcagtacccgctggcctttgccctcagtttcagccgctggctgtgtgcccaccctgagctgtaccgcctgcccgtgacgctgagctcagcaggccctgtggctccgagggacctcatcgccaggggctccctacgggaggacgatctggtctccccggacgcgctcagcactgtcagagagatggatgtggccaacttccggcgggtgccccgcatgcccatctacggcacggcccagcccagcgccaaggccctggggagcatcctggcctacctgacggacgccaagaggaggctgcggaaggttgtctgggtgagccttcgggaggaggccgtgttggagtgtgacgggcacacctacagcctgcggtggcctgggccccctgtggctcctgaccagctggagaccctggaggcccagctgaaggcccatctaagcgagcctcccccaggcaaggagggccccctgacctacaggttccagacctgccttaccatgcaggaggtcttcagccagcaccgcagggcctgtcctggcctcacctaccaccgcatccccatgccggacttctgtgccccccgagaggaggactttgaccagctgctggaggccctgcgggccgccctctccaaggacccaggcactggcttcgtgttcagctgcctcagcggccagggccgtaccacaactgcgatggtggtggctgtcctggccttctggcacatccaaggcttccccgaggtgggtgaggaggagctcgtgagtgtgcctgatgccaagttcactaagggtgaatttcaggtagtaatgaaggtggtgcagctgctacccgatgggcaccgtgtgaagaaggaggtggacgcagcgctggacactgtcagcgagaccatgacgcccatgcactaccacctgcgggagatcatcatctgcacctaccgccaggcgaaggcagcgaaagaggcgcaagaaatgcggaggctgcagctgcggagcctgcagtacttggagcgctatgtctgcctgattctcttcaacgcgtacctccacctggagaaggccgactcctggcagaggcccttcagcacctggatgcaggaggtggcatcgaaggctggcatctacgagatccttaacgagctgggcttccccgagctggagagcggggaggaccagcccttctccaggctgcgctaccggtggcaggagcagagctgcagcctcgagccctctgcccccgaggacttgctgtagggggccttactccctgtccccccacccacagggccccacgcaggcctggggtgtctgaggtgctcttggctgggagcggccctgaggggtgctggccttgaaatgattcccccacttcctggagagactgagcggagttgggagcctttttagaaagaactttttataggacagggagacagcacagccatcccttgcaaaccaccaaggtgtgtggctgacctccagggaggagcactcactggagtgctcacaaggtgcacactgctgtgtgtaccttgcagacaggccggcgttcagcctccaaggggctcactcccccagttgccaaacactgtggatctctctgtcctcttctcccctctctcagattggcctggcagcccctggcacagagcagacccggccactggtagctccccacttccttactcctgctgctctgccattgccgctccccttgttgctgcccaagcactgccctcgggcgtctggcagcctgaggtgggtggaggggacagtgttctggatagatctattatgtgaaaggcagcttcacccagttttctggactctcatgcccccatctccgacctgggagacttcaggaatgacaacctacccagcctggtggggctggcaggatggtggaggtttctcaaggagctggagacttcagggagcccctctcatggggaggaaagagcttccagggggcgaacgcagcacagaggaagaggcctgctccacttgtctgggaacctgggcaggaggcacagaggaagccaaggcctggagctgcaggtcccccggcatctctctctgtcccggcagcccaggatggcctggtgcccccacctgctgcagcaggagccccaaggagtgctagctgagggtggttgctggggtggtcctcatggacagtgaggtgtgcaagggtgcactgagggtggtgggaggggatcacctgggttccaggccatccttgctgagcatctttgagcctgccttccggtgggagcagaaaaggccagaccctgctgagttagaggctgctgggatccactgtttccacacagcgggaaggctgctgggaacaggtggcagagaagtgccatgtttgcgttgagccttgcagctcttccagctggggactggtgcttgctgaaacccaggagctgaacagtgaggaggctgtccaccttgcttggctcactgggaccaggaaagcctgtctttggttaggctcgtgtacttctgcaggaaaaaaaaaaaaggatgtgtcattggtcatgatatttgaaaaggggaggaggccgaagttgttcccatttatccagtattggaaaatatttgacccccttggctgaattcttttgcagaactactgtgtgtctgttcactaccttttcaggtttattgtttttatttttgcatgaattaagacgttttaatttctttgcagacaaggtctagatgcggagtcagagatgggactgaatggggagggatcctttgtgttctcatggttggctctgactttcagctgtgttgggaccactggctgatcacatcacctctctgcctcagtttccccatctgtaaaatgggagaataatacttgcctacctacctcacaggggtgttgtgaggattcatttgtgattttttttttttttgtacagagcttttaagcattaaaaacagctaaatgtg

SEQ ID NO: 2967 - protein, 856 aa, Homo sapiens
MGTTASTAQQTVSAGTPFEGLQGSGTMDSRHSVSIHSFQSTSLHNSKAKSIIPNKVAPVVITYNCKEEFQIHDELLKAHYTLGRLSDNTPEHYLVQGRYFLVRDVTEKMDVLGTVGSCGAPNFRQVQGGLTVFGMGQPSLSGFRRVLQKLQKDGHRECVIFCVREEPVLFLRADEDFVSYTPRDKQNLHENLQGLGPGVRVESLELAIRKEIHDFAQLSENTYHVYHNTEDLWGEPHAVAIHGEDDLHVTEEVYKRPLFLQPTYRYHRLPLPEQGSPLEAQLDAFVSVLRETPSLLQLRDAHGPPPALVFSCQMGVGRTNLGMVLGTLILLHRSGTTSQPEAAPTQAKPLPMEQFQVIQSFLRMVPQGRRMVEEVDRAITACAELHDLKEVVLENQKKLEGIRPESPAQGSGSRHSVWQRALWSLERYFYLILFNYYLHEQYPLAFALSFSRWLCAHPELYRLPVTLSSAGPVAPRDLIARGSLREDDLVSPDALSTVREMDVANFRRVPRMPIYGTAQPSAKALGSILAYLTDAKRRLRKVVWVSLREEAVLECDGHTYSLRWPGPPVAPDQLETLEAQLKAHLSEPPPGKEGPLTYRFQTCLTMQEVFSQHRRACPGLTYHRIPMPDFCAPREEDFDQLLEALRAALSKDPGTGFVFSCLSGQGRTTTAMVVAVLAFWHIQGFPEVGEEELVSVPDAKFTKGEFQVVMKVVQLLPDGHRVKKEVDAALDTVSETMTPMHYHLREIIICTYRQAKAAKEAQEMRRLQLRSLQYLERYVCLILFNAYLHLEKADSWQRPFSTWMQEVASKAGIYEILNELGFPELESGEDQPFSRLRYRWQEQSCSLEPSAPEDLL

SEQ ID NO: 2968 - DNA, 2254 bp, Homo sapiens
ccgccgtctagcgccccgacctcgccaccatgagagccctgctggcgcgcctgcttctctgcgtcctggtcgtgagcgactccaaaggcagcaatgaacttcatcaagttccatcgaactgtgactgtctaaatggaggaacatgtgtgtccaacaagtacttctccaacattcactggtgcaactgcccaaagaaattcggagggcagcactgtgaaatagataagtcaaaaacctgctatgaggggaatggtcacttttaccgaggaaaggccagcactgacaccatgggccggccctgcctgccctggaactctgccactgtccttcagcaaacgtaccatgcccacagatctgatgctcttcagctgggcctggggaaacataattactgcaggaacccagacaaccggaggcgaccctggtgctatgtgcaggtgggcctaaagctgcttgtccaagagtgcatggtgcatgactgcgcagatggaaaaaagccctcctctcctccagaagaattaaaatttcagtgtggccaaaagactctgaggccccgctttaagattattgggggagaattcaccaccatcgagaaccagccctggtttgcggccatctacaggaggcaccgggggggctctgtcacctacgtgtgtggaggcagcctcatcagcccttgctgggtgatcagcgccacacactgcttcattgattacccaaagaaggaggactacatcgtctacctgggtcgctcaaggcttaactccaacacgcaaggggagatgaagtttgaggtggaaaacctcatcctacacaaggactacagcgctgacacgcttgctcaccacaacgacattgccttgctgaagatccgttccaaggagggcaggtgtgcgcagccatcccggactatacagaccatctgcctgccctcgatgtataacgatccccagtttggcacaagctgtgagatcactggctttggaaaagagaattctaccgactatctctatccggagcagctgaaaatgactgttgtgaagctgatttcccaccgggagtgtcagcagccccactactacggctctgaagtcaccaccaaaatgctgtgtgctgctgacccacagtggaaaacagattcctgccagggagactcagggggacccctcgtctgttccctccaaggccgcatgactttgactggaattgtgagctggggccgtggatgtgccctgaaggacaagccaggcgtctacacgagagtctcacacttcttaccctggatccgcagtcacaccaaggaagagaatggcctggccctctgagggtccccagggaggaaacgggcaccacccgctttcttgctggttgtcatttttgcagtagagtcatctccatcagctgtaagaagagactgggaagataggctctgcacagatggatttgcctgtgccacccaccagggcgaacgacaatagctttaccctcaggcataggcctgggtgctggctgcccagacccctctggccaggatggaggggtggtcctgactcaacatgttactgaccagcaacttgtctttttctggactgaagcctgcaggagttaaaaagggcagggcatctcctgtgcatgggtgaagggagagccagctcccccgacggtgggcatttgtgaggcccatggttgagaaatgaataatttcccaattaggaagtgtaacagctgaggtctcttgagggagcttagccaatgtgggagcagcggtttggggagcagagacactaacgacttcagggcagggctctgatattccatgaatgtatcaggaaatatatatgtgtgtgtatgtttgcacacttgtgtgtgggctgtgagtgtaagtgtgagtaagagctggtgtctgattgttaagtctaaatatttccttaaactgtgtggactgtgatgccacacagagtggtctttctggagaggttataggtcactcctggggcctcttgggtcccccacgtgacagtgcctgggaatgtattattctgcagcatgacctgtgaccagcactgtctcagtttcactttcacatagatgtccctttcttggccagttatcccttccttttagcctagttcatccaatcctcactgggtggggtgaggaccactcctgtacactgaatatttatatttcactatttttatttatatttttgtaattttaaataaaagtgatcaataaaatgtgatttttctga

SEQ ID NO: 2969 - protein, 431 aa, Homo sapiens
MRALLARLLLCVLVVSDSKGSNELHQVPSNCDCLNGGTCVSNKYFSNIHWCNCPKKFGGQHCEIDKSKTCYEGNGHFYRGKASTDTMGRPCLPWNSATVLQQTYHAHRSDALQLGLGKHNYCRNPDNRRRPWCYVQVGLKLLVQECMVHDCADGKKPSSPPEELKFQCGQKTLRPRFKIIGGEFTTIENQPWFAAIYRRHRGGSVTYVCGGSLISPCWVISATHCFIDYPKKEDYIVYLGRSRLNSNTQGEMKFEVENLILHKDYSADTLAHHNDIALLKIRSKEGRCAQPSRTIQTICLPSMYNDPQFGTSCEITGFGKENSTDYLYPEQLKMTVVKLISHRECQQPHYYGSEVTTKMLCAADPQWKTDSCQGDSGGPLVCSLQGRMTLTGIVSWGRGCALKDKPGVYTRVSHFLPWIRSHTKEENGLAL

SEQ ID NO: 2970 - DNA, 693 bp, Homo sapiens
gcggatcatccgcttccggagtcgaggttttcgggcttgtaccgcttggcggtgcggcctggtgtcggcttgcaggttctttctgtgtttgttctctgccctgccaaggccgtagagctggtgcgtgcgggtagcggggctctccgaggagccgcacgccggcggcaccatggtccacctcactactctcctctgcaaggcctaccgtgggggccacttaaccatccgccttgccctgggtggctgcaccaatcggccgttctaccgcattgtggctgctcacaacaagtgtcccagggatggccgtttcgtagagcagctgggctcctatgatccattgcccaacagtcatggagaaaaactcgttgccctcaacctagacaggatccgtcattggattggctgcggggcccacctctctaagcctatggaaaagcttctgggtcttgctggctttttccctctgcatcctatgatgatcacaaatgctgagagactgcgaaggaaacgggcacgtgaagtcctgttagcttctcagaaaacagatgcagaagctacagatacagaggctacagaaacataaatgagctgactttagtgagcatagcagtgggaacaaggtcaaggtccttttgaaacactgcagcgatcttaattttgttagatttggagttcaataaatggagtatcctg

SEQ ID NO: 2971 - DNA, 1760 bp, Homo sapiens
gcagcaggccaagggggaggtgcgagcgtggacctgggacgggtctgggcggctctcggtggttggcacgggttcgcacacccattcaagcggcaggacgcacttgtcttagcagttctcgctgaccgcgctagctgcggcttctacgctccggcactctgagttcatcagcaaacgccctggcgtctgtcctcaccatgcctagcctttgggaccgcttctcgtcgtcgtccacctcctcttcgccctcgtccttgccccgaactcccaccccagatcggccgccgcgctcagcctgggggtcggcgacccgggaggaggggtttgaccgctccacgagcctggagagctcggactgcgagtccctggacagcagcaacagtggcttcgggccggaggaagacacggcttacctggatggggtgtcgttgcccgacttcgagctgctcagtgaccctgaggatgaacacttgtgtgccaacctgatgcagctgctgcaggagagcctggcccaggcgcggctgggctctcgacgccctgcgcgcctgctgatgcctagccagttggtaagccaggtgggcaaagaactactgcgcctggcctacagcgagccgtgcggcctgcggggggcgctgctggacgtctgcgtggagcagggcaagagctgccacagcgtgggccagctggcactcgaccccagcctggtgcccaccttccagctgaccctcgtgctgcgcctggactcacgactctggcccaagatccaggggctgtttagctccgccaactctcccttcctccctggcttcagccagtccctgacgctgagcactggcttccgagtcatcaagaagaagctgtacagctcggaacagctgctcattgaggagtgttgaacttcaacctgagggggccgacagtgccctccaagacagagacgactgaacttttggggtggagactagaggcaggagctgagggactgattccagtggttggaaaactgaggcagccacctaaggtggaggtgggggaatagtgtttcccaggaagctcattgagttgtgtgcgggtggctgtgcattggggacacatacccctcagtactgtagcatggaacaaaggcttaggggccaacaaggcttccagctggatgtgtgtgtagcatgtaccttattatttttgttactgacagttaacagtggtgtgacatccagagagcagctgggctgctcccgccccagcctggcccagggtgaaggaagaggcacgtgctcctcagagcagccggagggaggggggaggtcggaggtcgtggaggtggtttgtgtatcttactggtctgaagggaccaagtgtgtttgttgtttgttttgtatcttgtttttctgatcggagcatcactactgacctgttgtaggcagctatcttacagacgcatgaatgtaagagtaggaaggggtgggtgtcagggatcacttgggatctttgacacttgaaaaattacacctggcagctgcgtttaagccttcccccatcgtgtactgcagagttgagctggcaggggaggggctgagagggtgggggctggaacccctccccgggaggagtgccatctgggtcttccatctagaactgtttacatgaagataagatactcactgttcatgaatacacttgatgttcaagtattaagacctatgcaatattttttacttttctaataaacatgtttgttaaaacaaaaaaaaaaaaaaaaa

SEQ ID NO: 2972 - protein, 232 aa, Homo sapiens
MPSLWDRFSSSSTSSSPSSLPRTPTPDRPPRSAWGSATREEGFDRSTSLESSDCESLDSSNSGFGPEEDTAYLDGVSLPDFELLSDPEDEHLCANLMQLLQESLAQARLGSRRPARLLMPSQLVSQVGKELLRLAYSEPCGLRGALLDVCVEQGKSCHSVGQLALDPSLVPTFQLTLVLRLDSRLWPKIQGLFSSANSPFLPGFSQSLTLSTGFRVIKKKLYSSEQLLIEEC

SEQ ID NO: 2973 - DNA, 2746 bp, Homo sapiens
cgcattgcagactgcggagtcagacggcgctatgtacgccctcttcctcctggccagcctcctgggcgcggctctagccggcccggtccttggactgaaagaatgcaccaggggctcggcagtgtggtgccagaatgtgaagacggcgtccgactgcggggcagtgaagcactgcctgcagaccgtttggaacaagccaacagtgaaatcccttccctgcgacatatgcaaagacgttgtcaccgcagctggtgatatgctgaaggacaatgccactgaggaggagatccttgtttacttggagaagacctgtgactggcttccgaaaccgaacatgtctgcttcatgcaaggagatagtggactcctacctccctgtcatcctggacatcattaaaggagaaatgagccgtcctggggaggtgtgctctgctctcaacctctgcgagtctctccagaagcacctagcagagctgaatcaccagaagcagctggagtccaataagatcccagagctggacatgactgaggtggtggcccccttcatggccaacatccctctcctcctctaccctcaggacggcccccgcagcaagccccagccaaaggataatggggacgtttgccaggactgcattcagatggtgactgacatccagactgctgtacggaccaactccacctttgtccaggccttggtggaacatgtcaaggaggagtgtgaccgcctgggccctggcatggccgacatatgcaagaactatatcagccagtattctgaaattgctatccagatgatgatgcacatgcaacccaaggagatctgtgcgctggttgggttctgtgatgaggtgaaagagatgcccatgcagactctggtccccgccaaagtggcctccaagaatgtcatccctgccctggaactggtggagcccattaagaagcacgaggtcccagcaaagtctgatgtttactgtgaggtgtgtgaattcctggtgaaggaggtgaccaagctgattgacaacaacaagactgagaaagaaatactcgacgcttttgacaaaatgtgctcgaagctgccgaagtccctgtcggaagagtgccaggaggtggtggacacgtacggcagctccatcctgtccatcctgctggaggaggtcagccctgagctggtgtgcagcatgctgcacctctgctctggcacgcggctgcctgcactgaccgttcacgtgactcagccaaaggacggtggcttctgcgaagtgtgcaagaagctggtgggttatttggatcgcaacctggagaaaaacagcaccaagcaggagatcctggctgctcttgagaaaggctgcagcttcctgccagacccttaccagaagcagtgtgatcagtttgtggcagagtacgagcccgtgctgatcgagatcctggtggaggtgatggatccttccttcgtgtgcttgaaaattggagcctgcccctcggcccataagcccttgttgggaactgagaagtgtatatggggcccaagctactggtgccagaacacagagacagcagcccagtgcaatgctgtcgagcattgcaaacgccatgtgtggaactaggaggaggaatattccatcttggcagaaaccacagcattggtttttttctacttgtgtgtctgggggaatgaacgcacagatctgtttgactttgttataaaaatagggctcccccacctcccccatttctgtgtcctttattgtagcattgctgtctgcaagggagcccctagcccctggcagacatagctgcttcagtgccccttttctctctgctagatggatgttgatgcactggaggtcttttagcctgcccttgcatggcgcctgctggaggaggagagagctctgctggcatgagccacagtttcttgactggaggccatcaaccctcttggttgaggccttgttctgagccctgacatgtgcttgggcactggtgggcctgggcttctgaggtggcctcctgccctgatcagggaccctccccgctttcctgggcctctcagttgaacaaagcagcaaaacaaaggcagttttatatgaaagattagaagcctggaataatcaggctttttaaatgatgtaattcccactgtaatagcatagggattttggaagcagctgctggtggcttgggacatcagtggggccaagggttctctgtccctggttcaactgtgatttggctttcccgtgtctttcctggtgatgccttgtttggggttctgtgggtttgggtgggaagagggccatctgcctgaatgtaacctgctagctctccgaaggccctgcgggcctggcttgtgtgagcgtgtggacagtggtggccgcgctgtgcctgctcgtgttgcctacatgtccctggctgttgaggcgctgcttcagcctgcacccctcccttgtctcatagatgctccttttgaccttttcaaataaatatggatggcgagctcctaggcctctggcttcctggtagagggcggcatgccgaagggtctgctgggtgtggattggatgctggggtgtgggggttggaagctgtctgtggcccacttgggcacccacgcttctgtccacttctggttgccaggagacagcaagcaaagccagcaggacatgaagttgctattaaatggacttcgtgatttttgttttgcactaaagtttctgtgatttaacaataaaattctgttagcc

SEQ ID NO: 2974 - protein, 524 aa, Homo sapiens
MYALFLLASLLGAALAGPVLGLKECTRGSAVWCQNVKTASDCGAVKHCLQTVWNKPTVKSLPCDICKDVVTAAGDMLKDNATEEEILVYLEKTCDWLPKPNMSASCKEIVDSYLPVILDIIKGEMSRPGEVCSALNLCESLQKHLAELNHQKQLESNKIPELDMTEVVAPFMANIPLLLYPQDGPRSKPQPKDNGDVCQDCIQMVTDIQTAVRTNSTFVQALVEHVKEECDRLGPGMADICKNYISQYSEIAIQMMMHMQPKEICALVGFCDEVKEMPMQTLVPAKVASKNVIPALELVEPIKKHEVPAKSDVYCEVCEFLVKEVTKLIDNNKTEKEILDAFDKMCSKLPKSLSEECQEVVDTYGSSILSILLEEVSPELVCSMLHLCSGTRLPALTVHVTQPKDGGFCEVCKKLVGYLDRNLEKNSTKQEILAALEKGCSFLPDPYQKQCDQFVAEYEPVLIEILVEVMDPSFVCLKIGACPSAHKPLLGTEKCIWGPSYWCQNTETAAQCNAVEHCKRHVWN

SEQ ID NO: 2975 - DNA, 335 bp, Homo sapiens
gtgtctttcctggtgatgccttgtttggggttctgtgggtttgggtgggaagagggccatctgcctgaatgtaacctgctagctctccgaaggccctgcgggcctggcttgtgtgagcgtgtggacagtggtggccgcgctgtgcctgctcgtgttgcctacatgtccctggctgttgaggcgctgcttcagcgcacccacgcttctgtccacttctggttgccaggagacagcaagcaaagccagcaggacatgaagttgctattaaatggacttcgtgatttttgttttgcactaaagtttctgtgatttaacaataaaattctgttagccag

SEQ ID NO: 2976 - DNA, 907 bp, Homo sapiens
agactaaagacattaaagagatagccaaaaagacacaagccctgccaaagatgaactcaaagaggcagcgaatcgtgatcttcacccaagggagagatgacactataatggctacagaaagtgaagtcactgcttttgctgtcttggatcaagaccagaaagaaattattgataccaatggagctggagatgcatttgttggaggttttctgtctcaactggtctctgacaagcctctgactgaatgtatccgtgctggccactatgcagcaagcatcataattagacggactggctgcacctttcctgagaagccagacttccactgatggaagagctgaaaacacaagcccaggagtgcagacactgccctaattgcttcctgagaattcccatattaataaagaagaaaattatctgccattttttcctactataataatgctgaatcttaatttagagggtacaagggtatggtaatgcttgtagaatctttattatctcaacaatctaaaaaatgatgtttatttccatagtttgatagtgccacttaaatgccaattaaacaagaatataacatttcaatagaaatttttatttcattttcaattactttgtaaattcgtgtgtatttagtacactgatttgtttttttacatttctgctttgaatgcagatgcaatttaatataatagattttttaatgaattaatcttaacatagtaatctttagctttttatacaaatatatttaatttaggagtatatgtgtgtctatacacacacatacataaatataccacatatacacctgatagtcaaataaggtacagaaattttatcttgtcaattatgccaaataatctctttaatgtgcactcaaacatgtaataaactttggataatt

SEQ ID NO: 2977 - DNA, 1565 bp, Homo sapiens
agcctgaacctctaggacttttaattgataccagtggtctccgctctgaaacagtccaccagaatgagggtaccaaactgacctcagaggtttccaggtttgatgaacttgtgaaaaaattcaaagtcgaatatcatgctggtggctctacccagaattcaattaaagtggctcagaatctggagagcctgtcttgtttgcccggacagatacccctcttccagcagatctctgcacagaattattttcagaccacagcaagaagggtcagagctgagaatggaccacctgaggatctgctgtgggatggagcaggaacctgcttaggtggtaccaatcttgacttccagatggaacagtacatctctataaggaaaagtgatggcatccacatcgtaaatctgaagaggacctgggagaagcttctgctggcagcttgtgccattgttgccattgaaaaccctgctgatgtcagtgttatatcctccaggaatattggccaaagggctgtgctgaagtttgctgctgccactggagccactccaattgttggccacttcactcctggaaccttcactaaccacatccaggcagccttccaagagccacggcttcttgtggttactgaccccagggctgaccaccagcctctcacagaggcatcttacgttaacctatctaccgttgctttgtgtaacacagattctcctctgcactttgtggacattgccattctatgcaacaataagggagctcactcaatgggtttgatgtggtggatgccagcccgggaaggtttgcgcgcgtgtggcaccatttcccatgaacacccatgggaattcatgcctgatctctacagagatcctaaagagactgaaaaagcagagcagcctgctgctgaaaaggctgtgaccaaggaggaatttcagggtgaatggactgctccagctcctgagttaactgctactcagcctgaggttgcagactggtctgaaggtgtgcaggtgccctctgcgcctattcatcagttccctactgaagactggagtgctgagcctgccacggaaggctggtccacagctcccaatgctcaggccattgaatggtggatgattcaacagccacacaaagcagcaacattttttggatgcattgggatagataaatttggggagatcctgaagagaaaagctgctgaagcccatgtggatgctcattactacgagcagaatgagcagccaacaggaacttgtgctgcatgcatcactggtgacaacaggtccctcatagctaatcttgctgctgccaattgttataaaaaggaaaaacatcttgatctggagaaaaactggatgttggtagaaaaagcaagagtttgttatatagcaggtgtgataaagcatattactagaaaagcatcaatcggtctttcaggtacaataccagaggaaccatcacagtttatttacctttcagaagctttaaaaataaagttacatgatgcctctgctctccagatttctaatcaaaccctggaacaaaagagccaagcacattctatctga

SEQ ID NO: 2978 - DNA, 537 bp, Homo sapiens
cttttcctccttggctgtctgaagatagatcgccatcatgaacgacaccgtaactatccgcactagaaagttcatgaccaaccgactacttcagaggaaacaaatggtcattgatgtccttcaccccgggaaggcgacagtgcctaagacagaaattcgggaaaaactagccaaaatgtacaagaccacaccggatgtcatctttgtatttggattcagaactcattttggtggtggcaagacaactggctttggcatgatttatgattccctggattatgcaaagaaaaatgaacccaaacatagacttgcaagacatggcctgtatgagaagaaaaagacctcaagaaagcaacgaaaggaacgcaagaacagaatgaagaaagtcagggggactgcaaaggccaatgttggtgctggcaaaaagtgagctggagattggatcacagccgaaggagtaaaggtgctgcaatgatgttagctgtggccactgtggatttttcgcaagaacattaataaactaaaaacttcatgtgt

SEQ ID NO: 2979 - protein, 130 aa, Homo sapiens
MNDTVTIRTRKFMTNRLLQRKQMVIDVLHPGKATVPKTEIREKLAKMYKTTPDVIFVFGFRTHFGGGKTTGFGMIYDSLDYAKKNEPKHRLARHGLYEKKKTSRKQRKERKNRMKKVRGTAKANVGAGKK

SEQ ID NO: 2980 - DNA, 515 bp, Rattus norvegicus
cttttcctccttggctgtctgaagatagatcgccatcatgaacgacaccgtaactatccgcactagaaagttcatgaccaaccgactacttcagaggaaacaaatggtcattgatgtccttcaccccgggaaggcgacagtgcctaagacagaaattcgggaaaaactagccaaaatgtacaagaccacaccggatgtcatctttgtatttggattcagaactcattttggtggtggcaagacaactggctttggcatgatttatgattccctggattatgcaaagaaaaatgaacccaaacatagacttgcaagacatggcctgtatgagaagaaaaagacctcaagaaagcaacgaaaggaacgcaagaacagaatgaagaaagtcagggggactgcaaaggccaatgttggtgctggcaaaaagccgaaggagtaaaggtgctgcaatgatgttagctgtggccactgtggatttttcgcaagaacattaataaactaaaaacttcatgtgt

SEQ ID NO: 2981 - protein, 133 aa, Rattus norvegicus [sequence omitted]

SEQ ID NO: 2982 - DNA, 1404 bp, Homo sapiens
gctgcagctgcagcagctggagggcgaagtgaaggagacaccgttccgcccgcggcctcgccatggcgacccacggacagacttgcgcgcgtccaatgtgtattcctccatcatatgctgaccttggcaaagttgccagagatattttcaacaaaggatttggttttgggttggtgaaactggatgtgaaaacaaagtcttgcagtggcgtggaattttcaacgtccggttcatctaatacagacactggtaaagttactgggaccttggagaccaaatacaagtggtgtgagtatggtctgactttcacagaaaagtggaacactgataacactctgggaacagaaatcgcaattgaagaccagatttgtcaaggtttgaaactgacatttgatactaccttctcaccaaacacaggaaagaaaagtggtaaaatcaagtcttcttacaagagggagtgtataaaccttggttgtgatgttgactttgattttgctggacctgcaatccatggttcagctgtctttggttatgagggctggcttgctggctaccagatgacctttgacagtgccaaatcaaagctgacaaggaataactttgcagtgggctacaggactggggacttccagctacacactaatgtcaatgatgggacagaatttggaggatcaatttatcagaaagtttgtgaagatcttgacacttcagtaaaccttgcttggacatcaggtaccaactgcactcgttttggcattgcagctaaatatcagttggatcccactgcttccatttctgcaaaagtcaacaactctagcttaattggagtaggctatactcagactctgaggcctggtgtgaagcttacactctctgctctggtagatgggaagagcattaatgctggaggccacaaggttgggctcgccctggagttggaggcttaatccagctgaaagaaacctttgggaatggatatcagaagatttggccttaatatatttccattgtgaccagcagcaggcttttttcccccaagaagatgatcaaaacaaaggatgatctcaacaagagctgtattttaagtatttagacagttctttgttagctggtttctagttggttatctagttaccaatgctgcagtcctgcagtcacctatacattatttaaatgtatttaactgttaaatgcgctacccaccaataatgaaatagacctttatgaaaactgtgcaattgtgtgcatgtttgtttttatgttcctttagaaaacattgactgttaccattgaatgagatggatcagtggatattaagatgaggttacaaattttgttaagttcagccattattacttttggtatcccagaacatgacaaattatgaataaaacaagtatacat

SEQ ID NO: 2983 - protein, 294 aa, Homo sapiens
MATHGQTCARPMCIPPSYADLGKVARDIFNKGFGFGLVKLDVKTKSCSGVEFSTSGSSNTDTGKVTGTLETKYKWCEYGLTFTEKWNTDNTLGTEIAIEDQICQGLKLTFDTTFSPNTGKKSGKIKSSYKRECINLGCDVDFDFAGPAIHGSAVFGYEGWLAGYQMTFDSAKSKLTRNNFAVGYRTGDFQLHTNVNDGTEFGGSIYQKVCEDLDTSVNLAWTSGTNCTRFGIAAKYQLDPTASISAKVNNSSLIGVGYTQTLRPGVKLTLSALVDGKSINAGGHKVGLALELEA

SEQ ID NO: 2984 - DNA, 4251 bp, Homo sapiens
agccttgttgtcctcctggtgcgaagagctcggccgcctgctgctgctccgacatcagaagagccgccagagcgatccccctgggaaactccccatgcagccccctctcagctccatgagctccatgaaacccactctgtcgcacagtgatgggtcgttcccctatgactctgtcccttggcagcagaacaccaaccagcctcccggctccctttccgtggtcaccacggtttggggagtaaccaacacatcccagagccaggtccttgggaaccctatggccaatgccaacaaccccatgaatccaggcggcaaccccatggcgtcgggcatgaccaccagcaacccaggcctcaactccccacagtttgcggggcagcagcagcagttctcagccaaggctggccccgctcagccctacatccagcagagcatgtatggccggcccaactaccccggcagcgggggctttggggccagttaccctgggggtcctaacgcccccgcaggcatgggcatccctccgcacaccaggccgcctgctgacttcactcagcccgcggcagccgctgcagcagcggcagtggcagcagcagcagccacagctacagccacagccacggccactgtggcagccctgcaggagacacagaacaaggatataaaccagtatggaccggtctgttcctctttccagatgggtcccacccaggcgtataacagccaattcatgaaccagcccgggccgcgggggcctgcctccatggggggcagcatgaaccccgcgagcatggcggctggcatgacgccctcggggatgagcggccctcccatgggcatgaaccagccccggccgcccggcatcagcccctttggcacacacgggcagcggatgccccagcagacctacccgggcccccggccccagtcccttcctattcagaacataaagaggccataccctggagaggtgagtgcagcagtgggagcctgggaggtgggaactgggacacctgggcttgaagacatgggccgtgggtacggctttggaaggggtgtggcttggactccagcacacttggacaaagaggcaggggcttaggggtcaggtgctcctgggtttgagacctggttctgctgtttcccaactgaaagacctcgagccagtcaccctgcctcctagggctgcttgagggacttgaggaggtgtccgtgaagtgcttggccctgggctggcatgtgccgccactcagcaagcagcagttcctcttactgtagtgactcttgtcttggctcagccactaactgggtgacctgggtttagttcctcctgcccacatgagagcttccccaactcctctccaagaaagagagctgagacaaaatgcttccagtctataagggctgacccgtccgggaagtgactggaaggcaggcagcgtgtttccagtctgtaaggattgacctgttggggaagtgactggaaggcagagagcgtgtttccaatctataaggactgacccgttggggaagtgactggaaggccggcagctgtttccagtctataaggactgacccgtcagggaagtgactggaaggcagacagcgtgtttcttagctcttgtttccatccacacttggtcactgtataggaagtggcactgcctcttgggctgcacagccagctcagccaaggtgttggggaagatttggggaagtaaaacccacacctcctgccctctgggaagtgaggttttagcaggaaagaaaagtttttagcagagactcaccagggaatgaagcatagcagactgcacagaactcaatatgagtcagagaaggcaggcttcctggagggtgtgtcacaagtaaatcctcagaaaatgatgctggcagcagctggcccatctgggtacccaggtaaggatttagtttacctgcagaagacgtagggacgtggctctgcagatgcccctcgtgaagccctggttgctccccacgaccaagcccctttttgagcagggtgtgcccagctctctgcctgcctccctcccagcttgcatgcccactctcagagcagttttctcctcctagctcctctcagctctgtggccttcaccttgggttcacagcggctttagattccaaagaccttaagttccttgaagatctgcacatttcccctcagtatccaccttaggatgggcggggaggcttggcaacaagtggaggtattctgagttcaggaggggagagagaggggggggggtcaggggcttcctcatgcatccaagaagctggatcaagccccaaccctccacctggtggacactagttcagggaggggccagagaaggaccattggctcctgggtcctgagtttgggggagcctcaagctattggcacctctcctggcactcaggccccatgcagtttctaggccttttctcagccaccctgtgctcaaaatcccagtgtcccactggctgtgctgggggtgcatctgttagcccacgccaaaggaggcaatctcggatgaggcttcagcagaattcctggtcattggtgtcacccctgcacctgcacctgtgccatgcttatggctcttgcctgcctaaagagagcacaccaaaggctctccatatttttactaaattaatcatccttttcatagagtgctgctgctacccagctacagcactgggtggtcacagcctatgcggcctgatcctgtctggaagactggccttccttccccttgccatggcttgttcatacaatatttgaattgttggagccttaggacaggggttgggtcatctggtcccacagaggactctcttctctagcttggtgggcaggtaggcaccagctacgtcttctatacctcctgtggtgggtgcctcactgtcacccagagcagccaccatgttgcaacaacgtgagttgtagattcttccacactgacactttctgacatttatccctaagtccatcattcgtttgttgagcaagtattaagggtattttcccaggcactggggcacagccaccaacaggacctctgggcaagagagacactcagatggggaagaagaaaccactgactcacaggatgtcatgtggccgtgagggtcacctgattttccagacagggaaggtggctggagggtggtgctctctcctcttctctaaattgtctgtcccgggagaagttgtcttgttccttcaccaacctggctctcccacctcctgcacaggtggcaggttgtcgatggcccagaactgaacactaggtgtgtgttctgctctgaggggagtacgaggacaatgccacccaagttcagccttggaatgcaggggcacagggggctcctttctggaattgcatcctgttgactgtgttcctctgtcacattggggtacacattggggagcacagccctaacccaggcaccaggagagacacaaaggtcgggggagttagaatcaggcccctcataatggtgtgagcaagaggctctgaaagtgtccctggagttcaggggcacatgtgctccaggaagaacggcctcaaggggaggtggcctatgatctggacaggcagaacaaaatgcccctggatgtcaggacgagaaggggcccaaagcattatctggttttgtgggtgggaaacagcaggagcaaatgaggagaggcgggccccatcccgttgttcaggtgacctggctatgtgacgttggcaacattgaacgtgttcccctctcctttctctcccaccacagcccaactatggaaaccagcaatatggaccaaacagccagttccccacccagccaggccagtacccagcccccaaccccccgaggccactcacctcccccaactacccaggacagaggatgcccagccagccgagctccgggcagtacccgccccccacggtcaacatggggcagtattacaaggtgagtcccagcctcgccaccacccacggggccccttccctcctaaccacctcactcccctaactccaccgggatcactctgaccctgcgtgtgtttgccccaaggacagcgaggggtgggtgatttctgaacgtccccatgtgttcagggcgaagttcggtggccagaatgtcagagtggcttttctcagttcctattctcattcgtctcggatgatggtttttttttctccttttcttattcacggcactcacaaaataataaaggaaatatattttatt

SEQ ID NO: 2985 - protein, 459 aa, Homo sapiens
MNSMDRHIQQTNDRLQCIKQHLQNPANFHNAATELLDWCGDPRAFQRPFEQSLMGCLTVVSRVAAQQGFDLDLGYRLLAVCAANRDKFTPKSAALLSSWCEELGRLLLLRHQKSRQSDPPGKLPMQPPLSSMSSMKPTLSHSDGSFPYDSVPWQQNTNQPPGSLSVVTTVWGVTNTSQSQVLGNPMANANNPMNPGGNPMASGMTTSNPGLNSPQFAGQQQQFSAKAGPAQPYIQQSMYGRPNYPGSGGFGASYPGGPNAPAGMGIPPHTRPPADFTQPAAAAAAAAVAAAAATATATATATVAALQETQNKDINQYGPVCSSFQMGPTQAYNSQFMNQPGPRGPASMGGSMNPASMAAGMTPSGMSGPPMGMNQPRPPGISPFGTHGQRMPQQTYPGPRPQSLPIQNIKRPYPGEVSAAVGAWEVGTGTPGLEDMGRGYGFGRGVAWTPAHLDKEAGA

SEQ ID NO: 2986 - DNA, 1591 bp, Homo sapiens
tctgggcgcgcgcgacgtcagtttgagttctgtgttctccccgcccgtgtcccgcccgacccgcgcccgcgatgctggcgctgcgctgcggctcccgctggctcggcctgctctccgtcccgcgctccgtgccgctgcgcctccccgcggcccgcgcctgcagcaagggctccggcgacccgtcctcttcctcctcctccgggaacccgctcgtgtacctggacgtggacgccaacgggaagccgctcggccgcgtggtgctggagctgaaggcagatgtcgtcccaaagacagctgagaacttcagagccctgtgcactggtgagaagggcttcggctacaaaggctccaccttccacagggtgatcccttccttcatgtgccaggcgggcgacttcaccaaccacaatggcacaggcgggaagtccatctacggaagccgctttcctgacgagaactttacactgaagcacgtggggccaggtgtcctgtccatggctaatgctggtcctaacaccaacggctcccagttcttcatctgcaccataaagacagactggttggatggcaagcatgttgtgttcggtcacgtcaaagagggcatggacgtcgtgaagaaaatagaatctttcggctctaagagtgggaggacatccaagaagattgtcatcacagactgtggccagttgagctaatctgtggccagggtgctggcatggtggcagctgcaaatgtccatgcacccaggtggccgcgttgggctgtcagccaaggtgcctgaaacgatacgtgtgcccactccactgtcacagtgtgcctgaggaaggctgctagggatgttagacctcggccaggacccaccacattgcttcctaatacccacccttcctcacgacctcatttctgggcatctttgtggacatgatgtcacccaccccttgtcaagcattgcctgtgattgcccagcccagattcatctgtgccttggacatggtgatggtgatgggttgccatccaagtgaaagtcttttccttgaccaagggggacagtcagttttgcaaaaggactctaatacctgtttaatattgtcttcctaattgggataatttaattaacaagattgactagaagtgaaactgcaacactaacttccccgtgctgtggtgtgacctgagttggtgacacaggccacagaccccagagcttggcttttgaaacacaactcagggcttttgtgaaggttcccccgctgagatctttcctcctggttactgtgaagcctgttggtttgctgctgtcgtttttgaggagggcccatgggggtaggagcagttgaacctgggaacaaacctcacttgagctgtgcctagacaatgtgaattcctgtgttgctaacagaagtggcctgtaagctcctgtgctccggagggaagcatttcctggtaggctttgatttttctgtgtgttaaagaaattcaatctactcatgatgtgttatgcataaaacatttctggaacatggatttgtgttcaccttaaatgtgaaaataaatcctattttctatggaaaaaaaaaaaaaaaaaaaaaaa

SEQ ID NO: 2987 - protein, 207 aa, Homo sapiens
MLALRCGSRWLGLLSVPRSVPLRLPAARACSKGSGDPSSSSSSGNPLVYLDVDANGKPLGRVVLELKADVVPKTAENFRALCTGEKGFGYKGSTFHRVIPSFMCQAGDFTNHNGTGGKSIYGSRFPDENFTLKHVGPGVLSMANAGPNTNGSQFFICTIKTDWLDGKHVVFGHVKEGMDVVKKIESFGSKSGRTSKKIVITDCGQLS

SEQ ID NO: 2988 - DNA, 2016 bp, Homo sapiens
atgaggagcaggagcacacgtccagaaccaaagcagagcggtgtccacgccactgcaagcagcaggtccagatcccacattcccacaggagccatggcaaaggcctgtgagcctggggcagctccaccccaagaatcagggtccccagtgcaccgggactccgctccaaggaggaatgcaaccagttccagggggaacggccagtgtgttgcacggtggatgtgctcaagctcccgtttgctcatcagcgggaaacacagggtcacagaggcaccgcagggtggagagaggcagggactgggaatgaaaccacaaactctcccagatgctgacgttgctgcctcacagtcaccacagtccatggccctgggctgctggactcatggtgcactcagagctatcactggagcccgtggctttggggagtgctctcctagatggcctagtcttgataatgatagtaatggggacagtaatctgcagcccatcaccctcacaaccgccctgcaagctcccctgaacagcgtgacctcccgtccatccagcagcctctttacgtgtgagctgcaggaccagctccaatgccccgaggacactcacatgaggaagcacgaaagcgcttcggtgtcaggactctggggaagagggcgcctggagcctgccagacgaggggggcctgagttaggaccaaggtctgcgcctgagcggccttcacaggccccacctctgtcctcatctggacaaagacgttggaagccccggccccactcgggctgcagccatcctgttctgtcaccagagaccctgtcagcctcacaggcatctcccaagccatgggtcagggatgagtctctcagcggcctggtggtcctcagcgtgctcagcaacaggcttacctccattcgaagccatcccctcaggctgggcactgaccaccgccgtctggcagtttccgcaataagaaaagccaagggagccttgaggcgggcgaggttccagcgcgaggccggccgccctcaaccgctcccagcgccagttgcggcggttgatggcagggagacgcgcagcgcgagagcaaagggcggtgacccaacggccttcgctctcatggcgtccttcttggtgttacctaaaaataaagccaagggtgatcagaagcgagggacgctggccttctcgcggctttcccccgatatctctctttattccagctgcctgaaactcggtcccacgaatggcaggcagcgtccaaaattcaaccccgtaaagccagcaccagccaataaagcgcacggatggaggccacgtgacagcagtgggccggccctccggctgagccctgatctctatggtttccgcggctcgctagaaggagtgtggtccaccggaggactccctacattcttcctccattacctcactgcctccggtggctgctgggataccggaggactcggcgcgtccggcccgcccgcaggccagcttctctcgggagcccccacccaggcgcatggctccatgaagcaagaggaggaggcagagcgcgagaggtcccgtccgccccagccgcgtctgggccaggataaaagagaccccgcggtcctggggcgagggtccgggggcagccaaaaccatattcctgctgctgtcagttatgatgcactgagaaaacttcagagacctaaactttttccagagaagagaagctttactggtgttccagccctaagcattgacttcactaatggatgtgacctggttggcagcagtagcttgcacaacatgcttgtttgcaaaacctttgttcaagaaaacggcagatgctctgttgaatccactggagattgttctgatactaaggacaagtatgctcatatgacattaacagacaagacacttttcagaaagacagttgctaatggtaatgatgaaaataatgtcatcatcaggtattatttagctattggaagaaaccactcggtgtcgagttcatcaaggaatctgtcacagatgtga

SEQ ID NO: 2989 - protein, 423 aa, Homo sapiens
MSRNEINAIQRECKTCNLRILCFRINPPKQGCYLGAWTAGLYYRKLGVIVADALVSQRHGHGGSNEGALSGPRKHPGALRRARFQREAGRPQPLPAPVAAVDGRETRSARAKGGDPTAFALMASFLVLPKNKAKGDQKRGTLAFSRLSPDISLYSSCLKLGPTNGRQRPKFNPVKPAPANKAHGWRPRDSSGPALRLSPDLYGFRGSLEGVWSTGGLPTFFLHYLTASGGCWDTGGLGASGPPAGQLLSGAPTQAHGSMKQEEEAERERSRPPQPRLGQDKRDPAVLGRGSGGSQNHIPAAVSYDALRKLQRPKLFPEKRSFTGVPALSIDFTNGCDLVGSSSLHNMLVCKTFVQENGRCSVESTGDCSDTKDKYAHMTLTDKTLFRKTVANGNDENNVIIRYYLAIGRNHSVSSSSRNLSQM

SEQ ID NO: 2990 - DNA, 1958 bp, Homo sapiens
gctgctgcgcccgcggctccccagtgccccgagtgccccgcgggccccgcgagcgggagtgggacccagccctaggcagaacccaggcgccgcgcccgggacgcccgcggagagagccactcccgcccacgtcccatttcgcccctcgcgtccggagtccccgtggccagatctaaccatgagctaccctggctatcccccgcccccaggtggctacccaccagctgcaccaggtggtggtccctggggaggtgctgcctaccctcctccgcccagcatgccccccatcgggctggataacgtggccacctatgcggggcagttcaaccaggactatctctcgggaatggcggccaacatgtctgggacatttggaggagccaacatgcccaacctgtaccctggggcccctggggctggctacccaccagtgccccctggcggctttgggcagcccccctctgcccagcagcctgttcctccctatgggatgtatccacccccaggaggaaacccaccctccaggatgccctcatatccgccatacccaggggcccctgtgccgggccagcccatgccaccccccggacagcagcccccaggggcctaccctgggcagccaccagtgacctaccctggtcagcctccagtgccactccctgggcagcagcagccagtgccgagctacccaggatacccggggtctgggactgtcacccccgctgtgcccccaacccagtttggaagccgaggcaccatcactgatgctcccggctttgaccccctgcgagatgccgaggtcctgcggaaggccatgaaaggcttcgggacggatgagcaggccatcattgactgcctggggagtcgctccaacaagcagcggcagcagatcctactttccttcaagacggcttacggcaaggatttgatcaaagatctgaaatctgaactgtcaggaaactttgagaagacaatcttggctctgatgaagaccccagtcctctttgacatttatgagataaaggaagccatcaagggggttggcactgatgaagcctgcctgattgagatcctcgcttcccgcagcaatgagcacatccgagaattaaacagagcctacaaagcagaattcaaaaagaccctggaagaggccattcgaagcgacacatcagggcacttccagcggctcctcatctctctctctcagggaaaccgtgatgaaagcacaaacgtggacatgtcactcgcccagagagatgcccaggagctgtatgcggccggggagaaccgcctgggaacagacgagtccaagttcaatgcggttctgtgctcccggagccgggcccacctggtagcagttttcaatgagtaccagagaatgacaggccgggacattgagaagagcatctgccgggagatgtccggggacctggaggagggcatgctggccgtggtgaaatgtctcaagaataccccagccttctttgcggagaggctcaacaaggccatgaggggggcaggaacaaaggaccggaccctgattcgcatcatggtgtctcgcagcgagaccgacctcctggacatcagatcagagtataagcggatgtacggcaagtcgctgtaccacgacatctcgggagatacttcaggggattaccggaagattctgctgaagatctgtggtggcaatgactgaacagtgactggtggctcacttctgcccacctgccggcaacaccagtgccaggaaaaggccaaaagaatgtctgtttctaacaaatccacaaatagccccgagattcaccgtcctagagcttaggcctgtcttccacccctcctgacccgtatagtgtgccacaggacctgggtcggtctagaactctctcaggatgccttttctaccccatccctcacagcctcttgctgctaaaatagatgtttcatttttctgaaaaaaa

SEQ ID NO: 2991 - protein, 505 aa, Homo sapiens
MSYPGYPPPPGGYPPAAPGGGPWGGAAYPPPPSMPPIGLDNVATYAGQFNQDYLSGMAANMSGTFGGANMPNLYPGAPGAGYPPVPPGGFGQPPSAQQPVPPYGMYPPPGGNPPSRMPSYPPYPGAPVPGQPMPPPGQQPPGAYPGQPPVTYPGQPPVPLPGQQQPVPSYPGYPGSGTVTPAVPPTQFGSRGTITDAPGFDPLRDAEVLRKAMKGFGTDEQAIIDCLGSRSNKQRQQILLSFKTAYGKDLIKDLKSELSGNFEKTILALMKTPVLFDIYEIKEAIKGVGTDEACLIEILASRSNEHIRELNRAYKAEFKKTLEEAIRSDTSGHFQRLLISLSQGNRDESTNVDMSLAQRDAQELYAAGENRLGTDESKFNAVLCSRSRAHLVAVFNEYQRMTGRDIEKSICREMSGDLEEGMLAVVKCLKNTPAFFAERLNKAMRGAGTKDRTLIRIMVSRSETDLLDIRSEYKRMYGKSLYHDISGDTSGDYRKILLKICGGND

SEQ ID NO: 2992 - DNA, 1220 bp, Homo sapiens
ggtagaggcggcggcggcggcggcggcgggctcggaggcagcggttgggctcgcggcgagcggacggggtcgagtcagtgccgtttgcgccagttggaatcgaagcctcttaaaatggcagatgatttggacttcgagacaggagatgcaggggcctcagccaccttcccaatgcagtgctcagcattacgtaagaatggctttgtggtgctcaaaggctggccatgtaagatcgtggagatgtctgcttcgaagactggcaagcacggccacgccaaggtccatctggttggtattgacatctttactgggaagaaatatgaagatatctgcccgtcaactcataatatggatgtccccaacatcagaaggaatgacttccagctgattggcatccaggatgggtacctatcactgctccaggacagcggggaggtaccagaggaccttcgtctccctgagggagaccttggcaaggagactgagcagaagtacgactgtggagaagagatcctgatcacggtgctgtctgccatgacagaggaggcagctgttgcaatcaaggccatggcaaaataactggctcccaaggtggcagtggtggcagcagtgatcctccgaacctgcagaggccccctcccccagcctggcctggctctggcctggtcctaggctggactcctcctacacaatttatttgacgttttattttggttttccccaccccctcaatctgtcagggagcccctgcccttcacctagctcccttggccaggagcgagcaaagccgtggccttggtgaagctgccctcctcttctcccctcacactacagccctggtgggggagaagggggtgggtgctgcttgtggtttagtttttttttttttttttttttaattcaatctggaatcagaaagcagtggattctggcaaatggtccttgtgccctccccactcatccttggtctggtcccctgttgcccatagccctttaccctgagcaccacccaacagactggggaccagccccctcgcctgcctgtgtctctccccaaacccctttagatggggagggaagaggaggagaggggaggggacctgccccctcctcaggcatctgggaaggccctgcccccatgggctttacccttccctgagggctctctccccgacacatttgttaaaatcaaacctgaataaaactacaagtttaatatg

SEQ ID NO: 2993 - protein, 154 aa, Homo sapiens [sequence omitted]

SEQ ID NO: 2994 - DNA, 691 bp, Homo sapiens
gtcagtgccgtttgcgccagttggaatcgaagcctcttaaaatggcagatgatttggacttcgagacaggagatgcaggggcctcagccaccttcccaatgcagtgctcagcattacgtaagaatggctttgtggtgctcaaaggctggccatgtaagatcgtggagatgtctgcttcgaagactggcaagcacggccacgccaaggtccatctggttggtattgacatctttactgggaagaaatatgaagatatctgcccgtcaactcataatatggatgtccccaacatcagaaggaatgacttccagctgattggcatccaggatgggtacctatcactgctccaggacagcggggaggtaccagaggaccttcgtctccctgagggagaccttggcaaggagactgagcagaagtacgactgtggagaagagatcctgatcacggtgctgtctgccatgacagaggaggcagctgttgcaatcaaggccatggcaaaataactggctcccaaggtggcagtggtggcagcagtgatcctctggcctggtcctaggctggactcctcctacacaatttatttgacgttttattttggttttccccaccccctcaatctgtcagggagcccctgcccttcacctagctcccttggccaggagcgagcaaagccgtggccttggtgaag

SEQ ID NO: 2995 - protein, 154 aa, Homo sapiens [sequence omitted]

SEQ ID NO: 2996 - DNA, 1278 bp, Homo sapiens
ggcacgaggaggtgtggacgctgtgtatgaaatgtctttcctccaggacccaagtttcttcaccatggggatgtggtccattggtgcaggagccctgggggctgctgccttggcattgctgcttgccaacacagacgtgtttctgtccaagccccagaaagcggccctggagtacctggaggatatagacctgaaaacactggagaaggaaccaaggactttcaaagcaaaggagctatgggaaaaaaatggagctgtgattatggccgtgcggaggccaggctgtttcctctgtcgagaggaagctgcggatctgtcctccctgaaaagcatgttggaccagctgggcgtccccctctatgcagtggtaaaggagcacatcaggactgaagtgaaggatttccagccttatttcaaaggagaaatcttcctggatgaaaagaaaaagttctatggtccacaaaggcggaagatgatgtttatgggatttatccgtctgggagtgtggtacaacttcttccgagcctggaacggaggcttctctggaaacctggaaggagaaggcttcatccttgggggagttttcgtggtgggatcaggaaagcagggcattcttcttgagcaccgagaaaaagaatttggagacaaagtaaacctactttctgttctggaagctgctaagatgatcaaaccacagactttggcctcagagaaaaaatgattgtgtgaaactgcccagctcagggataaccagggacattcacctgtgttcatgggatgtattgtttccactcgtgtccctaaggagtgagaaacccatttatactctactctcagtatggattattaatgtattttaatattctgtttaggcccactaaggcaaaatagccccaaaacaagactgacaaaaatctgaaaaactaatgaggattattaagctaaaacctgggaaataggaggcttaaaattgactgccaggctgggtgcagtggctcacacctgtaatcccagcactttgggaggccaaggtgagcaagtcacttgaggtcgggagttcgagaccagcctgagcaacatggcgaaaccccgtctctactaaaaatacaaaaatcacccgggtgtggtggcaggcacctgtagtcccagctacccgggaggctgaggcaggagaatcacttgaacctgggaggtggaggttgcggtgagctgagatcacaccactgtattccagcctgggtgactgagactctaactaaaaaaaaaaaaaaaaaaaaa

SEQ ID NO: 2997 - protein, 216 aa, Homo sapiens
MWSIGAGALGAAALALLLANTDVFLSKPQKAALEYLEDIDLKTLEKEPRTFKAKELWEKNGAVIMAVRRPGCFLCREEAADLSSLKSMLDQLGVPLYAVVKEHIRTEVKDFQPYFKGEIFLDEKKKFYGPQRRKMMFMGFIRLGVWYNFFRAWNGGFSGNLEGEGFILGGVFVVGSGKQGILLEHREKEFGDKVNLLSVLEAAKMIKPQTLASEKK

SEQ ID NO: 2998 - DNA, 2376 bp, Homo sapiens
gtcatgcagtgcgccggaggaactgtgctctttgaggccgacgctaggggcccggaagggaaactgcgaggcgaaggtgaccggggaccgagcatttcagatctgctcggtagacctggtgcaccaccaccatgttggctgcaaggctggtgtgtctccggacactaccttctagggttttccacccagctttcaccaaggcctcccctgttgtgaagaattccatcacgaagaatcaatggctgttaacacctagcagggaatatgccaccaaaacaagaattgggatccggcgtgggagaactggccaagaactcaaagaggcagcattggaaccatcgatggaaaaaatatttaaaattgatcagatgggaagatggtttgttgctggaggggctgctgttggtcttggagcattgtgctactatggcttgggactgtctaatgagattggagctattgaaaaggctgtaatttggcctcagtatgtcaaggatagaattcattccacctatatgtacttagcagggagtattggtttaacagctttgtctgccatagcaatcagcagaacgcctgttctcatgaacttcatgatgagaggctcttgggtgacaattggtgtgacctttgcagccatggttggagctggaatgctggtacgatcaataccatatgaccagagcccaggcccaaagcatcttgcttggttgctacattctggtgtgatgggtgcagtggtggctcctctgacaatattagggggtcctcttctcatcagagctgcatggtacacagctggcattgtgggaggcctctccactgtggccatgtgtgcgcccagtgaaaagtttctgaacatgggtgcacccctgggagtgggcctgggtctcgtctttgtgtcctcattgggatctatgtttcttccacctaccaccgtggctggtgccactctttactcagtggcaatgtacggtggattagttcttttcagcatgttccttctgtatgatacccagaaagtaatcaagcgtgcagaagtatcaccaatgtatggagttcaaaaatatgatcccattaactcgatgctgagtatctacatggatacattaaatatatttatgcgagttgcaactatgctggcaactggaggcaacagaaagaaatgaagtgactcagcttctggcttctctgctacatcaaatatcttgtttaatggggcagatatgcattaaatagtttgtacaagcagctttcgttgaagtttagaagataagaaacatgtcatcatatttaaatgttccggtaatgtgatgcctcaggtctgcctttttttctggagaataaatgcagtaatcctctcccaaataagcacacacattttcaattctcatgtttgagtgattttaaaatgttttggtgaatgtgaaaactaaagtttgtgtcatgagaatgtaagtcttttttctactttaaaatttagtaggttcactgagtaactaaaatttagcaaacctgtgtttgcatatttttttggagtgcagaatattgtaattaatgtcataagtgatttggagctttggtaaagggaccagagagaaggagtcacctgcagtcttttgtttttttaaatacttagaacttagcacttgtgttattgattagtgaggagccagtaagaaacatctgggtatttggaaacaagtggtcattgttacattcatctgctgaacttaacaaaactgttcatcctgaaacaggcacaggtgatgcattctcctgctgttgcttctcagtgctctctttccaatatagatgtggtcatgtttgacttgtacagaatgttaatcatacagagaatccttgatggaattatatatgtgtgttttacttttgaatgttacaaaaggaaataactttaaaactattctcaagagaaaatattcaaagcatgaaatatgttgctttttccagaatacaaacagtatactcatgattgctaagtgtttttttatttttgcatatttattgaactgtctaattgaatacagcttgctcttgtcacctcttcaagctttcaagcctttatagaaaagcttctttgtggcttacactggaaattatgaaagcagtttttctcctaagacttttggtttctcgcattgcctctcagactaagcactaaaaagcaaagcaaaacagaactagttctgtcttaatgaaatatatcaacccaaaagtgtaatgaggaaaatgcttcattagtttcccctagcagacttttacttctcttacactgctacaccattactttcttgagacatttgtaagttctttgatacagaagagttatatttagaagtctttaatgaaggg

SEQ ID NO: 2999 - DNA, 668 bp, Homo sapiens
caggacccaaggaaccaaaattgcatctgatggtcgtgtgtttgaagtgagtcttgctgatttgcagaatgatgaagttgcatttagaaaattcaagctgattactgaagatgttcagggtaaaaactgcctgactaacttccatggcgtggatcttaccagtgacaaaatgtgttccatggtcaaaaaatggcagacaatgattgaagctcacgttgatgtcaagactaccgatggttacttgcttcgtctgttctgtgttggttttactaaaaaacgcaacaatcagatacggaagacctcttatgctcagtaccagccaaatccggaagaagatgatggaaatcatgacccgagaggtgcagacaaatgacttgaaagaagtggtcaataaattgattccagacagcattggaaaagacgtagaaaaggcttgccaatctatttatcctctccatgatgtcttcgttagaaaagtaaaaatgctgaagaagcccaagtttgaattgggaaagctcatggagcttcatggtgaaggctgtagttctggaaaagccactggggacgagacaggtgttaaagttgaacgagctgatggatatgaactaccagtccaagaatctgtttaaaattcagacttcaaatagtgtcaaataaaaagtgctatt

SEQ ID NO: 3000 - DNA, 837 bp, Homo sapiens
ctgaccagcaccatggtggttgacaagaacaagcgccttacgaaaggtggcaaaaagggagccaagaagaaagtggttgatccattttctaagaaagattggtacgatgtgaacgcacctgctatgttcaatataagaaatattggaaagacgctcgtcaccaggacccaaggaaccaaaattgcatctgatggtcgtgtgtttgaagtgagtcttgctgatttgcagaatgatgaagttgcatttagaaaattcaagctgattactgaagatgttcagggtaaaaactgcctgactaacttccatggcgtggatcttaccagtgacaaaatgtgttccatggtcaaaaaatggcagacaatgattgaagctcacgttgatgtcaagactaccgatggttacttgcttcgtctgttctgtgttggttttactaaaaaacgcaacaatcagatacggaagacctcttatgctcagcaccagcaggtccgccaaatccggaagaagatgatggaaatcatgacccgagaggtgcagacaaatgacttgaaagaagtggtcaataaattgattccagacagcattggaaaagacgtagaaaaggcttgccaatctatttatcctctccatgatgtcttcgttagaaaagtaaaaatgctgaagaagcccaagtttgaattgggaaagctcatggagcttcatggtgaaggctgtagttctggaaaagccactggggacgagacaggtgttaaagttgaacgagctgatggatatgaactaccagtccaagaatctgtttaaaattcagacttcaaatagtgtcaaataaaaagtgctatt

SEQ ID NO: 3001 - protein, 261 aa, Homo sapiens
MVVDKNKRLTKGGKKGAKKKVVDPFSKKDWYDVNAPAMFNIRNIGKTLVTRTQGTKIASDGRVFEVSLADLQNDEVAFRKFKLITEDVQGKNCLTNFHGVDLTSDKMCSMVKKWQTMIEAHVDVKTTDGYLLRLFCVGFTKKRNNQIRKTSYAQHQQVRQIRKKMMEIMTREVQTNDLKEVVNKLIPDSIGKDVEKACQSIYPLHDVFVRKVKMLKKPKFELGKLMELHGEGCSSGKATGDETGVKVERADGYELPVQESV

SEQ ID NO: 3002 - DNA, 2238 bp, Homo sapiens
gggagagtgaggatggcagagaccagtgccttgcccaccggcttcggggagctcgaggtgctggctgtggggatggtgctactggtggaagctctctccggtctcagcctcaataccctgaccatcttctctttctgcaagaccccggagctgcggactccctgccacctactggtgctgagcttggctcttgcggacagtgggatcagcctgaatgccctcgttgcagccacatccagccttctccgtgtctcccacaggcgctggccctacggctcggacggctgccaggctcacggcttccagggctttgtgacagcgttggccagcatctgcagcagtgcagccatcgcatgggggcgttatcaccactactgcacccgtagccagctggcctggaactcagccgtctctctggtgctcttcgtgtggctgtcttctgccttctgggcagctctgccccttctgggttggggtcactatgactatgagccactggggacatgctgcaccctggactactccaagggggacagaaacttcaccagcttcctcttcaccatgtccttcttcaacttcgccatgcccctcttcatcacgatcacttcctacagtctcatggagcagaaactggggaagagtggccatctccaggtaaacaccactctgccagcaaggacgctgctgctcggctggggcccctatgccatcctgtatctatacgcagtcatcgcagacgtgacttccatctcccccaaactgcagatggtgcccgccctcattgccaaaatggtgcccacgatcaatgccatcaactatgccctgggcaatgagatggtctgcaggggaatctggcagtgcctctcaccgcagaagagggagaaggaccgaaccaagtgagcctgccaccctggagtgagccccaggccaggaggctgttccaggagtcctgcccagcagcctcggtggccaagcccagacactcacccaccttccccagtggccccgtggatcctggtcctaggctggacacaggattcagaaagacaccaggctgcacagaaagagccagatggacctgagtgtcggtcacagccccctacactcaaggctgagaggcctcaggaaagtcattcctttttaaaaataataataaatgtaagggggtacagtgcagttttgttacatggatagattgcctagtggtgaagtctgggcttttagtgtaaccatcaccctaataatatacgttgtacccattaagttatttctcatccctcaccccctcccaccttgtcacccttctgagtctccaatgtctattattccacactccatgtccacgtgtacacattatttagctcccacttacaagtgagaacatgtggtatttgactttctgtttttgagttatttcacttaaaataatgacctccagtttcatccatgttgctgcaaaagacatgatctcgttcttttttatggcagtgtagtattccattccatatacatatataaacgttatatatatgtaacgttttctttatccaatcatctgttgatggatagattccatatctttgctactgtaaacagagctgtgataagcatacaagtgcaggtttctttttgatatactgatttcttttcctttgggtagataccagtagtaggactgctggatcaaatggtagctctatttttaagacagtatggagaaatcaccatactgttttccataggggttgtactaatttacagtcccaccaacagtgtataggtgttcccttttctctgcatccttaccaatatctgtaattttttgactttttaataatagccattctcatttgtgtgagataaggtctcattgtggttttaatttccatttctctgatgacttttgatgttaagcattttttcatatgcttcttagccacgtgtatgtattctttttgaaaaaatgtttattcatgtcttttgcccactttttaatggcattatttggattttttttgttgagttatttgagtttcttatatattctggataatagtctggataatatattctggataatatataatagtcttatatattctggatatattctggatacatggtttgcaaatattttctccggttctgcacgttgttcattctgttgatggtttattttgctgtgcagaaacttttttagtttaattaagtcccatttgtctaaaaaaaaaaaaaaaa

SEQ ID NO: 3003 - protein, 295 aa, Homo sapiens
MAETSALPTGFGELEVLAVGMVLLVEALSGLSLNTLTIFSFCKTPELRTPCHLLVLSLALADSGISLNALVAATSSLLRVSHRRWPYGSDGCQAHGFQGFVTALASICSSAAIAWGRYHHYCTRSQLAWNSAVSLVLFVWLSSAFWAALPLLGWGHYDYEPLGTCCTLDYSKGDRNFTSFLFTMSFFNFAMPLFITITSYSLMEQKLGKSGHLQVNTTLPARTLLLGWGPYAILYLYAVIADVTSISPKLQMVPALIAKMVPTINAINYALGNEMVCRGIWQCLSPQKREKDRTK

SEQ ID NO: 3004 - DNA, 3051 bp, Homo sapiens
gggcaacccgcgcgggacccttcctccctagtcgcggggagtctgagaaagcgcgcctgtttcgcgaccatcacgcacctcccctccgcttgtggccatgtaccgctacctgggcgaagcgctgttgctgtcccgggccgggcccgctgccctgggctcggcgtccgccgactcggccgcgttgctgggctgggcccggggacagcccgccgccgccccgcagccggggctggcattggccgcccggcgccactacagcgaggcggtggccgaccgcgaggacgaccccaacttcttcaagatggtggagggcttcttcgatcgcggcgccagcatcgtggaggacaagctggtggaggacctgaggacccgggagagcgaggagcagaagcggaaccgggtgcgcggcatcctgcggatcatcaagccctgcaaccatgtgctgagtctctccttccccatccggcgcgacgacggctcctgggaggtcatcgaaggctaccgggcccagcacagccagcaccgcacgccctgcaagggaggtatccgttacagcactgatgtgagtgtagatgaagtaaaagctttggcttctctgatgacatacaagtgtgcagtggttgatgtgccgtttgggggtgctaaagctggtgttaagatcaatcccaagaactatactgataatgaattggaaaagatcacaaggaggttcaccatggagctagcaaaaaagggctttattggtcctggcattgatgtgcctgctccagacatgagcacaggtgagcgggagatgtcctggatcgctgatacctatgccagcaccatagggcactatgatattaatgcacacgcctgtgttactggtaaacccatcagccaagggggaatccatggacgcatctctgctactggccgtggtgtcttccatgggattgaaaatttcatcaatgaagcttcttacatgagcattttaggaatgacaccagggtttggagataaaacatttgttgttcagggatttggtaatgtgggcctacactctatgagatatttacatcgttttggtgctaaatgtattgctgttggtgagtctgatgggagtatatggaatccagatggtattgacccaaaggaactggaagacttcaaattgcaacatgggtccattctgggcttccccaaggcaaagccctatgaaggaagcatcttggaggccgactgtgacatactgatcccagctgccagtgagaagcagttgaccaaatccaacgcacccagagtcaaagccaagatcattgctgaaggtgccaatgggccaacaactccagaagctgacaagatcttcctggagagaaacattatggttattccagatctctacttgaatgctggaggagtgacagtatcttactttgagtggctgaagaatctaaatcatgtcagctatggccgtttgaccttcaaatatgaaagggattctaactaccacttgctcatgtctgttcaagagagtttagaaagaaaatttggaaagcatggtggaactattcccattgtacccacggcagagttccaagacaggatatcgggtgcatctgagaaagacatcgtgcactctggcttggcatacacaatggagcgttctgccaggcaaattatgcgcacagccatgaagtataacctgggattggacctgagaacagctgcctatgttaatgccattgagaaagtcttcaaagtgtacaatgaagctggtgtgaccttcacatagatggatcatggctgacttcctcactatcctcttcacatgtaacttctgcagacctatcacaagtttacatgtaaccacagaaatccctttctctcctgactcattaataatggataccattctcaacaagtcaatccaagtcagcccgttaaggagaaagaaattaaggttagcggatcatgtacaagctgagtgtgaaagtagaaatcacctacaccagagagccattttggtattttgcctttaaataaaaagcctcctttatctggctgtgcagccttgctctgtggcttttcccaacacaatcagtgctagtgctggggaggaacagtcaagagcagtcagttgcttgcttattttttctggatgagtctgggacacactgtaactttaacacatttaagaagtaggtgtgtggccttttcagaaggtggcatggtcctcaagtgagttcttagtattttatatcagcaaaataattcaattttgcaggttgcaaacaaatataaaacctgtttctgtttatgaatattattcttttagaatagaataagtacatgctgctgtaataaaattgcctttaatcacttaacaagcctaaccttgactcaaacagtgaatgcctatagaaataataaatgaaaaaaactagtatttttatatcataaaacaatgtcatttatagcttatcattcatgtattgtccagcagacattaaaagccctgtggataattaagttatcttcatacctgcaaaatggtggaggctattttcattaaaactgtcagaatttgcttaccataattatgatacagtccaaagaatgcagtcactttttatcatgttaactaattgttctcttttgaagatctatggttgactaattaaacaataattcaagtagagtgtcccagaaaaaaaccacttgggctccctgtttggagtctggctggctctgagcattgccaatggcccctactcacctgactttgtatcctctccttttagaggctttgcattctgcacccagcttcactaacagtgggctgaaaacatccttgggttgagtgtttcatttgggagttatttggccagggccttttgaacagtagtgtccccatgaagtgctagataatatatgtgtaagagtcagcttttttttttttttttaactctaacacccttcagaaatttctaactactttgtaactgcatggcttaacctggtgataaaagcagttattaaaagtctacgttttccaaaaaaaaaaaaaaa

SEQ ID NO: 3005 - protein, 558 aa, Homo sapiens
MYRYLGEALLLSRAGPAALGSASADSAALLGWARGQPAAAPQPGLALAARRHYSEAVADREDDPNFFKMVEGFFDRGASIVEDKLVEDLRTRESEEQKRNRVRGILRIIKPCNHVLSLSFPIRRDDGSWEVIEGYRAQHSQHRTPCKGGIRYSTDVSVDEVKALASLMTYKCAVVDVPFGGAKAGVKINPKNYTDNELEKITRRFTMELAKKGFIGPGIDVPAPDMSTGEREMSWIADTYASTIGHYDINAHACVTGKPISQGGIHGRISATGRGVFHGIENFINEASYMSILGMTPGFGDKTFVVQGFGNVGLHSMRYLHRFGAKCIAVGESDGSIWNPDGIDPKELEDFKLQHGSILGFPKAKPYEGSILEADCDILIPAASEKQLTKSNAPRVKAKIIAEGANGPTTPEADKIFLERNIMVIPDLYLNAGGVTVSYFEWLKNLNHVSYGRLTFKYERDSNYHLLMSVQESLERKFGKHGGTIPIVPTAEFQDRISGASEKDIVHSGLAYTMERSARQIMRTAMKYNLGLDLRTAAYVNAIEKVFKVYNEAGVTFT

SEQ ID NO: 3006 - DNA, 324 bp, Homo sapiens
atgggggagaatatcattgtagaaaatggaaacagtgtggatcaaggtagagtggatctcgtgcagggtccccttggtgaacagtggccatgtccgcaacactgggtgcattgggacagcaccaggtatgaacctcatcatagcagccatcacaaggacaaggccattaagaaattcgtcattcaaaacatagtggaggccacagcagtcagggacatttctgaagcgagcgtctttgatgcctatgtgcgtcccaagctgtatgtgaagctacattactgtgtcttcacttctgctgtgtctacgcttctcttctttacctaa

SEQ ID NO: 3007 - protein, 107 aa, Homo sapiens
MGENIIVENGNSVDQGRVDLVQGPLGEQWPCPQHWVHWDSTRYEPHHSSHHKDKAIKKFVIQNIVEATAVRDISEASVFDAYVRPKLYVKLHYCVFTSAVSTLLFFT

SEQ ID NO: 3008 - DNA, 1330 bp, Mus musculus
gcagcccagccaagcactgtcaggaatcctgtgaagcagctccagctatgtgtgaagaagaggacagcactgccttggtgtgtgacaatggctctgggctctgtaaggccggctttgctggggacgatgctcccagggctgttttcccatccattgtgggacgtcccagacatcagggggtgatggtgggaatgggacaaaaagacagctacgtgggtgacgaagcacagagcaaaagaggaatcctgaccctgaagtacccgatagaacatggcatcatcaccaactgggacgacatggaaaagatctggcaccactctttctacaatgagcttcgtgttgcccctgaagagcatcccaccctgctcacggaggcacccctgaaccccaaggccaaccgggagaaaatgactcaaattatgtttgagactttcaatgtcccagccatgtatgtggctatccaggcggtgctgtctctctatgcctctggacgcacaactggcatcgtgctggactctggagatggtgtcacccacaatgtccccatctatgagggctatgccttgccccatgccatcatgcgtctggatctggctggccgagatctcactgactacctcatgaagatcctgactgagcgtggctattccttcgttactactgctgagcgtgagattgtccgggacatcaaggagaaactgtgttatgtagctctggactttgaaaatgagatggccactgccgcatcctcatcctcccttgagaagagttacgagttgcctgatgggcaagtgatcaccatcggaaatgaacgtttccgctgcccagagaccctgttccagccatccttcatcgggatggagtctgctggcatccatgaaaccacctacaacagcatcatgaagtgtgatattgacatcaggaaggacctctatgctaacaatgtcctatcagggggcaccactatgtaccctggcattgccgaccgaatgcagaaggagatcacggccctagcacccagcaccatgaagatcaagatcattgcccctccggagcgcaaatactctgtctggatcggtggctccatcctggcctctctgtccaccttccagcagatgtggatcagcaaacaggaatacgatgaagccgggccttccattgtccaccgcaaatgcttctaaaacactttcctgctcctctctgtctctagcacacaactgtgaatgtcctgtggaattatgccttcagttcttttccaaatcattcctagccaaagctctgactcgttacctatgtgttttttaataaatctgaaataggctactggtaa

SEQ ID NO: 3009 - protein, 377 aa, Mus musculus
MCEEEDSTALVCDNGSGLCKAGFAGDDAPRAVFPSIVGRPRHQGVMVGMGQKDSYVGDEAQSKRGILTLKYPIEHGIITNWDDMEKIWHHSFYNELRVAPEEHPTLLTEAPLNPKANREKMTQIMFETFNVPAMYVAIQAVLSLYASGRTTGIVLDSGDGVTHNVPIYEGYALPHAIMRLDLAGRDLTDYLMKILTERGYSFVTTAEREIVRDIKEKLCYVALDFENEMATAASSSSLEKSYELPDGQVITIGNERFRCPETLFQPSFIGMESAGIHETTYNSIMKCDIDIRKDLYANNVLSGGTTMYPGIADRMQKEITALAPSTMKIKIIAPPERKYSVWIGGSILASLSTFQQMWISKQEYDEAGPSIVHRKCF

SEQ ID NO: 3010 - DNA, 2405 bp, Homo sapiens
actttcccttttgtaacgtcagctgaagggaaacaaacaaaaaggaaccagaggccacttgtatatataggtctcttcagcatttattggtggcagaagaggaagatttctgaagagtgcagctgcctgaaccgagccctgccgaacagctgagaattgcactgcaaccatgagtgagaacaataagaattccttggagagcagcctacggcaactaaaatgccatttcacctggaacttgatggagggagaaaactccttggatgattttgaagacaaagtattttaccggactgagtttcagaatcgtgaattcaaagccacaatgtgcaacctactggcctatctaaagcacctcaaagggcaaaacgaggcagccctggaatgcttacgtaaagctgaagagttaatccagcaagagcatgctgaccaggcagaaatcagaagtctggtcacctggggaaactatgcctgggtctactatcacatgggccgactctcagacgttcagatttatgtagacaaggtgaaacatgtctgtgagaagttttccagtccctatagaattgagagtccagagcttgactgtgaggaagggtggacacggttaaagtgtggaggaaaccaaaatgaaagagcgaaggtgtgctttgagaaggctctggaaaagaagccaaagaacccagaattcacctctggactggcaatagcaagctaccgtctggacaactggccaccatctcagaacgccattgaccctctgaggcaagccattcggctgaatcctgacaaccagtaccttaaagtcctcctggctctgaagcttcataagatgcgtgaagaaggtgaagaggaaggtgaaggagagaagttagttgaagaagccttggagaaagccccaggtgtaacagatgttcttcgcagtgcagccaagttttatcgaagaaaagatgagccagacaaagcgattgaactgcttaaaaaggctttagaatacataccaaacaatgcctacctgcattgccaaattgggtgctgctatagggcaaaagtcttccaagtaatgaatctaagagagaatggaatgtatgggaaaagaaagttactggaactaataggacacgctgtggctcatctgaagaaagctgatgaggccaatgataatctcttccgtgtctgttccattcttgccagcctccatgctctagcagatcagtatgaagacgcagagtattacttccaaaaggaattcagtaaagagcttactcctgtagcgaaacaactgctccatctgcggtatggcaactttcagctgtaccaaatgaagtgtgaagacaaggccatccaccactttatagagggtgtaaaaataaaccagaaatcaagggagaaagaaaagatgaaagacaaactgcaaaaaattgccaaaatgcgactttctaaaaatggagcagattctgaggctttgcatgtcttggcattccttcaggagctgaatgaaaaaatgcaacaagcagatgaagactctgagaggggtttggagtctggaagcctcatcccttcagcatcaagctggaatggggaatgaagaatagagatgtggtgcccactaggctactgctgaaagggagctgaaattcctccaccaagttggtattcaaaatatgtaatgactggtatggcaaaagattggactaagacactggccataccactggacagggttatgttaacacctgaattgctgggtcttgagagagcccaaggagttctgggagagggaccagattggggggtaggtccacgggcttggtgatagaattatttctcgattgacttcttgagtgcaatttgaactgtaacatttgcttagtcacctttagtggagtaatctactgggcttgtttctatatttatataaagcagccaaatccttcatgtaatattgaagtccatttttgcaatgttgttccatacttggagtcattttgcatcccatagaggttagtcctgcatagccagtaatgtgctaagttcatccaaaagctggcggaccaaagtctaaatagggctcagtatcccccatcgcttatctctgcctccttcctcctccttcccagtctatcatcaaccttgagtattctacacaatgtgaattcaagtgcctgattaattgaggtggcaacatagtttgagacgagggcagagaacaggaagatacatagctagaagcgacgggtacaaaaagcaatgtgtacaagaagactttcagcaagtatacagagagttcacctctactctgccctcctcatagtcataatgtagcaagtaaagaatgagaatggattctgtacaatacactagaaaccaacataatgtatttctttaaaacctgtgtgaaaaaa

SEQ ID NO: 3011 - protein, 472 aa, Homo sapiens
MSENNKNSLESSLRQLKCHFTWNLMEGENSLDDFEDKVFYRTEFQNREFKATMCNLLAYLKHLKGQNEAALECLRKAEELIQQEHADQAEIRSLVTWGNYAWVYYHMGRLSDVQIYVDKVKHVCEKFSSPYRIESPELDCEEGWTRLKCGGNQNERAKVCFEKALEKKPKNPEFTSGLAIASYRLDNWPPSQNAIDPLRQAIRLNPDNQYLKVLLALKLHKMREEGEEEGEGEKLVEEALEKAPGVTDVLRSAAKFYRRKDEPDKAIELLKKALEYIPNNAYLHCQIGCCYRAKVFQVMNLRENGMYGKRKLLELIGHAVAHLKKADEANDNLFRVCSILASLHALADQYEDAEYYFQKEFSKELTPVAKQLLHLRYGNFQLYQMKCEDKAIHHFIEGVKINQKSREKEKMKDKLQKIAKMRLSKNGADSEALHVLAFLQELNEKMQQADEDSERGLESGSLIPSASSWNGE

SEQ ID NO: 3012 - DNA, 957 bp, Homo sapiens
ctcccggacgtaggtagtttgttgggccgggttctgaggccttgcttctctttacttttccactctaggccacgatgccgcagtaccagacctgggaggagttcagccgcgctgccgagaagctttacctcgctgaccctatgaaggcacgtgtggttctcaaatataggcattctgatgggaacttgtgtgttaaagtaacagatgatttagtttgtttggtgtataaaacagaccaagctcaagatgtaaagaagattgagaaattccacagtcaactaatgcgacttatggtagccaaggaagcccgcaatgtattttggagcataaaatgtatgctgttgtgaccaataaatataaaatatggtaattggaattaaccccacaccatagtatgcattgttatacatactgtgtacctaattatgtatagcagtgtagtctcaattatatctaaaagtaattgtgactaacaagtatgctttgccttatttccacatttaaagtacctgttaatataagggatttgtagtatcagcttgttgagcaatgactttgaatctagttttcagtgatcagaagcagcatttatttgagtgtatgaatggaatgatgatcactgtgctataatgtactgaaaccaccatattacagaaatatttactacatattttccatctgtagtttctcagaagggctatggattagtttgaactgtcaaatccttgcatacttctgtgacacccctgcccattttctgtctttaattaaccaaggtgttaggtgttactgtcacaactgttatgttttccagtaaactagaagtacgatatttgataattatatttgtatcctaaatttcaccacctaaatgtaatgttgattcctcaagaatgaaatgaaggcactacattgaaatatgttttgtataaatttgtcatgttgaacaacatttta

SEQ ID NO: 3013 - DNA, 6829 bp, Homo sapiens
cttctctcccagggcggtgcgacccggagctccagcgcccgagtctccacttcgtttgctgaaacttgctttctaccagctaagaaccatgctgcgagtgattgtggaatctgccagcaatatccctaaaacgaaatttggcaagccggatcctattgtttctgtcatttttaaggatgagaaaaagaaaacaaagaaagttgataatgaattgaaccctgtctggaatgagattttggagtttgacttgaggggtataccactggacttttcatcttcccttgggattattgtgaaagattttgagacaattggacaaaataaattaattggcacggcgactgtagccctgaaggacctgactggtgaccagagcagatccctgccgtacaagctgatctccctgctaaatgaaaaagggcaagatactggggccaccattgacttggtgatcggctatgatccgccttctgctccacatccaaatgacctgagcgggcccagcgtgccaggcatgggaggagatggggaagaagatgaaggtgatgaagacaggttggacaatgcagtcaggggccctgggcccaaggggccagttgggacggtgtcggaagctcagcttgctcggaggctcaccaaagtaaagaacagccggcggatgctgtcaaataagccacaggacttccagatccgcgtccgagtgattgagggccgacagttaagtggtaacaacataaggcctgtggtcaaagttcacgtctgtggccagacacaccgaacaagaatcaagagaggaaacaaccctttttttgatgagttgtttttctacaatgtcaacatgaccccttctgaattgatggatgagatcatcagcatccgggtttataattctcactctctgcgggcagattgtctgatgggggaatttaagattgatgttggatttgtttatgatgaacctggccatgctgtcatgagaaagtggcttcttctcaatgacccggaagataccagttcaggttctaaaggttatatgaaagtcagcatgtttgtcctgggaaccggagatgagcctcctcctgagagacgagatcgtgataatgacagtgatgatgtggagagtaatttgttactccctgctggcattgccctccggtgggtgaccttcttgctgaaaatctaccgagctgaggacatcccccagatggatgatgccttctcacagacagtaaaggaaatatttggaggcaatgcagataagaaaaatctcgtggatccttttgtagaagtttcctttgctggaaaaaaggtttgtacaaacataattgagaaaaatgcaaacccagagtggaatcaggtcgtcaatcttcagatcaagtttccttcagtgtgtgaaaaaataaaactaacaatatatgactgggaccgtcttactaaaaatgatgtagttggaacaacatatctacacctctctaaaattgctgcctctggtggggaagtggaagatttctcatcttcgggaactggggctgcatcatatacagtaaacacaggagaaacagaggtaggctttgttccaacgtttggaccttgttacctgaatctttatggaagccccagggagtacacgggattcccagacccctatgatgagctgaatactggaaagggggaaggagttgcctacagaggcaggatcttggttgaattagccacttttcttgagaagacaccaccagataaaaagcttgagcccatttcaaatgatgacctgctggttgttgagaaataccagcgaaggcggaagtacagcctgtctgccgtgtttcattcagccaccatgttgcaagatgttggtgaggccattcagtttgaagtcagcattgggaactatggcaacaagtttgacaccacctgtaagcctttggcatcaacaactcagtacagccgtgctgtatttgatggcaactactattattacttgccttgggcccacaccaagccagttgttaccctgacttcatactgggaggatattagtcatcgcctggatgcggtgaacactctcctagctatggcagaacggctgcaaacaaatatagaagctctaaaatcagggatacaaggtaaaattcctgcaaaccagctggctgaattgtggctgaagctgatagatgaagttatagaagacacgagatacacgttgcctctcacagaaggaaaagccaacgtcacagttctcgatactcagatccgaaagctgcggtccaggtctctctcccaaatacatgaggcggctgtgaggatgaggtcggaagccacagatgtgaagtccacactggcagaaattgaggactggcttgataaattaatgcagctgactgaagagccacagaacagcatgcctgacatcatcatctggatgatccggggagagaagagactggcctatgcacgaattcccgcacatcaggtcttgtactccaccagtggtgagaatgcatctggaaaatactgtgggaaaacccaaaccatctttctgaagtatccacaggagaaaaacaacgggccaaaggtgcctgtggagttgcgagtgaacatctggctaggcttaagtgctgtggagaagaagtttaacagcttcgcagaaggaactttcaccgtctttgctgaaatgtatgaaaatcaagctctcatgtttggaaaatggggtacttctggattagtaggacgtcataagttttctgatgtcacaggaaaaataaaactcaagagggaattttttctgcctccaaaaggctgggaatgggaaggagagtggatagttgatcctgaaagaagcttgctgactgaggcagatgcaggtcacacggagttcactgatgaagtctatcagaacgagagccgctaccccgggggcgactggaagccggccgaggacacctacacggatgcgaacggcgataaagcagcatcacccagcgagttgacttgtcctccaggttgggaatgggaagatgatgcatggtcttatgacataaatcgagcggtggatgagaaaggctgggaatatggaatcaccattcctcctgatcataagcccaaatcctgggttgcagcagagaaaatgtaccacactcatagacggcgaaggctggtccgaaaacgcaagaaagatttaacacagactgcttcaagcaccgcaagggccatggaggaattgcaagaccaagagggctgggaatatgcttctctaattggctggaaatttcactggaaacaacgtagttcagataccttccgccgcagacgctggaggagaaaaatggctccttcagaaacacatggtgcagctgccatctttaaacttgaaggtgcccttggggcagacactaccgaagatggggatgagaagagcctggagaaacagaagcacagtgccaccactgtgttcggagcaaacacccccattgtttcctgcaattttgacagagtctacatctaccatctgcgctgctatgtctatcaagccagaaacctcttggctttagataaggatagcttttcagatccatatgctcatatctgtttcctccatcggagcaaaaccactgagatcatccattcaaccctgaatcccacgtgggaccaaacaattatattcgatgaagttgaaatctatggggaaccccaaacagttctacagaatccacccaaagttatcatggaactttttgacaatgaccaagtgggcaaagatgaatttttaggacgaagcattttctctcctgtggtgaaactgaactcagaaatggacatcacacccaaacttctctggcacccagtaatgaatggagacaaagcctgcggggatgttcttgtaactgcagagctgattctgaggggcaaggatggctccaaccttcccattcttccccctcaaagggcgccaaatctatacatggtcccccaggggatcaggcctgtggtccagctcactgccattgagattctagcttggggcttaagaaatatgaaaaacttccagatggcttctatcacatcccccagtcttgttgtggagtgtggaggagaaagggtggaatcggtggtgatcaaaaaccttaagaagacacccaactttccaagttctgttctcttcatgaaagtgttcttgcccaaggaggaattgtacatgcccccactggtgatcaaggtcatcgaccacaggcagtttgggcggaagcctgtcgtcggccagtgcaccatcgagcgcctggaccgctttcgctgtgacccttatgcagggaaagaggacatcgtcccacagctcaaagcctcccttctgtctgccccaccatgccgggacatcgttatcgaaatggaagacaccaaaccattactggcttctaagctgacagaaaaggaggaagaaatcgtggactggtggagtaaattttatgcttcctcaggggaacatgaaaaatgcggacagtatattcagaaaggctattccaagctcaagatatataattgtgaactagaaaatgtagcagaatttgagggcctgacagacttctcagatacgttcaagttgtaccgaggcaagtcggatgaaaatgaagatccttctgtggttggagagtttaagggctcctttcggatctaccctctgccggatgaccccagcgtgccagcccctcccagacagtttcgggaattacctgacagcgtcccacaggaatgcacggttaggatttacattgttcgaggcttagagctccagccccaggacaacaatggcctgtgtgacccttacataaaaataacactgggcaaaaaagtcattgaagaccgagatcactacattcccaacactctcaacccagtctttggcaggatgtacgaactgagctgctacttacctcaagaaaaagacctgaaaatttctgtctatgattatgacacctttacccgggatgaaaaagtaggagaaacaattattgatctggaaaaccgattcctttcccgctttgggtcccactgcggcataccagaggagtactgtgtttctggagtcaatacctggcgagatcaactgagaccaacacagctgcttcaaaatgtcgccagattcaaaggcttcccacaacccatcctttccgaagatgggagtagaatcagatatggaggacgagactacagcttggatgaatttgaagccaacaaaatcctgcaccagcacctcggggcccctgaagagcggcttgctcttcacatcctcaggactcaggggctggtccctgagcacgtggaaacaaggactttgcacagcaccttccagcccaacatttcccagggaaaacttcagatgtgggtggatgttttccccaagagtttggggccaccaggccctcctttcaacatcacaccccggaaagccaagaaatactacctgcgtgtgatcatctggaacaccaaggacgttatcttggacgagaaaagcatcacaggagaggaaatgagtgacatctacgtcaaaggctggattcctggcaatgaagaaaacaaacagaaaacagatgtccattacagatctttggatggtgaagggaattttaactggcgatttgttttcccgtttgactaccttccagccgaacaactctgtatcgttgcgaaaaaagagcatttctggagtattgaccaaacggaatttcgaatcccacccaggctgatcattcagatatgggacaatgacaagttttctctggatgactacttgggtttcctagaacttgacttgcgtcacacgatcattcctgcaaaatcaccagagaaatgcaggttggacatgattccggacctcaaagccatgaacccccttaaagccaagacagcctccctctttgagcagaagtccatgaaaggatggtggccatgctacgcagagaaagatggcgcccgcgtaatggctgggaaagtggagatgacattggaaatcctcaacgagaaggaggccgacgagaggccagccgggaaggggcgggacgaacccaacatgaaccccaagctggacttaccaaatcgaccagaaacctccttcctctggttcaccaacccatgcaagaccatgaagttcatcgtgtggcgccgctttaagtgggtcatcatcggcttgctgttcctgcttatcctgctgctcttcgtggccgtgctcctctactctttgccgaactatttgtcaatgaagattgtaaagccaaatgtgtaacaaaggcaaaggcttcatttcaagagtcatccagcaatgagagaatcctgcctctgtagaccaacatccagtgtgattttgtgtctgagaccacaccccagtagcaggttacgccatgtcaccgagccccattgattcccagagggtcttagtcctggaaagtcaggccaacaagcaacgtttgcatcatgttatctcttaagtattaaaagttttattttctaaagtttaaatcatgtttttcaaaatatttttcaaggtggctggttccatttaaaaatcatctttttatatgtgtcttcggttctagacttcagcttttggaaattgctaaatagaattcaaaaatctctgcatcctgaggtgatatacttcatatttgtaatcaactgaaagagctgtgcattataaaatcagttagaatagttagaacaattcttatttatgcccacaaccattgctatattttgtatggatgtcataaaagtctatttaacctctgtaatgaaactaaataaaaatgtttcacctttaaaaaaaaaaaaaaaaaaaaaa

SEQ ID NO: 3014 - protein, 2061 aa, Homo sapiens
MLRVIVESASNIPKTKFGKPDPIVSVIFKDEKKKTKKVDNELNPVWNEILEFDLRGIPLDFSSSLGIIVKDFETIGQNKLIGTATVALKDLTGDQSRSLPYKLISLLNEKGQDTGATIDLVIGYDPPSAPHPNDLSGPSVPGMGGDGEEDEGDEDRLDNAVRGPGPKGPVGTVSEAQLARRLTKVKNSRRMLSNKPQDFQIRVRVIEGRQLSGNNIRPVVKVHVCGQTHRTRIKRGNNPFFDELFFYNVNMTPSELMDEIISIRVYNSHSLRADCLMGEFKIDVGFVYDEPGHAVMRKWLLLNDPEDTSSGSKGYMKVSMFVLGTGDEPPPERRDRDNDSDDVESNLLLPAGIALRWVTFLLKIYRAEDIPQMDDAFSQTVKEIFGGNADKKNLVDPFVEVSFAGKKVCTNIIEKNANPEWNQVVNLQIKFPSVCEKIKLTIYDWDRLTKNDVVGTTYLHLSKIAASGGEVEDFSSSGTGAASYTVNTGETEVGFVPTFGPCYLNLYGSPREYTGFPDPYDELNTGKGEGVAYRGRILVELATFLEKTPPDKKLEPISNDDLLVVEKYQRRRKYSLSAVFHSATMLQDVGEAIQFEVSIGNYGNKFDTTCKPLASTTQYSRAVFDGNYYYYLPWAHTKPVVTLTSYWEDISHRLDAVNTLLAMAERLQTNIEALKSGIQGKIPANQLAELWLKLIDEVIEDTRYTLPLTEGKANVTVLDTQIRKLRSRSLSQIHEAAVRMRSEATDVKSTLAEIEDWLDKLMQLTEEPQNSMPDIIIWMIRGEKRLAYARIPAHQVLYSTSGENASGKYCGKTQTIFLKYPQEKNNGPKVPVELRVNIWLGLSAVEKKFNSFAEGTFTVFAEMYENQALMFGKWGTSGLVGRHKFSDVTGKIKLKREFFLPPKGWEWEGEWIVDPERSLLTEADAGHTEFTDEVYQNESRYPGGDWKPAEDTYTDANGDKAASPSELTCPPGWEWEDDAWSYDINRAVDEKGWEYGITIPPDHKPKSWVAAEKMYHTHRRRRLVRKRKKDLTQTASSTARAMEELQDQEGWEYASLIGWKFHWKQRSSDTFRRRRWRRKMAPSETHGAAAIFKLEGALGADTTEDGDEKSLEKQKHSATTVFGANTPIVSCNFDRVYIYHLRCYVYQARNLLALDKDSFSDPYAHICFLHRSKTTEIIHSTLNPTWDQTIIFDEVEIYGEPQTVLQNPPKVIMELFDNDQVGKDEFLGRSIFSPVVKLNSEMDITPKLLWHPVMNGDKACGDVLVTAELILRGKDGSNLPILPPQRAPNLYMVPQGIRPVVQLTAIEILAWGLRNMKNFQMASITSPSLVVECGGERVESVVIKNLKKTPNFPSSVLFMKVFLPKEELYMPPLVIKVIDHRQFGRKPVVGQCTIERLDRFRCDPYAGKEDIVPQLKASLLSAPPCRDIVIEMEDTKPLLASKLTEKEEEIVDWWSKFYASSGEHEKCGQYIQKGYSKLKIYNCELENVAEFEGLTDFSDTFKLYRGKSDENEDPSVVGEFKGSFRIYPLPDDPSVPAPPRQFRELPDSVPQECTVRIYIVRGLELQPQDNNGLCDPYIKITLGKKVIEDRDHYIPNTLNPVFGRMYELSCYLPQEKDLKISVYDYDTFTRDEKVGETIIDLENRFLSRFGSHCGIPEEYCVSGVNTWRDQLRPTQLLQNVARFKGFPQPILSEDGSRIRYGGRDYSLDEFEANKILHQHLGAPEERLALHILRTQGLVPEHVETRTLHSTFQPNISQGKLQMWVDVFPKSLGPPGPPFNITPRKAKKYYLRVIIWNTKDVILDEKSITGEEMSDIYVKGWIPGNEENKQKTDVHYRSLDGEGNFNWRFVFPFDYLPAEQLCIVAKKEHFWSIDQTEFRIPPRLIIQIWDNDKFSLDDYLGFLELDLRHTIIPAKSPEKCRLDMIPDLKAMNPLKAKTASLFEQKSMKGWWPCYAEKDGARVMAGKVEMTLEILNEKEADERPAGKGRDEPNMNPKLDLPNRPETSFLWFTNPCKTMKFIVWRRFKWVIIGLLFLLILLLFVAVLLYSLPNYLSMKIVKPNV

SEQ ID NO: 3015 - DNA, 1221 bp, Homo sapiens
gtgtggacaacagtgagtatatggggaatggagacttcttacccacccggctgcaggcccagcaggatgctgtcaacacagtttgtcattcaaagacccgcagcaaccctgagaacaacgtgggccttatcacactggataatgactgtgaagtgctgaccacactcaccccagacactggccgtatcctgtccaagctacatactgtccaacccaagggcaagatcaccttctgcatgggcatccacgtggcccatctggctctgaagcaccgacaaggcaacaatcacaagatccgcatcattgcctttgtgggaaacccggtggaggacaatgagaagaatctggtgaaactggctaaatgcctcaagaaggagaaagtaaatgttgacattatcaattttggggaagaggaggtgaacacagaaaagctgacagcctttgtaaacacgttgaatggcaaagatggaaccggttctcatctggtgacagtgcctcctgggcccagtttggctgatgctctcatcagttttccgattttggctggtgaaggtggtgccatgatgggtcttggtgccagtgactttgaatttggagtagatcccagtgctgatcctgagctggccttggtccttcgtgtatttatggaagagcagcggcagcggcaggaggaggaggcccggcaggcagctgcagcttctgctgctgaggccgggattgctacgactgggactgaagactcagacgatgccctgctgaagatgaccatcagccagcaagagtttggccacactgggcttcctgacctaagcagtatgactgaggaagagaagattgtttgtgccatgcagatgtccctgcagggagcagagtttggcctggcagaatcagcagacattgatgccagctcagccatggacacatctgagccagccaaggaggaggatgattacgacgtgatgcaagaccctgagttccttcagagtgtcctagagaacctcccaggtgtggatcccaacaatgaagccattcgaaatgctgtgggctccctggcctcccaggccaccaaggacagcaagaaggacaagaaggaggaagacaagaagtgagactggagggaaagggtagctgagcctgctcaggggactgcatgggaagcacggaatatagggttagatgtgtgttatctgtaatcattatagcctaaataaagcttggcaa

SEQ ID NO: 3016 - DNA, 3095 bp, Homo sapiens
ggggatttggctagaaggctgggccggcagcggttgtgaggagttagctcgcggcattgcaggctctgagaggaggggacccggttcccgggtgagtgtccaggcatgccagcggaacggcccgcgggcagcggcggctcggaggctccagcaatggttgaacaactggacactgctgtgattaccccggccatgctagaagaggaagaacagcttgaagctgctggactagagagagagcggaagatgctggaaaaggctcgcatgtcttgggatagagagtcgacagaaattcggtaccgtagacttcaacatttgcttgaaaaaagcaatatatactccaaatttttattgacgaaaatggaacagcaacaattagaggaacagaagaagaaagaaaaattggagagaaaaaaggagtctttaaaagttaaaaagggtaaaaattcaattgatgcaagtgaagagaagccagttatgaggaaaaaaagaggaagagaagatgaatcatacaatatttcagaggtcatgtcaaaagaggaaattttgtctgtggctaaaaaaaataaaaaggagaatgaggatgaaaactcctcctctactaatctctgtgtggaagatcttcagaaaaataaagattcgaatagtataattaaagatagattgtctgaaacggttaggcagaatactaaattcttttttgacccagtccggaagtgtaatggtcagccagtaccttttcaacaaccaaagcacttcactggaggagtgatgcgatggtaccaagtagaaggcatggaatggcttaggatgctttgggaaaatggaattaatggcattttagcagatgaaatgggattgggtaagacagttcagtgcattgctactattgcattgatgattcagagaggagtaccaggaccttttcttgtctgtggccctttgtctacacttcctaactggatggctgaattcaaaagatttacaccagatatccctacaatgttatatcatggaacccaggaggaacgtcaaaaattggtaagaaatatttacaaacggaaagggactttgcagattcatcctgtggtaatcacgtcatttgaaatagccatgagagaccgaaatgcgttacagcattgctattggaaatacttaatagtagatgaaggacacaggattaagaatatgaagtgccgtctaatcagggagttaaaacgattcaatgctgataacaaacttcttttgactggtactcccttgcaaaacaatttatcagaactttggtcattgctaaactttttgttgccagatgtatttgatgacttgaaaagctttgagtcttggtttgacatcactagtctttctgaaactgctgaagatattattgctaaagaaagagaacagaatgtattgcatatgctgcaccagattttaacacctttcttattgagaagactgaagtctgatgttgctcttgaagttcctcctaaacgagaagtagtcgtttatgctccactttcaaagaagcaggagatcttttatacagccattgtgaaccgtacaattgcaaacatgtttggatccagtgagaaagaaacaattgagttaagtcctactggtcgaccaaaacgacgaactagaaaatcaataaattacagcaaaatagatgatttccctaatgaattggaaaaactgatcagtcaaatacagccagaggtggaccgagaaagagctgttgtggaagtgaatatccctgtagaatctgaagttaatctgaagctgcagaatataatgatgctacttcgtaaatgttgtaatcatccatatttgattgaatatcctatagaccctgttacacaagaatttaagatcgatgaagaattggtaacaaattctgggaagttcttgattttggatcgaatgctgccagaactaaaaaaaagaggtcacaaggtgctgcttttttcacaaatgacaagcatgttggacattttgatggattactgccatctcagagatttcaacttcagcaggcttgatgggtccatgtcttactcagagagagaaaaaaacatgcacagcttcaacacggatccagaggtgtttatcttcttagtgagtacacgagctggtggcctgggcattaatctgactgcagcagatacagttatcatttatgatagtgattggaacccccagtcggatcttcaggcccaggatagatgtcatagaattggtcagacaaagccagttgttgtttatcgccttgttacagcaaatactatcgatcagaaaattgtggaaagagcagctgctaaaaggaaactggaaaagttgatcatccataaaaatcatttcaaaggtggtcagtctggattaaatctgtctaagaatttcttagatcctaaggaattaatggaattattaaaatctagagattatgaaagggaaataaaaggatcaagagagaaggtcattagtgataaagatctagagttgttgttagatcgaagtgatcttattgatcaaatgaatgcttcaggaccaattaaagagaagatggggatattcaagatattagaaaattctgaagattccagtcctgaatgtttgttttaaagtggagctcaagaatagcttttaaaagttcttatttacatctagtgatttccctgtattgggtttgaaatactgattgtccacttcaccttttttattatatcagttgacatgtaactagtaccatgcgtacttaaatagatggtaattttctgagccttaccaagaacaaagaagtatccatattaagtttagattttcagttaatttttgagactgagtagtattcttggatacaggctgatgtgtacttaaccacttccagatttatacagtcttcctgtggaagtttagtaaatgtctttttccctcctttcttctagtaatgcagttcatgggctttaggtacttcagttatgaagtaggcttttcatggggagagattgggattatgctctctgttgtttaagaaactgtttgattttagagtctatttctatgagatagtttaccaaataaatgttccttataag

SEQ ID NO: 3017 - DNA, 1462 bp, Homo sapiens
gcccgcgccgcgccgctctttctccgacagctgccgggggtgccctgcaagctgttccgcgcgtcctgcccgtctgtccccgcgggtcgtcgcccgccacagccgcgccatgaccacccagcagatagacctccagggcccggggccgtggggcttccgcctcgtgggcggcaaggacttcgagcagcctctcgccatttcccgggtcactcctggaagcaaggcggctctagctaatttatgtattggagatgtaatcacagccattgatggggaaaatactagcaatatgacacacttggaagctcagaacagaatcaaaggctgcacagacaacttgactctcactgtagccagatctgaacataaagtctggtctcctctggtgacggaggaagggaagcgtcatccatacaagatgaatttagcctctgaaccccaggaggtcctgcacataggaagcgcccacaaccgaagtgccatgccctttaccgcctcgcctgcctccagcactactgccagggtcatcacaaaccagtacaacaacccagctggcctctactcttctgaaaatatctccaacttcaacaatgccctggagtcaaagactgctgccagcggggtggaggcgaacagcagacccttagaccatgctcagcctccaagcagccttgtcatcgacaaagaatctgaagtttacaagatgcttcaggagaaacaggagttgaatgagcccccgaaacagtccacgtctttcttggttttgcaggaaatcctggagtctgaagaaaaaggggatcccaacaagccctcaggattcagaagtgttaaagctcctgtcactaaagtggctgcgtcgattggaaatgctcagaagttgcctatgtgtgacaaatgtggcactgggattgttggtgtgtttgtgaagctgcgggaccgtcaccgccaccctgagtgttatgtgtgcactgactgtggcaccaacctgaaacagaagggccatttctttgtggaggatcaaatctactgtgagaagcatgcccgggagcgagtcacaccacctgagggttatgaagtggtcactgtgttccccaagtgagccagcagatctgaccactgttctccagcaggcctctgctgcagctttttctctcagtgttctggccctctcctctcttgaaagttctctgcttactttggttttccctctgcttgtaaaacattgagtcccctccctgccttggttaattgactcacaccagctgtgcgatgcccgcttttacaattaaaggaaaactgttttgttcagtgtcaccttgtcagcaacactgtgtcccttcgccccaccgttcttctctgctgcatttggacatcagccaaatttgaacccaatcaaatataacgtgtctgacactgattttgtttttactcaataaatgtatagactacaaaaaaaaaaaaa

SEQ ID NO: 3018 - protein, 329 aa, Homo sapiens
MTTQQIDLQGPGPWGFRLVGGKDFEQPLAISRVTPGSKAALANLCIGDVITAIDGENTSNMTHLEAQNRIKGCTDNLTLTVARSEHKVWSPLVTEEGKRHPYKMNLASEPQEVLHIGSAHNRSAMPFTASPASSTTARVITNQYNNPAGLYSSENISNFNNALESKTAASGVEANSRPLDHAQPPSSLVIDKESEVYKMLQEKQELNEPPKQSTSFLVLQEILESEEKGDPNKPSGFRSVKAPVTKVAASIGNAQKLPMCDKCGTGIVGVFVKLRDRHRHPECYVCTDCGTNLKQKGHFFVEDQIYCEKHARERVTPPEGYEVVTVFPK

SEQ ID NO: 3019 - DNA, 405 bp, Homo sapiens
atggaagattcgatggacatggacgccgacaaagatgatcactttaaggtggataatgatgaaaatgagcaccagttatccttaagaacgccaacagtttcccttggggtctttgaaataacaccaccagtgcttttatggttgaagtgtggttcagggccagtgcatattagtggacagcatttagtagctgtggaggaagatgcagagtcagaagatgaagaggaggaggatgtgaaactcttaaggatatctggaaaattaaaaggacaagaatccttcaaaaaacaggaaaaaactcgtaaaacaccaaaagggcctagttctgtagaagacattaaatcaaaaatgcaagcaagtatagaaaaaggtggttctcttcccaaatggaggaagtctctttag

SEQ ID NO: 3020 - DNA, 4517 bp, Homo sapiens
attctggctgtgactcagtcactgacactgagcctgaggacgagaaggttgtttcctactcgaagcagcagaacctgccgacggtgacttcacctgggaacctgatggtggtgcagccggaccgcattcgctgtggggcagaaaccactgtctatgttattgtgagatgtaagctggatgacagggtggcgacagaagcagagttttctcctgaggattctccctctgtaaggatggaagccaaggtggagaatgagtacaccatttcagtgaaggctcccaacctttcatctgggaacgtttctctgaagatatattctggagacttagtggtgtgtgaaaccgttatcagctattatactgacatggaagaaattgggaatttattgtccaatgccgcgaatcctgtggaattcatgtgtcaggcctttaaaattgtgccctacaacacagagacccttgataaactgctaaccgaatccctgaagaacaatatccctgcaagcggactgcacctctttggaatcaaccagctggaagaagaagatatgatgacaaatcagagggatgaagagctgcccaccctgttgcattttgctgcgaagtatggactgaagaacctcactgccttgttgctcacctgcccaggagccctgcaggcgtacagcgtggccaacaagcatggccactaccccaacaccatcgctgagaaacacggcttcagggacctgcggcagttcatcgacgagtatgtggaaacggtggacatgctcaagagtcacattaaagaggaactgatgcacggggaggaggctgatgctgtgtacgagtccatggcccacctttccacagacctgcttatgaaatgctcgctcaaccccggctgtgacgaggatctctatgagtccatggctgcctttgtcccagctgccactgaagacctctatgttgaaatgcttcaggccagtacatctaacccaatccctggagatggtttctctcgggccactaaggactctatgatccgcaagtttttagaaggcaacagcatgggaatgaccaatctggagagagatcagtgccatcttggtcaggaagaagatgtttatcacacggtggatgacgatgaggccttttctgtggacctggccagcaggccccctgtcccagtgcccagaccagagaccactgctcctggtgctcaccagctgcctgacaacgaaccatacatttttaaagtttttgcagaaaaaagtcaagagcggcctgggaatttctacgtttcctcagagagcatcaggaaagggccgcccgtcagaccatggagggacaggccccagtcgagtatatatgacccttttgcgggaatgaaaacgccaggccagcggcagcttatcaccctccaggagcaggtgaagctgggcattgtcaacgtggatgaggctgtgctccacttcaaagagtggcagctcaaccagaagaaacgatcggagtcctttcgtttccagcaggaaaatcttaaacggctaagagacagcatcacccgaagacagagagagaagcaaaaatcaggaaagcagacagacttggagatcacggtcccaattcggcactcacagcacctgcctgcaaaagtggagtttggagtctatgagagtggccccaggaaaagtgtcattccccctaggacggagctgagacgaggagactggaaaacagacagcacctccagcacagcaagtagcacaagtaaccgctccagcacccggagcctcctcagtgtgagcagcgggatggaaggggacaacgaggataatgaagtccctgaggttaccagaagtcgcagtccaggccccccacaagtggatgggacacccaccatgtccctcgagagaccccccagggtgcctccgagagctgcctcacagaggcctccgaccagggagaccttccatcctcctccacctgttccacccagaggacgctgattccacctcctaaaacctgcctacttcaggactttaagactcacagtcttcagcctgttaatgatgtcttcatgttgagttttatagcatgactgttgaccttaagatccattctcattgctgataatgctgcagccctgctggtttgggcttgcctcgaagattttattaaggcacgaagaagtgaaaaactaagggcttcattcaccatcaccaagtatatcgaaccatatacttgtttgccaaaaggatgaagacttaatcgaaatacttacctctaatttgccatatcagaagcctaaaaagaatgatcataaatgtacttcaccagtgattttactgaaatgcacttatattagtctttatgtatttgctagttcagcctgatttctagaagaggttatagtgtgagacttgtagtattcaagtaagataagtgacctaattttaaaataattcttctacttttctgtatattcagcagggtatttaagtgctagggctggtcacacacaaccaactgaaaaagactagagggattagtacaaactcctcttatacagaaggcaaatctgaggttccacagaagtctggaaccaagactattcagttggttaaataaagaggttagtctagactgggcctgctcattctaggtcaccacattttccatctccaaatagccaggccctctctccctcaagaaatgcccagatgtagaaattcatcagtgcctattggtcttccagaattttccatcttccgtatctcccaggcatgagactaccaagtttgtttgttttctttccaatttgggaatttatacttcagtatggtttcaacgcagttatgtttccagagaacatctagaagtggctggaaaccagaagctggggattccagggaccccacttagtgctctatttcctttataggttttatttctggtcatagagagagaaggacctttgactttttcttcgttgaggcttctgaggaggaaaaacaaacctaaaatagaaatacagtcagcctttcaaatccatgggttctgtgtccgtggattcaaccaaccttggatcaaaaatatttgaaaaaaaatctacaaagtttcaaaaagcaaaacttgaatttgctgcatgccaagaagtatgttgaattcatgtaaatgaagtgatgtgtaggcattgtattagatattataagaaatctagaaatgatttaaagcatacaggaggatgtgcataggttatatgcaaatactatgctattttatatatgggacttgagcatttgtggattttgatactgggggatcctggaaccaatcccccatggataccaaagtacgactgtagttatctattttttacatacttattattaccaccatgctcagtaagtccatttttgcatggaatatggagccttaaaacatgtcatgaatttggagtccctggcacataaatctaccttcaaatcagaggtccttaatgatgcctaaacatacagtaaaattagaatcagaaatacttctttaaaaaatattcaaaatgtgtttgtttcccatgggattattctctatcccacacgaatgtaaaaaaatccacattaatgatccatttaagtatagttttattgggtccttttctaatgattaaaggttctttctcaatttcattcctcagtcctgcaagtaaggactcatactgaagagtactgaaacaaggacttcttgtcagaaacagcttctggaatcttgggttttgtttttgttttttgacaaaatacactattggccatgtccatcacgagagtgtttgtagtaattaattaccttgtacaggacctggcacttagtagcattcttcaaatgttccctcagtgatccttttactctccttgtcacttatttgggagaaataggggcacgtgagataagaagaagaataattttgatgttggtatgcttgccctgttacttatagacagtctttgtcataggcaaacttgaatttgatttaaaatagggctgggaaaaatattcaataactgtaagcccccttttggatgccaaacttagaattttgtacattctctgatgaacaagcatttagatcgtaacatggtaaagcctattaccagccaatgttgttagcatctttgtatgcacatcactgtttgtgcaatatatgaatattttgttgcattgtattcttatataaaaataagtagaaaacataaaattgaaattgctgatgagaagccttgtctcgtgaatgtgatacacttgagacacggatggaactgatcaggagtgccaagtcaaaagcagcagatcttaagccctcactggttgttcctttaacatccaaaatggttggttatatgtaaaagaagaaaatgaaataatctggatgaaacactgggactgtgttatcaaagaatgtctgtagtgatgaggtgaaaattttcattttccagaaacagaactgctcatttataacataaatatattcaacttccaca

SEQ ID NO: 3021 - protein, 627 aa, Homo sapiens
MVVQPDRIRCGAETTVYVIVRCKLDDRVATEAEFSPEDSPSVRMEAKVENEYTISVKAPNLSSGNVSLKIYSGDLVVCETVISYYTDMEEIGNLLSNAANPVEFMCQAFKIVPYNTETLDKLLTESLKNNIPASGLHLFGINQLEEEDMMTNQRDEELPTLLHFAAKYGLKNLTALLLTCPGALQAYSVANKHGHYPNTIAEKHGFRDLRQFIDEYVETVDMLKSHIKEELMHGEEADAVYESMAHLSTDLLMKCSLNPGCDEDLYESMAAFVPAATEDLYVEMLQASTSNPIPGDGFSRATKDSMIRKFLEGNSMGMTNLERDQCHLGQEEDVYHTVDDDEAFSVDLASRPPVPVPRPETTAPGAHQLPDNEPYIFKVFAEKSQERPGNFYVSSESIRKGPPVRPWRDRPQSSIYDPFAGMKTPGQRQLITLQEQVKLGIVNVDEAVLHFKEWQLNQKKRSESFRFQQENLKRLRDSITRRQREKQKSGKQTDLEITVPIRHSQHLPAKVEFGVYESGPRKSVIPPRTELRRGDWKTDSTSSTASSTSNRSSTRSLLSVSSGMEGDNEDNEVPEVTRSRSPGPPQVDGTPTMSLERPPRVPPRAASQRPPTRETFHPPPPVPPRGR

SEQ ID NO: 3022 - DNA, 673 bp, Homo sapiens
cgaagatggcggaggtgcaggtcctggtgcttgatggtcgaggccatctcctgggccgcctggcggccatcgtggctaaacaggtactgctgggccggaaggtggtggttgtacgctgtgaaggcatcaacatttctggcaatttctacagaaacaagttgaagtacctggctttcctccgcaagcggatgaacaccaacccttcccgagtcccctaccacttccgggcccccagccgcatcttctggcggaccgtgcgaggtatgctgccccacaagaccaagcgaggccaggccgctctggaccgtctcaaggtgtttgacggcatcccaccgccctacgacaagaaaaagcggatggtggttcctgctgccctcaaggtcgtgcgtctgaagcctacaagaaagtttgcctatctggggcgcctggctcacgaggttggctggaagtaccaggcagtgacagccaccctggaggagaagaggaaagagaaagccaagatccactaccggaagaagaaacagctcatgaggctacggaaacaggccgagaagaacgtggagaagaaaattgacaaatacacagaggtcctcaagacccacggactcctggtctgagcccaataaagactgttaattcctaaaaaaaaaaaaaaaaaaaaaaaaaagaaaaa

SEQ ID NO: 3023 - protein, 203 aa, Homo sapiens [sequence omitted]

SEQ ID NO: 3024 - DNA, 4396 bp, Homo sapiens
ggcacgaggcacgtgggttctgagcgtgtttctacgtccctggaagccggtcatttaagctcattcctcgccacggcttagtcaacatgggtcgctcgggaaagttgccctctggtgtctcagctaagttgaagcgctggaagaaaggccacagcagcgacagcaaccccgccatctgccgccaccgtcaggccgcccgcagccgcttcttcagccggccgtcaggaaggagtgacctgacagtcgatgctgtgaagttacataatgagctgcagtcagggtccttgcgcttgggcaaaagcgaagccccggagacgcccatggaagaagaggcggagctggttctcaccgagaagtcctcgggtaccttcctgagtggcctttccgactgcacaaacgtcaccttcagcaaagtacagcgcttctgggagtccaactcggctgcccacaaggagatctgtgctgttctggctgctgtcactgaggtgattcgctcccagggagggaaggagacggagactgagtacttcgctgctctgatgacaacaatggaagcagtggagtccccggagtccctggccgccgttgcttacctgctgaaccttgtcctgaagcgtgttcccagccctgtgcttattaagaagttctctgatacctccaaagccttcatggatatcatgtcagctcaggccagcagcggctccacctctgtcctccgatgggtcctttcctgcctggccacccttctgcggaagcaagacctggaggcctggggctaccccgtgacccttcaggtgtaccatgggctgctgagcttcacggtgcatcccaagcccaagatccggaaggctgcccagcatggagtatgctcagtcctcaagggcagtgaattcatgtttgaaaaggcccctgcccatcatcctgctgccatttccactgccaagttctgcatccaggagattgagaagtctggaggctccaaggaggccaccaccacgctgcacatgctgacgctgctgaaggacctgctgccctgcttcccggaaggcctggtgaagagctgcagtgagactctcctcagggtcatgaccttgagccatgtgctggtgacagcctgtgccatgcaggcctttcacagcctcttccacgccaggcctggcctgagcaccctgtcagcagagctcaacgcccagatcatcacggccctgtacgactatgttcccagtgagaatgatttacaacccctgctagcctggcttaaggtcatggagaaagcccacatcaacctggtgaggttgcagtgggacctggggctaggccacctccctcgcttttttggaactgcggtgacctgcctcctttccccacactcgcaagtgctgactgctgctacgcagagcctcaaggagatcctgaaggaatgcgtggctccccacatggctgacattggctccgtgacctcctcggcctcaggccctgcccaatctgttgccaagatgttcagggcagtggaggagggcctgacgtacaaattccatgcggcctggagctccgtgttgcagctgctgtgtgtcttcttcgaggcgtgtgggagacaggcccaccctgtgatgaggaagtgcctccagtccctgtgtgacctgcgcctctcccctcatttcccccacacggcggctcttgaccaggcagtgggggctgcggtgaccagtatgggacctgaggtggtgctgcaggctgtgcctttggaaattgatggctctgaggagactctggatttcccacggagctggctgctgcctgtcatccgagaccatgttcaggaaacgcgacttggttttttcaccacctacttcttgcccctggctaacaccctgaagagcaaagccatggacctggctcaggcaggcagcacagtggaatctaagatctacgacacactccagtggcagatgtggacactcctgcctgggttctgcacaaggcctacagatgtggccatctccttcaaagggctggcacggacgctgggcatggccatcagcgagcgtccagacctgagggtcaccgtgtgccaggccctgcgcaccctcatcaccaagggctgccaggcagaggctgaccgtgctgaagtgagtcgctttgccaagaactttctgccgatcctcttcaacctgtatgggcagcccgtggcagccggggacactccagcccctcgccgggctgtgctggaaaccatcagaacttacctcaccatcactgacactcagttggtgaacagtctcctggaaaaagccagtgagaaggtgctcgaccctgccagctctgactttaccagattgtctgtcctggacctggtcgtggccttggctccgtgtgctgacgaagctgccatcagtaagctatactccaccatccggccctacctagagagcaaggcccacggggtgcagaagaaggcctaccgagtgctggaggaggtgtgtgccagtcctcagggccccggggccctcttcgtgcagagccacctggaggacctgaagaagacactgctggactcgctgcggagcacctcctcacccgccaagaggccccgtttgaagtgcctcctacacatcgtgaggaagctctcagctgaacacaaggagttcatcactgccctcatcccagaggtgatcctgtgcaccaaggaggtgtcggtgggcgcacggaagaacgcttttgcactgctcgtggagatgggccatgctttcctaaggtttggctcgaaccaggaagaggccctgcagtgctacctcgtcctgatctaccctggcctggtgggcgcggtgaccatggtcagctgcagcatcctggccctgacccacctccttttcgagtttaaaggtctgatggggaccagtacagtggagcagctgctggagaatgtgtgcctgcttctggcctcccgcacccgtgacgtggtcaagtctgcactgggcttcatcaaggtggcagtgactgtcatggacgtggcgcacctggccaaacatgtgcagctggtgatggaagccattgggaagctttcagatgacatgcggcggcacttccgcatgaagcttcggaacctgttcaccaagttcatccgcaagtttggatttgagctggtgaaaaggctgttgcccgaggagtaccacagagtcctggtcaacatccggaaagctgaggcccgggccaagaggcaccgagccctgagccaggctgccgtggaggaggaagaagaggaggaggaggaggaggagcccgcccagggcaaaggtgacagcattgaggagattttagctgactcagaggacgaggaggacaatgaggaggaggaaagaagccgaggcaaggagcagcggaagctggcacgacagaggagccgggcatggctgaaagagggcggtggggacgagcccctcaacttcctggatcccaaggtggcccaacgagtcctggccacgcagccagggccaggccggggcaggaagaaggaccacagcttcaaggtgagcgccgatggccggctgatcataagggaggaggcagacggcaacaagatggaggaagaggaaggtgccaaaggcgaagatgaagagatggctgacccaatggaagatgtgatcatcaggaataaaaagcaccagaagctcaagcaccagaaagaggctgaggaggaggagctggagataccccctcagtaccaagctggaggctctggcattcatcgccctgtggccaagaaggctatgcctggggctgaatacaaggccaagaaagcaaaaggtgatgtgaagaagaaaggccggccggatccctatgcctacatccccctcaacagaagcaagctcaaccgcaggaagaagatgaagctgcagggacagttcaaaggcctggtgaaggctgcccggcgaggttcccaggtgggacacaaaaaccgcagaaaggatcgtcgaccctgaggcccagggcccctgggctgccctgtggtccagtctgaggccctttcagcccccaggctgccttgccaccagctccaggtgctcaagattctggcagagcctggactcaggatgacttggaactagggcttggctctcagaagtcctggattttggaaactccaaatggaatcacccttcagagacatccctggtgcctggagatgggaatgtggcctcagtgcctctgagtaggtgccatgaggcacctttgctttctgcccagagtggccatgagcaccagaacagatgatctccatttccgccagctgcctgtagccacgtggcatcctgcctgtggtctgggtgagatttactgtgaccagatgtagaataaatgtgtctcatcctgcaaaaaaaaaaaaaaaaaaaaaaaa

SEQ ID NO: 3025 - protein, 1297 aa, Homo sapiens
MGRSGKLPSGVSAKLKRWKKGHSSDSNPAICRHRQAARSRFFSRPSGRSDLTVDAVKLHNELQSGSLRLGKSEAPETPMEEEAELVLTEKSSGTFLSGLSDCTNVTFSKVQRFWESNSAAHKEICAVLAAVTEVIRSQGGKETETEYFAALMTTMEAVESPESLAAVAYLLNLVLKRVPSPVLIKKFSDTSKAFMDIMSAQASSGSTSVLRWVLSCLATLLRKQDLEAWGYPVTLQVYHGLLSFTVHPKPKIRKAAQHGVCSVLKGSEFMFEKAPAHHPAAISTAKFCIQEIEKSGGSKEATTTLHMLTLLKDLLPCFPEGLVKSCSETLLRVMTLSHVLVTACAMQAFHSLFHARPGLSTLSAELNAQIITALYDYVPSENDLQPLLAWLKVMEKAHINLVRLQWDLGLGHLPRFFGTAVTCLLSPHSQVLTAATQSLKEILKECVAPHMADIGSVTSSASGPAQSVAKMFRAVEEGLTYKFHAAWSSVLQLLCVFFEACGRQAHPVMRKCLQSLCDLRLSPHFPHTAALDQAVGAAVTSMGPEVVLQAVPLEIDGSEETLDFPRSWLLPVIRDHVQETRLGFFTTYFLPLANTLKSKAMDLAQAGSTVESKIYDTLQWQMWTLLPGFCTRPTDVAISFKGLARTLGMAISERPDLRVTVCQALRTLITKGCQAEADRAEVSRFAKNFLPILFNLYGQPVAAGDTPAPRRAVLETIRTYLTITDTQLVNSLLEKASEKVLDPASSDFTRLSVLDLVVALAPCADEAAISKLYSTIRPYLESKAHGVQKKAYRVLEEVCASPQGPGALFVQSHLEDLKKTLLDSLRSTSSPAKRPRLKCLLHIVRKLSAEHKEFITALIPEVILCTKEVSVGARKNAFALLVEMGHAFLRFGSNQEEALQCYLVLIYPGLVGAVTMVSCSILALTHLLFEFKGLMGTSTVEQLLENVCLLLASRTRDVVKSALGFIKVAVTVMDVAHLAKHVQLVMEAIGKLSDDMRRHFRMKLRNLFTKFIRKFGFELVKRLLPEEYHRVLVNIRKAEARAKRHRALSQAAVEEEEEEEEEEEPAQGKGDSIEEILADSEDEEDNEEEERSRGKEQRKLARQRSRAWLKEGGGDEPLNFLDPKVAQRVLATQPGPGRGRKKDHSFKVSADGRLIIREEADGNKMEEEEGAKGEDEEMADPMEDVIIRNKKHQKLKHQKEAEEEELEIPPQYQAGGSGIHRPVAKKAMPGAEYKAKKAKGDVKKKGRPDPYAYIPLNRSKLNRRKKMKLQGQFKGLVKAARRGSQVGHKNRRKDRRP

SEQ ID NO: 3026 - DNA, 1810 bp, Homo sapiens
aaagatttgggcgagaacttgcgcgggagccggactgagcggtgcgagcgcgcaggcgcggccgacggggcgggctgctactccggaatctgctaatcccagtcggtgccgcatccccagcccgccgccatggccgcctacaaactggtgctgatccggcacggcgagagcgcatggaacctggagaaccgcttcagcggctggtacgacgccgacctgagcccggcgggccacgaggaggcgaagcgcggcgggcaggcgctacgagatgctggctatgagtttgacatctgcttcacctcagtgcagaagagagcgatccggaccctctggacagtgctagatgccattgatcagatgtggctgccagtggtgaggacttggcgcctcaatgagcggcactatgggggtctaaccggtctcaataaagcagaaactgctgcaaagcatggtgaggcccaggtgaagatctggaggcgctcctatgatgtcccaccacctccgatggagcccgaccatcctttctacagcaacatcagtaaggatcgcaggtatgcagacctcacagaagatcagctaccctcctgtgagagtctgaaggatactattgccagagctctgcccttctggaatgaagaaatagttccccagatcaaggaggggaaacgtgtactgattgcagcccatggcaacagcctccggggcattgtcaagcatctggagggtctctctgaagaggctatcatggagctgaacctgccgactggtattcccattgtctatgaattggacaagaacttgaagcctatcaagcccatgcagtttctgggggatgaagagacggtgcgcaaagccatggaagctgtggctgcccagggcaaggccaagaagtgaaggccggcggggaggatactgtccccaggagcaccctccctgcccgtcttgtccctctgcccctcccacctgcacatgtcacactgaccacatctgtagacatcttgagttgtagctgcagacggggaccagtggctcccattttcattttagccattttgtcgcctgcacccactcccttcatacaatctagtcagaatagcagttctagagcacaggttctcagtctaagctatggaaaagctccccttatccaacagagtttaaaagtagtgacttgggtttttgcgagtgctttgtttactaaggactttggggaggaaccatgctaagccatgaccagtgaggagaagcaacagagcctgtctgtccccatgagcggagtctgtcctctgctcttctgcagtcaggtcactgcctactgcctgggggctctagtcattccagtggaagacgaatgtaacctgcgtggtgatgtgacaactgtttcctccctgaccccagaggatctggctctaggttgggatcaatcctgaatttcgttatgtgttaatttacttttattaaaaaagtatagtatatataatacaaaacaataacccttctggggtttcttgtggcggttgaaatagtcccacatgtggtcatcagaaaataagccattcctcataccaatataggatcagctccttgacctctgaggggcaggagtgcttcctggtgtgtgtattagaatcccttcctgccttgtttcatggcagtgaaatgcctcttggtcctgtccaagtgtatctttcactgatttctgaatcatgttctagttgcttgaccctgccacatgggtccagtgttcatctgagcataactgtactaaatcctttttccatatcagtataataaaggagtgatgtgcaat

SEQ ID NO: 3027 - protein, 254 aa, Homo sapiens
MAAYKLVLIRHGESAWNLENRFSGWYDADLSPAGHEEAKRGGQALRDAGYEFDICFTSVQKRAIRTLWTVLDAIDQMWLPVVRTWRLNERHYGGLTGLNKAETAAKHGEAQVKIWRRSYDVPPPPMEPDHPFYSNISKDRRYADLTEDQLPSCESLKDTIARALPFWNEEIVPQIKEGKRVLIAAHGNSLRGIVKHLEGLSEEAIMELNLPTGIPIVYELDKNLKPIKPMQFLGDEETVRKAMEAVAAQGKAKK

SEQ ID NO: 3028 - DNA, 1794 bp, Homo sapiens
ggttgaggatgggctggcggcgggtccgggtccgctgcctggcgctgcgggcggcgggccatggtggtttggattgagccgggcccggccggggcgccgagtcggagggggtggcagtgagcggcggcagaggctacggggctcggtttggctgactggggagtcggcaggcggcaggaaccatgcgaggccagcggagcctgctgctgggcccggcccgcctctgcctccgcctccttctgctgctgggttacaggcgccgctgtccacctctactccggggtctagtacagcgctggcgctacggcaaggtctgcctgcgctccctgctctacaactcctttgggggcagtgacaccgctgttgatgctgcctttgagcctgtctactggctggtagacaacgtgatccgctggtttggagtggtgttcgtggtcctggtgatcgtgctgacaggctccattgtagctatcgcctacctgtgtgtcctgcctctcatcctccgaacctactcagtgccacgactctgctggcatttcttctatagccactggaatctgatcctgattgtcttccactactaccaggccatcaccactccgcctgggtacccaccccagggcaggaatgatatcgccaccgtctccatctgtaagaagtgcatttaccccaagccagcccgaacacaccactgcagcatctgcaacaggtgtgtgctgaagatggatcaccactgcccctggctaaacaattgtgtgggccactataaccatcggtacttcttctctttctgctttttcatgactctgggctgtgtctactgcagctatggaagttgggaccttttccgggaggcttatgctgccattgagaaaatgaaacagctcgacaagaacaaactacaggcggttgccaaccagacttatcaccagaccccaccacccaccttctcctttcgagaaaggatgactcacaagagtcttgtctacctctggttcctgtgcagttctgtggcacttgccctgggtgccctaactgtatggcatgctgttctcatcagtcgaggtgagactagcatcgaaaggcacatcaacaagaaggagagacgtcggctacaggccaagggcagagtatttaggaatccttacaactacggctgcttggacaactggaaggtattcctgggtgtggatacaggaaggcactggcttactcgggtgctcttaccttctagtcacttgccccatgggaatggaatgagctgggagccccctccctgggtgactgctcactcagcctctgtgatggcagtgtgagctggactgtgtcagccacgactcgagcactcattctgctccctatgttatttcaagggcctccaagggcagcttttctcagaatccttgatcaaaaagagccagtgggcctgccttagggtaccatgcaggacaattcaaggaccagcctttttaccactgcagaagaaagacacaatgtggagaaatcttaggactgacatccctttactcaggcaaacagaagttccaaccccagactaggggtcaggcagctagctacctaccttgcccagtgctgacccggacctcctccaggatacagcactggagttggccaccacctcttctacttgctgtctgaaaaaacacctgactagtacagctgagatcttggcttctcaacagggcaaagataccaggcctgctgctgaggtcactgccacttctcacatgctgcttaagggagcacaaataaaggtattcgatttttaaagat

SEQ ID NO: 3029 - DNA, 3446 bp, Homo sapiens
tcgcgttatggccgctgccgcggctgtggaggcggcggcgcctatgggtgccctatggggcctcgtgcacgacttcgtcgtgggtcagcaagagggccccgctgaccaggtggctgcagatgtgaaatctggcaactatacagtgttacaagttgtggaagcccttgggtcctctctagagaatccagaaccccgaactcgggcacgaggaatccagcttttgtcacaggtgctactccactgtcacaccttgctcctggagaaggaagtggtacacctgatactgttctatgagaaccggctgaaggaccatcatcttgtgatcccatctgtcctgcagggtttgaaggcacttagcctgtgtgtggccctgcccccagggctggctgtttctgtgcttaaagccatcttccaggaagtgcatgtacagtccctgccacaggtggaccgacacacagtctacaatatcatcaccaattttatgcgaacccgggaagaagagctaaagagcctaggagctgacttcacctttggcttcatccaggtgatggatggggaaaaggatccccgtaatcttctggtggccttccgcatcgtccatgacctcatctccagggactatagcctgggaccctttgtggaggagttgtttgaagtgacatcctgttatttccctatcgattttacccctccacctaatgatccccatggtatccagagagaagacctcatcctgagtcttcgcgctgtgctggcttctacaccacgatttgctgagtttctgctgcccctgttgattgagaaagtggattctgaggttctgagtgccaagttggattctctacagactctgaatgcttgctgtgctgtgtatggacagaaggaactgaaggacttcctccccagcctttgggcttctatccgcagagaggtgttccagacggcaagtgagcgggtggaggcagagggcctggcggccctccactccctgactgcgtgtttgtctcgctctgtgctgagggctgatgctgaggacctccttgactccttccttagcaacattctacaggactgcaggcaccacctgtgtgaaccggacatgaaactggtgtggcctagtgcaagctgttgcaggcagctgcaggtgcatctgcccgggcctgtgactctgtcaccagcaatgtactgcctttactgctggaacagttccacaagcacagtcagagcagccagcggcgggacaatccttgaaatgctcctgggtttcttgaagctgcagcagaaatggagctatgaagacaaagatcaaaggcctctgaatggcttcaaggaccagctgtgctcactggtattcatggctctaacagaccccagcacccagcttcagcttgttggcatccgtacactgacagtcttgggtgcccagccagatctcctatcttatgaggacttggagctggcagtgggtcacctgtacagactgagcttcctgaaggaggattcccagagttgcagggtggcagcactggaagcatcaggaaccctggctgctctctaccctgtggccttcagcagccacctcgtacccaagctcgctgaggagctgcgtgtaggggagtcaaatttgactaacggagatgagcccacccaatgctcccggcatctgtgctgtctgcaagccttgtcagctgtatcaacacatcccagcatcgtcaaggagacactgcctctgctgctgcagcatctctggcaagtgaacagagggaatatggttgcacaatccagtgacgttattgctgtctgtcagagcctcagacagatggcagaaaaatgtcagcaggaccctgagagttgctggtatttccaccagacagctataccttgcctgcttgccttggctgtgcaggcctctatgccagagaaggagccctcagttctgagaaaagtactattggaggatgaggtgttggctgccatggtgtctgtcattggcactgctacaacccacctgagccctgagttagctgcccagagtgtgacacacattgtgcccctcttcttggatggcaacgtgtcctttctgcctgaaaacagcttcccgagcagattccagccattccaggatggctcctcagggcagaggcggctgattgcactgcttatggcctttgtctgctccctgcctcgaaatgtggaaatccctcagctgaaccaactcatgcgggagcttttggaactgagctgctgccacagctgccccttttcttccaccgctgctgccaagtgctttgcaggactcctcaacaagcaccctgcagggcagcagctggatgaattcctacagctagctgtggacaaagtggaggctggcctgggctctgggccctgtcgtagtcaggccttcactcttcttctctgggtaacaaaggccctagtgctcagataccatcctctcagctcctgccttacagcccggctcatgggcctcctgagtgacccagaattaggtccagcagcagctgatggcttctctctgctcatgtctgactgcactgatgtgctgactcgtgctggccatgctgaagtgcggatcatgttccgccagcggttcttcacagataatgtgcctgctttggtccagggcttccatgctgctccccaagatgtgaagccaaactacttgaagggtctttctcatgtacttaacaggctgcccaagcctgtactcttgccagagctgcccacgcttctttccttgctgctggaggccctgtcctgccctgactgtgtggtgcagctctccaccctcagctgccttcagcctcttctactggaagcaccccaagtcatgagtcttcacgtggacaccctcgtcaccaagtttctgaacctcagctctagcccttccatggctgtccggatcgccgcactgcagtgcatgcatgctctcactcgcctgcccacccctgtgctgctgccgtacaaaccacaggtgattcgggccttagccaaacccctggatgacaagaagagactggtgcgcaaggaagcagtgtcagccagaggggagtggtttctgttggggagccctggcagctgagccctcagtcctggcctagactgttctgacaatctaacctgggattactaactgttgagccatcttccccaaagcagggaaaccactggtctctgactgcctttcccacagacacagcacaaatgctaggcctctgttgcatggctgtacaaagaacataagagtccatatttctagtggatttgtaaaataagtgtgtgtgagacacttgcgtttgaagaaagatctagggtcctgggtctcttgcatttatatgtcagaaaaggggcgatatgctgctgaggggtgagtgcatatgagtgtggccctgaggaccagggctggcagatgttgtctacctgctgag

SEQ ID NO: 3030 - protein, 1030 aa, Homo sapiens
MAAAAAVEAAAPMGALWGLVHDFVVGQQEGPADQVAADVKSGNYTVLQVVEALGSSLENPEPRTRARGIQLLSQVLLHCHTLLLEKEVVHLILFYENRLKDHHLVIPSVLQGLKALSLCVALPPGLAVSVLKAIFQEVHVQSLPQVDRHTVYNIITNFMRTREEELKSLGADFTFGFIQVMDGEKDPRNLLVAFRIVHDLISRDYSLGPFVEELFEVTSCYFPIDFTPPPNDPHGIQREDLILSLRAVLASTPRFAEFLLPLLIEKVDSEVLSAKLDSLQTLNACCAVYGQKELKDFLPSLWASIRREVFQTASERVEAEGLAALHSLTACLSRSVLRADAEDLLDSFLSNILQDCRHHLCEPDMKLVWPSASCCRQLQVHLPGPVTLSPAMYCLYCWNSSTSTVRAASGGTILEMLLGFLKLQQKWSYEDKDQRPLNGFKDQLCSLVFMALTDPSTQLQLVGIRTLTVLGAQPDLLSYEDLELAVGHLYRLSFLKEDSQSCRVAALEASGTLAALYPVAFSSHLVPKLAEELRVGESNLTNGDEPTQCSRHLCCLQALSAVSTHPSIVKETLPLLLQHLWQVNRGNMVAQSSDVIAVCQSLRQMAEKCQQDPESCWYFHQTAIPCLLALAVQASMPEKEPSVLRKVLLEDEVLAAMVSVIGTATTHLSPELAAQSVTHIVPLFLDGNVSFLPENSFPSRFQPFQDGSSGQRRLIALLMAFVCSLPRNVEIPQLNQLMRELLELSCCHSCPFSSTAAAKCFAGLLNKHPAGQQLDEFLQLAVDKVEAGLGSGPCRSQAFTLLLWVTKALVLRYHPLSSCLTARLMGLLSDPELGPAAADGFSLLMSDCTDVLTRAGHAEVRIMFRQRFFTDNVPALVQGFHAAPQDVKPNYLKGLSHVLNRLPKPVLLPELPTLLSLLLEALSCPDCVVQLSTLSCLQPLLLEAPQVMSLHVDTLVTKFLNLSSSPSMAVRIAALQCMHALTRLPTPVLLPYKPQVIRALAKPLDDKKRLVRKEAVSARGEWFLLGSPGS

SEQ ID NO: 3031 - DNA, 972 bp, Homo sapiens
cgctgcttaggctccgcggcctccaagctgtagctatgacggcgcgcgggactccgagccgcttcttggccagcgttctccacaacggactgggtcgctatgtgcagcagctgcagcgtctgagcttcagcgtcagccgcgacggcgcctcgtctcgcggcgccagggagttcgtggagcgggaggtgatcgacttcgcccgacggaatccaggggtcgtaatatatgtaaactcgcgtccgtgctgcgtgcccagagtagtggccgaataccttaacggggctgtgcgcgaggagagcatccactgcaagtcggtcgaggagatctcgacgctggtgcagaagctggccgaccagtcgggcttggacgtgatccgcatccgcaagcccttccacaccgacaaccctagcatccagggccagtggaccccttcaccaacaagccgaccacgttccgcgggctacgcccccgagaggttcaggatcctgccccagcccaggtgcaagcacagtgaagagttgccccaccaactgcagccccaggctttggactgttactccggtaaaggtggttcttcccctttgggattccaagcccaggcaaatggaacccatcaatgggcaagttgacagaggttctgcttgggataatgaagagctgcctgtttctttccagtgcctgcttctgggggcagtgaccttgtgaaccactcatttttatgcaagtggcatccctaaaacctgagatgaggaagacttcaagggttttacagggcccttgttttttaaatccaaattgataataatgatctcaaaacacagtgagaggtctgaaggctggcttctgaagaatccctgatgtcttattggaacaaccactgagctacggagagctctgctgtgatgggctaggcactttatatctgtgtgaatacagatttataaaacaggttaataaacttatccaaggtca

SEQ ID NO: 3032 - protein, 197 aa, Homo sapiens
MTARGTPSRFLASVLHNGLGRYVQQLQRLSFSVSRDGASSRGAREFVEREVIDFARRNPGVVIYVNSRPCCVPRVVAEYLNGAVREESIHCKSVEEISTLVQKLADQSGLDVIRIRKPFHTDNPSIQGQWTPSPTSRPRSAGYAPERFRILPQPRCKHSEELPHQLQPQALDCYSGKGGSSPLGFQAQANGTHQWAS

SEQ ID NO: 3033 - DNA, 2463 bp, Homo sapiens
ctgatcaggaggaggttcagctggctgatacaatgtttggccttaccaaggttacagatgacacactcaagcgtttcagtgtgcgatatctgcgacctgctcgcagtcttgtcttcccttggttctcccctgggggttcaggattacgaggcctgaagctcctagaggctaaatgccagggggatggagtgagctacgaggaaaccactattccccgacccagcgcctaccacaatctgtttggattaccactgattagtcgtcgagatgctgaggtggtactgacgagtcgtgagcttgacagcctggccttgaaccagtccacggggctgcctacccttactctaccccgaggaacgacctgcttaccccctgccttactcccttacctggaacagttccggcggattgtattctggttgggggatgaccttcggtcctgggaagccgccaagttgtttgcacgaaaactgaaccccaaacgatgcttcttggtgcgaccaggagaccagcaaccccgtcccctggaggccctgaacggaggcttcaatctttctcgtattcttcgtaccgccctgcctgcctggcacaagtccatcgtatctttccggcagcttcgggaggaggtgctaggagaactgtcgaatgtggagcaagcagctggcctccgctggagccgctttccagacctcaatcgtatcttgaagggacatcgaaagggcgagctgacggtcttcacagggccaacaggcagtggaaagacgacattcatcagtgagtatgccctggatttgtgttcccagggggtgaacacactgtggggtagcttcgagatcagcaatgtgagactagcccgggtcatgctgacacagtttgccgaggggcggctggaagatcaactggacaaatatgatcactgggctgaccgctttgaggacctgcccctctatttcatgactttccatggacagcaaagcatcaggactgtaatagatacaatgcaacatgcagtctacgtctatgacatttgtcatgtgatcatcgacaacctgcagttcatgatgggtcacgagcagctgtccacagacaggatcgcagctcaagactacatcatcggggtctttcggaagtttgcaacagacaataactgccatgtgacactggtcattcacccccggaaagaggatgatgacaaggaactgcagacagcgtccatttttggctcagccaaagcaagccaggaagcagacaatgttctgatcctgcaggacaggaagctggtaaccgggccagggaaacggtatctgcaggtgtccaagaaccgctttgatggagatgtaggtgtcttcccgcttgagttcaacaagaactccctcaccttctccattccaccaaagaacaaggcccggctcaagaagatcaaggatgacactggaccagtggccaaaaagccctcttctggcaaaaagggggctacgacacagaactctgagatttgctcaggccaggcccccactcccgaccagccagacacctccaagcgttcaaagtgaaggccgtgcagagctggtcactgaaatgagcctgataggataggctggagcataaaactctgcaagggctcctctatcctgtggtcctgagctgtgtgcccttctcagtctgaggggcctaacctagagcaggtttccatagtgagaaaattcaatgtagcagactactgagaaactactgtgttgctcaggctttgtttgaggtcctgtatatacagcactgaaaagagagataaagtccctgcctgcatgcattctggcggaagagacaagcaagcaatgaacaaattagcagaaaacctagttttagtgaaaaatgctgtaaagaaaatagaaatgcgatagagtgctggcaggctagtgtagataagtggtctgaaaaggtgtctctgagccgagggcatgtgagctggggcctaaacaactagaaggagagagccacgtgaacatccggcgaaggggacccaggcagagagaaaaggaaatccaagccctgaggtaggaatgagcaggtcagattcaaggcagtgaggtcaggccgcatgaacctggaggggaatcggggacttcatgcgaaactccagcctaggctttcaaagtcaaagggtgatacagtgggtaccaagctcctctgctccccactttgtagagcctagcatgaggtggcatgtactagaattggatcctaggtgcttagccctgcaatatcagggcctcactggtgggagctgcctcgggctgggttgcttggtcatagagccatagaaggaagctgtcagcccggagtgcctgccacctagacactgatgccattgtgtgctgcctcaagactgctggagtcaggacattttatagagccttttccagttttactaaaaaatttttccattgaaaaaaaaaaaaaaaaaaa

SEQ ID NO: 3034 - protein, 506 aa, Homo sapiens
MFGLTKVTDDTLKRFSVRYLRPARSLVFPWFSPGGSGLRGLKLLEAKCQGDGVSYEETTIPRPSAYHNLFGLPLISRRDAEVVLTSRELDSLALNQSTGLPTLTLPRGTTCLPPALLPYLEQFRRIVFWLGDDLRSWEAAKLFARKLNPKRCFLVRPGDQQPRPLEALNGGFNLSRILRTALPAWHKSIVSFRQLREEVLGELSNVEQAAGLRWSRFPDLNRILKGHRKGELTVFTGPTGSGKTTFISEYALDLCSQGVNTLWGSFEISNVRLARVMLTQFAEGRLEDQLDKYDHWADRFEDLPLYFMTFHGQQSIRTVIDTMQHAVYVYDICHVIIDNLQFMMGHEQLSTDRIAAQDYIIGVFRKFATDNNCHVTLVIHPRKEDDDKELQTASIFGSAKASQEADNVLILQDRKLVTGPGKRYLQVSKNRFDGDVGVFPLEFNKNSLTFSIPPKNKARLKKIKDDTGPVAKKPSSGKKGATTQNSEICSGQAPTPDQPDTSKRSK

SEQ ID NO: 3035 - DNA, 5733 bp, Homo sapiens
gcggccgccgccgcgccgtggccctttgtgctggaacaatgaccagctgccgctggccccggggccccggctggggttgagggtgaccaccgccgccgccgcgtcgagccgaaccgagcccccagacacgcagtcacagggcgtcggagggagggctcccgactgccgccgagcagcccctacgtgcgccccggcggattcgcgtgacgcgggtgcttgcgcgtgtccgcgccccggggcggagacgcccctcggaccctcccctgcgcggtgccgcccactcgcaccgggcgggggctggccagggccgggggcgccgcggaggcggaggcggggctgggccgggcagctccgagtggcggcgcgcgggccagggccggggccggggccggggccggagccggagccggggccgggcggcgcgcctgtggagcgctgggggcggcctggggctgagcatggagcagcgcggcggaggtgaggggggccgggtctgggaggcggcctggggagcccccaacttatgcgcggtggaatccagccggggggacggcgttccccagtcgcccccactttctggaaggggggctggactctggagaatgggtcaggggctcctggcttcccgccgcagaatgggaactcgtgatcgcagacttgaccccgcttgactggtccttggagtttgggtgggagggagactttccccaactcttcagatccgtctccggccctgaaccagctccagccctctgctctcctcagcccactaaaaggggggtgctcctgggccagagtgattgctcagggagtgctggggagaatgaggggttcccatctcccacagccacaaacgcatttctcaaaatggagcctccacttgcccctccttctctttcgggctccaagagcgggagccggcctggctgggcctggctttccagactcctggctctggctccctggatgtgtggctctcagggcccggctctgtggcactttggacttatgggccctcggctccgtggggttggggggccctggctcactgggtcccgctggctgtccccttgtcggcctgaccctcgggcctctccgagtctttgtctcttttgggtccctgtctttctctgagcctgtctccttccttcaattttcactttctccgtgctcgctgaagtggggaaatgcaacagaggtgccagcccccttggccccctaagaagtcccttccccactgttcactccacaccctggagtgggcccagagaggggaggggagggggttctctatctgctctgctgggggctggggtgtgtggggtggtctgagccccagccctacagaggggcctgtggtcactccctgctcctggcctacccctcccccagctccccgcagctcctgccccagcgtggacacctcttcctggttcgcagtgtcttttgacttgggtgggaaggagggcggtggatttaatggagggcatgcgagaaagaaggggaacagatcaggcaaaggagttagataatgtcccacctctccccacacgccgaagagagaaggaaacaggctccccccaccaatgggccctcaagccacccaggctcccaccactctcatacctgcgtgcccacgttcacaggctccactgcaccactcaccttcctagtcacacacaaacacaggagctcacacataaactcatgaacttactgacaagtctgtccaggcaccgtctctcccacacaccacaaattcacttgttagatccacatttataactttcacaggctttctaatgacccctgatccacatactcttctaagatatacacatgtgaattcacacatgaactcatatgtatgtgaatgaactgatatatcaaacatgcatagactcacatgatgttttcacacacattttcatacacacgtgttcattttcatgctcctgtgcatgtagtcacacaacaaataactaaatgcacacactcctactcccagtgcaattctctgtccacttcttggccccgctctgcatgatgacttcagcagatgcctaagtcctggtcatcagcggcctcgggactgggactagggagggggttccgggtggaggcttgcagctgcttccaggaaggagcagagcctggggaggtggagccctcttgcctgggctctgtggaagtgaggttttggagcagcctccagaggtgaaggcagggcatctaccttcctcccctcagggttagtttggggaccttctgaagctgtagggtttcagagaggttggcagtggggcagagcctgtggaggctccttcaggccttcaggcctcaccgattgggtgtgcagaggctaggagttgtcatggaaactggtatgagcctgcatccacctctgggaggcaggagaccccaaaggacacctgtggactccctaagagccgcgggtttcttatttagccagatcgacagagaggcagtttagccgcctttctgtctgagagaaactgaggcccagcagagggaggcagggcactgcctggccttggctctttgttccctaattaccatctgaggtgctgattgcacccctgaggtacctctgcccaaactgccctgtaatgaggccacctggctgagaggaccagggacctgtgcttcaagctggtagagaaggcccctccctcacctgagtcctggcctctgtggaggatgcaggattgggcttgggcctgggtctttgctgccaggtggccctgcggtaatcatccaggcctcccatgcctctcagcatctctgctgagtgaattcactcctcagccctgttcagaccagcattgggcagtgtggtttggggcccagggggaattgagattcattccagcacttgaagggggagtcttggtggggatcagggcttgttactgatgtcaaggaggtgtttggtcaggatcagtgggtcaggaggggtctcaaggtggagggactctgacaccactgccctgcttacaggtcgcctgcgaggccgctggccaggcctgagcctctgccaccatggccattgtgcagactctgccagtgccactggagcctgctcctgaagctgccactgccccacaagctccagtcatgggtagtgtgagcagccttatctcaggccggccctgtcccggggggccagctcctccccgccaccacggccctcctgggcccaccttcttccgccagcaggatggcctgctacggggtggctatgaggcacaggagccgctgtgcccagctgtgccccctaggaaggctgtccctgtcaccagcttcacctacatcaatgaggacttccggacagagtcaccccccagcccaagcagtgatgttgaggatgcccgagagcagcgggcacacaatgcccacctccgcggcccaccaccaaagctcatccctgtctctggaaagctggagaagaacatggagaagatcctgatccgcccaacagccttcaagccagtgctgcccaaacctcgaggggctccgtccctgcctagcttcatgggtcctcgggccaccgggctgtctgggagccagggcagcctgacgcagctgtttgggggccctgcctcctcctcctcctcttcctcctcctcttcagctgctgacaaacccctggcatttagtggctgggccagtggctgcccatcagggacgctatccgactctggccgaaactcactgtccagcctgcccacctacagcaccggaggtgccgagccaaccaccagctccccaggcgggcacctgccttcccatggctctgggcgaggggcactgcctgggccagcccgaggggtccctactgggccctcccactcagacagtggccggtcctcctccagcaagagcacaggctccctagggggccgtgtggctggggggcttttgggcagtggtactcgggcctcccctgacagcagctcctgtggggagcgctcaccaccacccccgcctccacctccttcggatgaggccctgctgcactgtgtcctggaaggaaagctccgagaccgggaggcagagcttcagcagctgcgggacagtctggacgagaatgaggctaccatgtgccaggcatacgaggagcggcagcggcactggcagcgagagcgtgaggccctgcgagaggactgtgcggcccaggcacagcgggcacagcgggcccaacagctgctgcagctgcaggtgttccagctgcagcaggagaagcggcaattgcaggacgacttcgcacagctgctgcaggagcgcgaacagctggagcggcgctgcgccaccttggagcgggagcagcgggagctcgggccgaggcttgaggagaccaagtgggaggtgtgccagaaatcaggcgagatctccctgctgaagcagcagctgaaagagtctcaggcagagctggtgcagaagggcagcgagctggtggctctgcgggtggcgctgcgggaggcccgtgctacgctgcgggtcagtgagggccgtgcgcggggtctacaggaggccgcccgagctcgggagctggagctggaagcctgttcccaggagctgcagcgacaccgccaggaagctgagcagctgcgggagaaagctgggcagttggatgctgaggcggccggactccgggagccccctgtgccacctgccaccgctgacccattcctcctggcagagagtgatgaggccaaagtgcagcgggcagcagccggggttgggggcagcttgcgggcccaggtggagcgattgcgggtggagctgcagcgggagcggcggcggggtgaggagcagcgggacagctttgagggggagcggctggcctggcaggcagagaaggagcaggtgatccgctaccagaagcagctgcagcacaactacatccagatgtaccggcgcaaccggcagctagagcaggagctgcagcagctcagcctggagctggaggcccgggagctcgctgacctgggcctggccgagcaggccccctgcatctgcctggaggagatcactgctactgagatctagggccctcagcaaccagctctgtagggagctctgccagaggggcagcagctgcagatccacttaggccccagggtccacggatggccccaaaggctgagggccccaaagccacttgtctcctaggatccaggcctctgggcttctgccaagaactcagggtggccctatgacttggaggagcaagatcagaccgctcaaaggtccccgtgttcactgttacccagaggctcttgttactacccacttcattccccaccgctgccagtgccactgccaaccctgttcacaggcgcttccagcccactccagccaggggagcagggaagaagaaggggctccctcctcttcacattccccccgaccccaaagccagagaaagccagatggcaccagctgctccggatgtgcctgcccacattgggggacagggccgggcctgggctcggttcccaggtttgagctctgcagcctctctcctggagtgagggggctgaagtcagaccaaaggaagaactcagaaatgtcttgtttatttgtgtttgtgaccaagcagcctctcccttcacccaggtttatggcctcgttttcacttgtatatttttcacactgtaaatttcttgtacaaacccaaagaaaaaattaaaaaaaatttttttgttt

SEQ ID NO: 3036 - protein, 644 aa, Homo sapiens
MGSVSSLISGRPCPGGPAPPRHHGPPGPTFFRQQDGLLRGGYEAQEPLCPAVPPRKAVPVTSFTYINEDFRTESPPSPSSDVEDAREQRAHNAHLRGPPPKLIPVSGKLEKNMEKILIRPTAFKPVLPKPRGAPSLPSFMGPRATGLSGSQGSLTQLFGGPASSSSSSSSSSAADKPLAFSGWASGCPSGTLSDSGRNSLSSLPTYSTGGAEPTTSSPGGHLPSHGSGRGALPGPARGVPTGPSHSDSGRSSSSKSTGSLGGRVAGGLLGSGTRASPDSSSCGERSPPPPPPPPSDEALLHCVLEGKLRDREAELQQLRDSLDENEATMCQAYEERQRHWQREREALREDCAAQAQRAQRAQQLLQLQVFQLQQEKRQLQDDFAQLLQEREQLERRCATLEREQRELGPRLEETKWEVCQKSGEISLLKQQLKESQAELVQKGSELVALRVALREARATLRVSEGRARGLQEAARARELELEACSQELQRHRQEAEQLREKAGQLDAEAAGLREPPVPPATADPFLLAESDEAKVQRAAAGVGGSLRAQVERLRVELQRERRRGEEQRDSFEGERLAWQAEKEQVIRYQKQLQHNYIQMYRRNRQLEQELQQLSLELEARELADLGLAEQAPCICLEEITATEI

SEQ ID NO: 3037 - DNA, 2678 bp, Homo sapiens
ctgctggtaagtggtctattcctgcccacccccgggtgactagcttggccagtagtcgaccccacccggggaccgactctgggggttggagagactcttggggccggggtcgggcactccagctttcttctagccccgagctgggattccctggcctgcgccagctgcgtacacggcgagtacaccgcacctgcccgggacttcacccgcagctgcgagactcctccattcccggagggctccccacacctgctgcggccgtgccccatctccccgcagctgcggcgctgagcacccccatgtcgagaggctgagaccaggacagcagccctgaccaacgctccaataggccgggatccagccatacttcaatggatcccaggggtatcttgaaggcatttcccaagcggcagaaaattcatgctgatgcatcatcaaaagtacttgcaaagattcctaggagggaagagggagaagaagcagaagagtggctgagctcccttcgggcccatgttgtgcgcactggcattggacgagcccgggcagaactctttgagaagcagattgttcagcatggcggccagctatgccctgcccagggcccaggtgtcactcacattgtggtggatgaaggcatggactatgagcgagccctccgccttctcagactaccccagctgcccccgggtgctcagctggtgaagtcagcctggctgagcttgtgccttcaggagaggaggctggtggatgtagctggattcagcatcttcatccccagtaggtacttggaccatccacagcccagcaaggcagagcaggatgcttctattcctcctggcacccatgaggccctgcttcagacagccctttctcctcctcctcctcccaccaggcctgtgtctcctccccaaaaggcaaaagaggcaccaaacacccaagcccagcccatctctgatgatgaagccagtgatggggaagaaacccaggttagtgcagctgatctggaagccctcatcagtggccactaccccacctcccttgagggagattgtgagcctagcccagcccctgctgtcctggataagtgggtctgtgcacagccctcaagccagaaggcgaccaatcacaacctccatatcacagagaagctggaagttctggccaaagcctacagtgttcagggagacaagtggagggccctgggctatgccaaggccatcaatgccctcaagagcttccataagcctgtcacctcgtaccaggaggcctgcagtatccctgggattgggaagcggatggctgagaaaatcatagagatcctggagagcgggcatttgcggaagctggaccatatcagtgagagcgtgcctgtcttggagctcttctccaacatctggggagctgggaccaagactgcccagatgtggtaccaacagggcttccgaagtctggaagacatccgcagccaggcctccctgacaacccagcaggccatcggcctgaagcattacagtgacttcctggaacgtatgcccagggaggaggctacagagattgagcagacagtccagaaagcagcccaggcctttaactctgggctgctgtgtgtggcatgtggttcataccgacggggaaaggcgacctgtggtgatgtcgacgtgctcatcactcacccagatggccggtcccaccggggtatcttcagccgcctccttgacagtcttcggcaggaagggttcctcacagatgacttggtgagccaagaggagaatggtcagcaacagaagtacttgggggtgtgccggctcccagggccagggcggcggcaccggcgcctggacatcatcgtggtgccctatagcgagtttgcctgtgccctgctctacttcaccggctctgcacacttcaaccgctccatgcgagccctggccaaaaccaagggcatgagtctgtcagaacatgccctcagcactgctgtggtccggaacacccatggctgcaaggtggggcctggccgagtgctgcccactcccactgagaaggatgtcttcaggctcttaggcctcccctaccgagaacctgctgagcgggactggtgacccatggctgggggtgctgaggagagccgagttggactggctacccctcctggccacccagtactccctccagcctcagctggctgaacctcgccgctccaaccaccagcttcctcagcgagcagggcccagggctctgggcctgaagcaagagccagcccggctcccagtgtctgcccggctcccagtgtctgcccagccctctcccagacaggagcaggctgccaccccttctacctcaccactgcccctcgaagaattttgcaaatggccccttgccccattttaagcaggagcaggtggctggtttgaagccccaggtatcccccttccctgctatgggaaaggccaagctgctgggtggggacagaagctgcaggggagagggaagcagccgtgctgtcaacatcatccggcaccctctggggtaggagaacagccattccacatgtgttccctctatccgtcctgcttcctgggcagctggtggtgctgggaatggggtgccccagccttggtgaggacagtgttgggaggcccaggggcccagtaaagtgcatttgacattgaaaaaaaaaa

SEQ ID NO: 3038 - protein, 575 aa, Homo sapiens
MDPRGILKAFPKRQKIHADASSKVLAKIPRREEGEEAEEWLSSLRAHVVRTGIGRARAELFEKQIVQHGGQLCPAQGPGVTHIVVDEGMDYERALRLLRLPQLPPGAQLVKSAWLSLCLQERRLVDVAGFSIFIPSRYLDHPQPSKAEQDASIPPGTHEALLQTALSPPPPPTRPVSPPQKAKEAPNTQAQPISDDEASDGEETQVSAADLEALISGHYPTSLEGDCEPSPAPAVLDKWVCAQPSSQKATNHNLHITEKLEVLAKAYSVQGDKWRALGYAKAINALKSFHKPVTSYQEACSIPGIGKRMAEKIIEILESGHLRKLDHISESVPVLELFSNIWGAGTKTAQMWYQQGFRSLEDIRSQASLTTQQAIGLKHYSDFLERMPREEATEIEQTVQKAAQAFNSGLLCVACGSYRRGKATCGDVDVLITHPDGRSHRGIFSRLLDSLRQEGFLTDDLVSQEENGQQQKYLGVCRLPGPGRRHRRLDIIVVPYSEFACALLYFTGSAHFNRSMRALAKTKGMSLSEHALSTAVVRNTHGCKVGPGRVLPTPTEKDVFRLLGLPYREPAERDW

SEQ ID NO: 3039 - DNA, 1239 bp, Homo sapiens
atggcggcggcggccggggaggaggaggaggaggaggaggcggctcgggagtcggctgcccgcccggccgcggggcctgcgctctggcgcctgccggaggagctgctgctgctcatctgctcctacctggacatgcgggccctcggccgcctggcccaggtgtgccgctggctgcggcgcttcaccagctgcgatctgctctggcgccggatagcccgggcctcgctcaactccggcttcacgcggctcggcaccgacctgatgaccagtgtcccagtgaaggaacgagtgaaggtgtctcagaactggagactggggcgctgccgagaggggattctgctgaagtggagatgcagtcagatgccctggatgcagctagaggatgattctctgtacatatcccaggctaatttcatcctggcctaccagttccgtccagatggtgccagcttgaatcgtcggcctctgggagtctttgctgggcatgatgaggacgtttgccactttgtgctggccaactcgcatattgttagtgcaggaggggatgggaagattggcattcataagattcacagcaccttcactgtcaagtactcggctcatgaacaggaggtgaactgtgtggattgcaaagggggcatcattgtgagtggctccagggacaggacggccaaggtgtggcctttggcctcaggccggctggggcagtgcttacacaccatccagactgaagaccgagtctggtccattgctatcagcccattactcagctcttttgtgacagggacggcttgttgcgggcacttctcacccctgagaatctgggacctcaacagtgggcagctgatgacacacttgggcagtgactttcccccaggggctggggtgctggatgtcatgtatgagtcccctttcacactgctgtcctgtggctatgacacctatgttcgctactgggacctccgcaccagcgtccggaaatgtgtcatggagtgggaggagccccacgacagcaccctgtactgcctgcagacagatggcaaccacctgctggccacaggttcctcctactacggtgttgtacggctgtgggaccggcgtcaaagggcctgcctgcacgccttcccgctgacgtcgactcccctcagcagccctgtgtactgcctgcgtctcaccaccaagcatctctatgctgccctgtcttacaacctccacgtcctggattttcaaaacccatga

SEQ ID NO: 3040 - protein, 412 aa, Homo sapiens
MAAAAGEEEEEEEAARESAARPAAGPALWRLPEELLLLICSYLDMRALGRLAQVCRWLRRFTSCDLLWRRIARASLNSGFTRLGTDLMTSVPVKERVKVSQNWRLGRCREGILLKWRCSQMPWMQLEDDSLYISQANFILAYQFRPDGASLNRRPLGVFAGHDEDVCHFVLANSHIVSAGGDGKIGIHKIHSTFTVKYSAHEQEVNCVDCKGGIIVSGSRDRTAKVWPLASGRLGQCLHTIQTEDRVWSIAISPLLSSFVTGTACCGHFSPLRIWDLNSGQLMTHLGSDFPPGAGVLDVMYESPFTLLSCGYDTYVRYWDLRTSVRKCVMEWEEPHDSTLYCLQTDGNHLLATGSSYYGVVRLWDRRQRACLHAFPLTSTPLSSPVYCLRLTTKHLYAALSYNLHVLDFQNP

SEQ ID NO: 3041 - DNA, 5146 bp, Homo sapiens
aggcagcagcagagggagagctcggggcttggaggggaaacagcggaagacctaagattatcgggagggcagcagaggcagagaacgaggacaggacccttggccgtcttcttccagggaacgagaggtcacagcctcgctctccgcttaggcttctggcgccccagcttaaagccgaggctgcggctgacaaagggctcgcgccggtgccgccgcccttctcatccgggcattcgggtccctgcggagagggagggggaagggcagagggggaggggaaggagccggaggggcgcacacttggagctgaagccctctccagggctccgggccggtgccccaacggacagaggtcgaggaggacccgcagaggtggcagcggccgggggcaggaggatggtgcagaaggagagtcaagcgacgttggaggagcgggagagcgagctcagctccaaccctgccgcctctgcgggggcatcgctggagccgccggcagctccggcacccggagaagacaaccccgccggggctgggggagcggcggtggccggggctgcaggaggggctcggcggttcctctgcggtgtggtggaaggattttatggaagaccttgggttatggaacagagaaaagaactctttagaaggctccagaaatgggaattaaatacatacttgtatgccccaaaagatgactacaaacataggatgttttggcgagagatgtattcagtggaggaagctgagcaacttatgactctcatctctgctgcacgagaatatgagatagagttcatctatgcgatctcacctggattggatatcactttttctaaccccaaggaagtatccacattgaaacgtaaattggaccaggtttctcagtttgggtgcagatcatttgctttgctttttgatgatatagaccataatatgtgtgcagcagacaaagaggtattcagttcttttgctcatgcccaagtctccatcacaaatgaaatctatcagtacctaggagagccagaaactttcctcttctgtcccacagaatactgtggcactttctgttatccaaatgtgtctcagtctccatatttaaggactgtgggtgaaaagcttctacctggaattgaagtgctttggacaggtcccaaagttgtttctaaagaaattccagtagagtccatcgaagaggtttctaagattattaagagagctccagtaatctgggataacattcatgctaatgattatgatcagaagagactgtttctgggcccgtacaaaggaagatccacagaactcatcccacggttaaaaggagtcctcactaatccaaattgtgaatttgaagccaactacgttgctatccacacccttgccacctggtacaaatcaaacatgaatggagtgagaaaagatgtagtgatgactgacagtgaagatagtactgtgtccatccagataaaattagaaaatgaaggcagtgatgaagatattgaaactgatgtactctatagtccacagatggctctaaagctagcattaacagaatggttgcaagagtttggtgtgcctcatcaatacagcagtaggcaagttgcacacagtggagctaaagcaagtgtagttgatgggactcctttagttgcagcaccctctttaaatgccacaaccgtagtaacaacagtttatcaggagcccattatgagccagggagcagccttgagtggtgagcctactactctgaccaaggaagaagaaaagaaacagcctgatgaagaacccatggacatggtggtggaaaaacaagaagaaacggaccacaagaatgacaatcaaatactgagtgaaattgttgaagcgaaaatggcagaggaattgaaaccaatggacactgataaagagagcatagctgaatcaaaatccccagagatgtccatgcaagaagattgtattagtgacattgcccccatgcaaactgatgaacagacaaacaaggagcagtttgtgccaggtccaaatgaaaagcctttgtacactgcggaaccagtgaccctggaggatttgcagttacttgctgatctattctaccttccttacgagcatggacccaaaggagcacagatgttacgggaatttcaatggcttcgagcaaatagtagtgttgtcagtgtcaattgcaaaggaaaagactctgaaaaaattgaagaatggcggtcacgagcagccaagtttgaagagatgtgtggactagtgatgggaatgttcactcggctctccaattgtgccaacaggacaattctttatgacatgtactcctatgtttgggatatcaagagtataatgtctatggtgaagtcttttgtacagtggttagggtgtcgtagtcattcttcagcacaattcttaattggagaccaagaaccctgggcctttagaggtggtctagcaggagagttccagcgtttgctgccaattgatggggcaaatgatctcttttttcagccacctccactgactcctacctccaaagtttatactatcagaccttattttcctaaggatgaggcatccgtgtacaagatttgcagagaaatgtatgacgatggagtgggtttaccctttcaaagtcagcctgatcttattggagacaagttagtaggagggctgctttccctcagcctggattactgctttgtcctagaagatgaagatggcatatgtggttatgccttgggcactgtagatgtgaccccctttattaaaaaatgtaaaatttcctggatccccttcatgcaggagaagtataccaagccaaatggtgacaaggaactctctgaggctgagaaaataatgttgagtttccatgaagaacaggaagtactgccagaaactttccttgctaatttcccttctctgataaagatggacattcacaaaaaagtaactgacccaagtgtggccaaaagcatgatggcttgcctcctgtcttcactgaaggctaatggctcccggggagctttctgtgaagtgagaccagatgataaaagaattctggaattttacagcaagttaggatgttttgaaattgcaaaaatggaaggatttccaaaggatgtggttatacttggtcggagcctgtgacatttgttgacactgtgaactgtccaaaagtctcttaactgcaccttgtgaatggtagttgaggtcttcatacagttcagcctctagaatggtaacaaatcagccaattggattcgaaacaaagaagactatgtaaaactcacccatcacactttgagactactcactggttggaagaatatagtattgcagcaaatcctgtatgaaagagagatgtgggcttcctttttgagtcttgtgttaggtgctgagaccttttacatgggcttatacagggagagagtcttcaataaatgtagtcagcactattttctgcatccagtgtggttgcgtttctcacctgagagtaatcaagataacatctgtcatcttccttggtttattgagtgaaatgcctctcagtcttaggggacatggcagagatgaaagaaagaaagagtgggtttcagaagtgtcagggtggagtgattccaagtgggatggttgtggcattagtttaagctgaataaataatttcaatttggggcagttattctgctttttgtaaagccgtggccaattgtctcctgtaatgactgttggttcaggcatgttgtactttgtagggacaaatgtgcatttgtttgtggcaaaagcctacaattgacaaacttgtaaatttctttgtatataaactagctgtaacctgactatcctttgtgtttactgtttttgtaaatttttttcctctataaatgaaagggtgttggttcagaatggcactttgaataatgtaaaccagtgaaaagtggattttctttacttttgtctttgggtttggggttgtttttgttctttttgaagttttattatttttaaagtgcctcccacctaggcgtaggccatgaccatttggggtacgagagcctaattttgtaggacttaatctgttgaaaagtgcagttacttctggaaattaacctcaatattaggtcagcatgtgaaatgttggatttgacatgtcaggtagggttcagggactgattggtcccatttgccctcaggtcagttgtttaatctcaagacctgttactactgattttattaaatcagagtctttaattcttgcatgtttgtatctaatttctgaatgaatgagcacactttaaccagttatttacagttacctttttcctttaaccggattgtgaaagcttcatgtattttaatttagattctgtgtttttaagggttctgagcatgaagctggcagatagtcggcaggactcattttttcatcatggctggctgatttctccatagattgataacagtattttgttatcttgcttctctgtagttttgcatcagctgtttaactttgagctgagtgaggggagaggggtaaagagaaagaaacttaagttttctttcacagaactccaccattgtgggctttgagagagccctaaagcattgtacctagtggtacctagtgacttccaaccaaagcctttgagtatgcactaaataggtgagaagaaaggagagaaggtttttaggttagaaacctttaaccgatagaaggatatggtatgttgtaaagctggaaccaagtttgcatttttgagggcttgagatgaagggaagactcttaccagatagtaagacagctgagttttcctcagttttctcgtcttaacactagtggacaattctagcattttgtttggaggatttcagagttaacctcatggaattcaggattttttagcaagtttgcttttggttttatcttggcttttagtaatcatgttggctggtctggtcacaggtgactgtgaaacagatgccctggtcttgctttcatcactctaggatcatgaagtgctatgctatttcctggttatgaatattaaggttggaattacatttttattgattgtttggatcagagctcagttcctgtagaaaacgaactgtaaaagaccatgcaagaggcaaaataaaacttgaagtg

SEQ ID NO: 3042 - DNA, 5361 bp, Homo sapiens
gccagcgatcagagcagcgctgggtgttcaggggccaagatggcggcgcgccggggacggagagacggagtcgcgccgcccccgagtgggggccccggtccggaccctggcgggggagcccgcggcagtggttggcgaagtcgaagccaagcgccgtatgggactttgggcgctgtgagcggcggcgagcaggtgctgctgcatgaggaggcgggtgattctggctttgtcagtctctctcggcagggcccatctctgagggacaaggacctggaaatggaggagctaatgctgcaggatgagacactgctggggaccatgcagagctacatggatgcctcccttatctccctcattgaggattttgggagccttggagagagcaggttatctctggaggaccacaatgaagtgtcgctgctcacggctctgacggagatcttggacaatgcagattctgagaacctttctccatttgacagcattcctgattcggagctgcttgtgtcaccccgggagggctcctctctgcacaagctgcttactctctctcggacacccccagaacgtgacctcatcaccccagttgacccactggggcccagtacgggcagcagtagagggagtggggttgaaatgtctcttccagatccctcttgggacttctccccaccctctttcttagagacctcttcccccaagcttcctagctggagacccccaagatcaagaccacgctggggccaatccccacctccccagcagcgcagtgatggagaagaagaggaggaggtggccagcttcagtggccagattcttgccggggagcttgacaactgtgtgagcagtatcccggacttccccatgcatttggcctgccctgaggaggaagataaagcaacagcagcagagatggcagtgccagcagctggtgatgagagcatctcctccctgagtgagctggtgcgggccatgcacccatactgcctgcccaacctcacccacctggcatcacttgaggatgagcttcaggagcagccagatgatttgacactgcctgagggctgcgtagtgctggagattgtggggcaggcagccacagctggcgatgacctggagatcccagttgtggtgcgacaggtctctcctggaccccggcctgtgctcctggatgactcgctagagactagttctgccttgcagctgcttatgcctacactggagtcagagacagaggctgctgtgcccaaggtaaccctctgctctgagaaagaggggttgtcattgaactcagaggagaagctggactcagcctgcttattgaagcccagggaggtcgtggagccggtggtgcccaaggagcctcagaacccacctgccaatgcagcaccaggttcccagagagctcgaaagggcaggaagaagaagagcaaggagcagccagcagcctgtgtggaaggctatgccaggaggctgaggtcatcttctcgcgggcagtctactgtaggtacagaagtgacctctcaggtagacaacttgcagaaacagcctcaggaagaacttcaaaaagagtctgggcctctccagggtaaggggaagccccgggcttgggctcgggcctgggcagctgccttggagaattctagccctaagaacttggagagaagtgctggacaaagtagtcctgctaaagaaggccctctagacctctacccaaagctggctgacactatccaaaccaatcctataccaacccatctctcattggtcgactctgcccaagccagccccatgccagttgactctgttgaagctgatcccactgcagttggccctgttctagctggccctgtacctgttgaccctgggttggttgaccttgcttcaaccagctcagaactggttgagcctctcccggctgagccagtgctgatcaacccagtcctggctgactcagcagcagttgaccctgcagtggttcccatctcagataacttgccaccagttgatgctgtcccgtctggcccagcaccagttgatctagcactggttgaccctgttcctaatgacctgactccagttgacccagtgctagttaagtccagaccaactgatcccagacgtggtgcagtgtcatcagccctggggggttcagcaccccagctcctcgtggagtcagagtccttggacccaccaaagaccatcatccctgaagtcaaagaggttgtggattctctgaaaattgaaagtggtaccagtgctacaacccatgaagccagacctcggcctctcagcttatctgagtaccggcgacgaaggcagcaacgccaagcagaaacagaagagagaagtccacagcccccaactgggaagtggcctagccttccagagactcccacagggctggcagacatcccttgtcttgtcatcccaccagccccagccaagaagacagctctgcagagaagccctgaaacaccccttgagatttgccttgtgcctgtaggtcccagccctgcttctcctagtcctgagccacctgtaagcaaacctgtggcctcatctcccactgagcaggtgccatcccaggagatgccactgttggcgagaccttcccctcctgtgcagtctgtgtcccctgctgtgcccacacctccctcgatgtctgctgccctgcctttccctgcaggtgggcttggcatgccccccagtctgcccccacctcccttgcagcctcctagtcttccattgtctatggggccagtactacctgatccgtttactcactatgcccccttgccatcctggccttgttatcctcatgtgtccccttctggctatccttgcctgccccccccaccaacggtgcccctagtgtctggtactcctggtgcctatgccgtgcctcccacttgcagtgtgccttgggcaccccctcctgccccagtctcaccttacagttccacatgtacctatgggcccttgggatggggcccagggcctcaacatgctccattctggtctactgttcccccacctcctttgcctccagcctccattgggagagctgttccccaacctaaaatggagtctaggggcactccagctggccctcctgaaaatgtacttcccttgtcgatggctcctcccctcagtcttgggctacctggccatggagctcctcagacagagcctaccaaggtggaggtcaagccagtgcctgcatctccccatccgaaacacaaggtgtctgccctggtgcaaagtccccagatgaaggctctagcatgtgtgtctgctgaaggtgtgactgttgaggagcctgcatcagagaggctaaagcctgagacccaagagaccaggcccagggagaagccccccttgcctgctaccaaggctgttcccacaccaaggcagagcactgtccccaagctgcctgctgtccacccagcccgtctaaggaagctgtccttcctgcctaccccacgtactcagggttctgaagatgtggtacaggctttcatcagtgagattggaattgaggcatcggacctgtccagtctgctggagcagtttgagaaatcagaagccaaaaaggagtgtcctcctccggctcctgctgacagcttggctgtaggaaactcaggcggcgttgacattccccaggagaagaggcccctagaccggttacaagccccagaactggccaacgtggcagggctcacccctccagctacccctccccaccagttatggaagcccctggctgctgtctcactgctggccaaagccaaatctcctaagtccaccgcccaggagggaaccctgaagcctgaaggagttacggaggccaaacatccagctgcagttcgcctccaagaaggggtccatggccctagtcgagtccatgtgggctctggggaccatgactattgtgtccggagcaggacccccccaaaaaagatgcctgccctagtcattccagaggtgggctcccgatggaatgtcaagcgccatcaggacatcaccatcaaacctgtcttgtccttgggcccagctgcccctccgcccccatgcatagctgcctcccgggagccgcttgatcacaggactagcagtgagcaggcagatccctcagcaccctgccttgccccatccagcttgctgtcccctgaggcctcaccctgccggaatgacatgaacactaggactccccctgaaccctcagccaagcagcggtcaatgcgctgttaccgaaaagcctgcaggtcagccagcccctcaagccagggctggcagggccgccgaggccgcaacagccgttctgtcagctctgggtccaaccggactagcgaagcatcttcctcatcctcatcatcgtcttcctcatcccgatctcggtccaggtccctctcccccccacacaagaggtggcgaaggtccagctgtagttcctctggacgttctcgaagatgctcttcctcttcttcgtcatcatcttcctcttcgtcttcctcatcctcatcatccagttctcgaagccgctcacgatccccatccccccgccggagaagtgacaggaggcggcggtacagctcttatcgttcacatgaccattaccaaaggcaaagagtgctacaaaaggagcgtgcaatagaagaaagaagggtggtcttcattggaaagatacctggccgcatgactcgatcagagctgaaacagaggttctccgtttttggagagattgaggagtgcaccatccacttccgtgtccaaggggacaactacggcttcgtcacttatcgctatgctgaggaggcatttgcagccattgagagtggccacaagctgcggcaggcagatgagcagccctttgatctctgctttgggggccgaaggcagttctgcaagaggagctattctgatcttgactccaaccgggaagactttgacccagcacctgtaaagagcaaatttgattctcttgactttgacacattgttgaaacaggcccagaagaacctcaggaggtaaccttgggcccttccctgctatcctttttctcctttggaggtgcccaacctcctccacccccttcccctactctaggggagagagctgctagtgagatgactgttttataaagaaatggaaaaaagtgaaataaaaaatatgttgaatcagattttttaaaaggggtatttgtttttttataacaggtattgaaacaagttaacttgcattcctatgtaagataggaggggctgaggggatccccagtgtttggaacataagtcactatgcagactaataaacatcaactagagagagaaaaaaaaaaaaaaaaaaaaaaaaaaaaaa

SEQ ID NO: 3043 - protein, 1664 aa, Homo sapiens
MAARRGRRDGVAPPPSGGPGPDPGGGARGSGWRSRSQAPYGTLGAVSGGEQVLLHEEAGDSGFVSLSRQGPSLRDKDLEMEELMLQDETLLGTMQSYMDASLISLIEDFGSLGESRLSLEDHNEVSLLTALTEILDNADSENLSPFDSIPDSELLVSPREGSSLHKLLTLSRTPPERDLITPVDPLGPSTGSSRGSGVEMSLPDPSWDFSPPSFLETSSPKLPSWRPPRSRPRWGQSPPPQQRSDGEEEEEVASFSGQILAGELDNCVSSIPDFPMHLACPEEEDKATAAEMAVPAAGDESISSLSELVRAMHPYCLPNLTHLASLEDELQEQPDDLTLPEGCVVLEIVGQAATAGDDLEIPVVVRQVSPGPRPVLLDDSLETSSALQLLMPTLESETEAAVPKVTLCSEKEGLSLNSEEKLDSACLLKPREVVEPVVPKEPQNPPANAAPGSQRARKGRKKKSKEQPAACVEGYARRLRSSSRGQSTVGTEVTSQVDNLQKQPQEELQKESGPLQGKGKPRAWARAWAAALENSSPKNLERSAGQSSPAKEGPLDLYPKLADTIQTNPIPTHLSLVDSAQASPMPVDSVEADPTAVGPVLAGPVPVDPGLVDLASTSSELVEPLPAEPVLINPVLADSAAVDPAVVPISDNLPPVDAVPSGPAPVDLALVDPVPNDLTPVDPVLVKSRPTDPRRGAVSSALGGSAPQLLVESESLDPPKTIIPEVKEVVDSLKIESGTSATTHEARPRPLSLSEYRRRRQQRQAETEERSPQPPTGKWPSLPETPTGLADIPCLVIPPAPAKKTALQRSPETPLEICLVPVGPSPASPSPEPPVSKPVASSPTEQVPSQEMPLLARPSPPVQSVSPAVPTPPSMSAALPFPAGGLGMPPSLPPPPLQPPSLPLSMGPVLPDPFTHYAPLPSWPCYPHVSPSGYPCLPPPPTVPLVSGTPGAYAVPPTCSVPWAPPPAPVSPYSSTCTYGPLGWGPGPQHAPFWSTVPPPPLPPASIGRAVPQPKMESRGTPAGPPENVLPLSMAPPLSLGLPGHGAPQTEPTKVEVKPVPASPHPKHKVSALVQSPQMKALACVSAEGVTVEEPASERLKPETQETRPREKPPLPATKAVPTPRQSTVPKLPAVHPARLRKLSFLPTPRTQGSEDVVQAFISEIGIEASDLSSLLEQFEKSEAKKECPPPAPADSLAVGNSGGVDIPQEKRPLDRLQAPELANVAGLTPPATPPHQLWKPLAAVSLLAKAKSPKSTAQEGTLKPEGVTEAKHPAAVRLQEGVHGPSRVHVGSGDHDYCVRSRTPPKKMPALVIPEVGSRWNVKRHQDITIKPVLSLGPAAPPPPCIAASREPLDHRTSSEQADPSAPCLAPSSLLSPEASPCRNDMNTRTPPEPSAKQRSMRCYRKACRSASPSSQGWQGRRGRNSRSVSSGSNRTSEASSSSSSSSSSSRSRSRSLSPPHKRWRRSSCSSSGRSRRCSSSSSSSSSSSSSSSSSSSSRSRSRSPSPRRRSDRRRRYSSYRSHDHYQRQRVLQKERAIEERRVVFIGKIPGRMTRSELKQRFSVFGEIEECTIHFRVQGDNYGFVTYRYAEEAFAAIESGHKLRQADEQPFDLCFGGRRQFCKRSYSDLDSNREDFDPAPVKSKFDSLDFDTLLKQAQKNLRR

SEQ ID NO: 3044 - DNA, 3775 bp, Homo sapiens
gtcgtgctgcgtcgacaacggtagtgacgcgtattgcctggaggatggcggacgccggcattcgccgcgtggttcccagcgacctgtatcccctcgtgctcggcttcctgcgcgataaccaactctcagaggtggccaataagttcgccaaagcgacaggagctacacagcaggatgccaatgcctcttccctcttagacatctatagcttctggctcaagtctgccaaggtcccagagcgaaagttacaggcaaatggaccagtggctaagaaagctaagaagaaggcctcatccagtgacagtgaggacagcagcgaggaggaggaggaagttcaagggcctccagcaaagaaggctgctgtacctgccaagcgagtcggtctgcctcctgggaaggctgcagccaaagcatcagagagtagcagcagtgaagagtccagtgatgatgatgatgaggaggaccaaaagaaacagcctgtccagaagggagttaagccccaagccaaggcagccaaagctcctcctaagaaggccaagagctctgattctgattctgactcaagctccgaggatgagccaccaaagaaccagaagccaaagataacacctgtgacagttaaagctcagactaaagcccctcccaaaccagctcgagcagcacctaaaatagccaatggtaaagcagccagtagcagcagtagcagcagcagcagcagtagcagtgatgactcagaggaggagaaggcagcagccacccccaagaaggtctggaccataacttctgtcagggcagagactgtacctaaaaagcaagttgtggccaaggccccagtgaaagcagctaccacccctacccggaagagttctagcagtgaggattcctccagtgacgaggaagaggagcaaaaaaaacccatgaaaaataaaccaggtccctacagttcagtccccccgccttctgctcccccaccaaagaagtctctgggaacccagcctcccaagaaggctgtggagaagcagcagcctgtggaaagcagtgaagacagcagtgatgagtctgattcaagttctgaagaagagaagaaacccccaactaaggcagtagtctctaaagcaaccactaaaccacctccagcaaagaaagcagcagagagctcttcagacagctcagactctgacagctctgaggatgatgaagctccttctaagccagctggtaccaccaagaattcttcaaataagccagctgtcaccaccaagtcacctgcagtgaagccagctgcagcccccaagcaacctgtgggcggtggccagaagcttctgacgagaaaggctgacagcagctccagtgaggaagagagcagctccagtgaggaggagaagacaaagaagatggtggccaccactaagcccaaggcgactgccaaagcagctctatctctgcctgccaagcaggctcctcagggtagtagggacagcagctctgattcagacagctccagcagtgaggaggaggaagagaagacatctaagtctgcagttaagaagaagccacagaaggtagcaggaggtgcagccccttccaagccagcctctgcaaagaaaggaaaggctgagagcagcaacagttcttcttctgatgactccagtgaggaagaggaagagaagctcaagggcaagggctctccaagaccacaagcccccaaggccaatggcacctctgcactgactgcccagaatggaaaagcagctaagaacagtgaggaggaggaagaagaaaagaaaaaggcggcagtggtagtttccaaatcaggttcattaaagaagcggaagcagaatgaggctgccaaggaggcagagactcctcaggccaagaagataaagcttcagacccctaacacatttccaaaaaggaagaaaggagaaaaaagggcatcatccccattccgaagggtcagggaggaggaaattgaggtggattcacgagttgcggacaactcctttgatgccaagcgaggtgcagccggagactggggagagcgagccaatcaggttttgaagttcaccaaaggcaagtcctttcggcatgagaaaaccaagaagaagcggggcagctaccggggaggctcaatctctgtccaggtcaattctattaagtttgacagcgagtgacctgaggccatcttcggtgaagcaagggtgatgatcggagactacttactttctccagtggacctgggaaccctcaggtctctaggtgagggtcttgatgaggacagaagtttagagtaggtcctaagactttacagtgtaacatcctctctggtccttttctgtgttcctagttttgtacagacttgtttttgagtgttgagtagcagggacaaaataagggaatgttattttttaagaaaattcattttcattgttgtctccttccttttctgtgaaagtcctcatactgagaaatttgtatattttatattaaatcacttactattgatttttgttgtgattttcaaaggtggattcccacagataaaatcttggctattgcccaaaacatagtaaagggtcacgtgtgactttttataataggaagaaaattctgcctttgtgagtgcacatgtccacatttcatccctccttccctcaaaaccctagagaggggcattaaagaattgttgatgtatatgcaatgtctgttaagcatgcactatgtatttcatcctcatttattgggtctgggactgaagtttttagccagcatggacctaacctactttttgggataaaattctctgttttgttacaggcaaaattctggtatggcgtgaatgccatgggtcattctgaatatatttttttctgtaattttatcattacacgatgtttgcaatacgtgctttgttttttaatttgaaagcaaacttttctactgttgaaagacattttttgacaacttgacccttcctagtattgagttctaagttgaggactgcatcttctcgttttttacagtatagagaacaaaatgacatgagtttgaaaaatacatatcacttggtattgctgtcttggttgcagtggtgatacagaattggtttcattaattcctacatggttgagaatcactgatcaagaaagtggggggaaaaaaaacaaacgttaaaacctcaatcctcagtaggaaggtagattacattaggtgaaattataggtaatctatgtatgtgctaatggggttggaaagaaccttacagagcatattacctgataaactggagtgggtttgggagaacaaactaataggattattgtgtctcctagttggtacctgggagcaattgacatgcccccttcagaaccttaactgttagtagcagtggctgtaacaacacaaaccagtgaccagagataacagcttttaggccaagctggcctgacggtatggctgcaggaagtgactgagcagtagcggtactcagccagaccaagacggagagggaagagtccacagctttctggaagctaaggcattctggtggtagaaaagtgtgccccaagccttcatggacgagttataggtcttaagattagtctcctcttgtttggattccatacttgctaaataacctgataataacctggttttccatgtaactgcctctaggaagaaaatgtactgttcatgctgacacagatatttcagtctgcatggtaaaagttctaaatcttactacaaaataataaactggctggtttataatgtg

SEQ ID NO: 3045 - DNA, 6376 bp, Homo sapiens
gacagggaaggtacccggctctactgcccgtcccggacgactcatcctggcggactgtgcagtcccaccctgacttcagcctcaatttccaggaaacaggctccttctcttctcccatctgctaccagagccgggagagctgctcggagacgcctccggggtgcgggctggacatgagcagcggctgccggtcctgggactaggccccgccattttggatccgctgacaggtttgccaagatggtggataagaatatttacatcattcaaggggagattaacattgtggttggggccatcaaacgaaatgcccgatggagcacccatacaccactggatgaagaacgggatcctctgctgcatagtttcggtcatctaaaggaggttttaaacagtataacagaactctcagaaattgagcccaatgtattccttcgaccttttctggaagtgattcgctctgaagataccactggccctatcactggactggcactcacctctgtcaacaagttcctgtcctatgcactcatagatcccacccatgagggcacagcagagggcatggagaacatggcagatgctgtcacccatgctcgttttgtgggcacggatcctgccagtgatgaagttgtcctgatgaaaatccttcaggttctacggactctgctgctaaccccagtgggtgcccacctaaccaatgaatctgtgtgtgagattatgcagtcttgcttccggatctgctttgaaatgaggctcagtgagttattgagaaaatccgcagagcacactctcgtagacatggtgcagctgctcttcacaaggttacctcagtttaaagaagaacccaagaactatgtggggaccaacatgaagaagctgaaaatgagagccggaggcatgagtgattcatccaaatggaagaaacagaagagatcccctcggcccccacgccatatgaccaaagtcacaccaggttcagagctgcccactcccaatggaaccaccttatcatctaacctcactggtggcatgcccttcattgatgtgcccactcccatctcctctgcaagttcagaagctgcctcagcagtggtcagtccctctacagacagtggcctggaattctcctcccaaaccacttccaaggaagaccttactgatctagagcaacctggctctccagggtacagcacagctacagagcctggaagcagtgagctaggtgttcccgagcagcctgacctccaggaagggacccatgtggaaaagtcccagtcagcatctgtggagtccatccctgaagtgttagaggagtgcacgtcccctgccgaccactctgactctgcctctgtccatgacatggattacgtcaatccccggggcgtgcgctttacacagtcctcccagaaagaaggcacagctttggtcccctatggtcttccctgcatccgcgagctcttccgcttcctcatctccctcaccaatccacacgaccgccataactcagaggttatgattcacatgggactgcatttgctgacagtggcccttgagtcagcccctgtagcccagtgccagaccctcttgggcctcatcaaggatgagatgtgccgtcacttattccagctactcagcatagagcgactaaacctttatgctgcttccctgcgagtatgcttcctactgtttgagagcatgcgagagcacctcaagttccaaatggagatgtacatcaaaaagcttatggagatcatcactgtggagaaccccaagatgccttatgagatgaaggagatggcactggaggccattgtgcagctctggcgcatccccagctttgtcacagagctctacatcaactatgattgtgactactactgttccaacctctttgaggaactcacaaagctgctgtccaagaatgccttccctgtgtctggtcaactctatacaacacacctactatctcttgatgccctattgacagtgattgacagcaccgaggcccactgccaggctaaagtcctcaacagcctcacccagcaagagaagaaggagacagccagaccaagctgtgagatagtagatggcacccgagaagctagcaatactgagagaactgccagcgatgggaaagctgtaggcatggcctcagacatcccaggcctgcatctgccaggtggagggcggctgccaccagaacatgggaaatcaggatgcagtgatctggaggaagctgttgactctggggctgacaaaaagtttgcccggaagccaccccgattttcctgtctcctgccagatccacgggaactaattgaaattaaaaacaaaaagaagctgctaatcactggcacagagcagttcaatcagaaaccaaagaaggggattcagtttctgcaagagaaaggcctcctcaccatcccaatggacaacacagaggttgctcagtggctccgagagaaccctcggctggacaagaagatgattggagagtttgtgagtgaccgcaaaaacattgacctgttggagagctttgtgagcaccttcagttttcagggtctgcgactggacgaagccctccgcctctacctggaagccttccgtttgcctggggaagcaccagtcatccagaggttgctggaggcattcacagagcgttggatgaattgtaatggctccccatttgccaatagcgatgcctgcttttccctggcctatgctgtcatcatgcttaatactgaccagcacaaccacaatgttcgtaaacagaatgcacccatgaccctggaggagtttcgcaaaaatctgaaaggtgtgaatggaggcaaggactttgagcaagacatcctggaggacatgtaccatgccatcaagaatgaggaaattgtaatgcctgaggagcagacaggcttggttcgggagaactatgtgtggaatgtgctgcttcatcgaggtgccacccctgagggcatattcctgcgtgtgcctactgccagctatgatcttgacctcttcaccatgacctggggccccactattgctgctctctcttatgtctttgacaaaagccttgaggagacaatcatccagaaagccatctcaggcttcaggaagtgcgccatgatctccgcccactatggcctcagcgatgtgtttgacaatctcatcatctctctatgcaaattcacagctctcagcagtgagtctattgagaacctgcccagtgtatttggaagcaaccctaaagcccatattgcagccaagacagtattccatttggcccatcgtcatggtgacatcctgcgggagggctggaagaatatcatggaggccatgctgcagctcttccgagcccaactactgcccaaggctatgatagaggtagaagatttcgtggatcccaatggcaagatctctctacagcgggaagagacaccatcaaaccgaggagagtcaacagtgctgagctttgtgagctggctaacactgagtggtcctgagcagtctagtgttcggggcccatccactgaaaaccaagaggccaagagagtggccttagagtgtataaagcaatgtgacccagaaaaaatgatcacagaaagcaagttcctccagctggagtcactacaggagctcatgaaggctctggtctcagtgacaccagatgaagagacatatgatgaggaagatgctgctttctgcctagagatgctgctaaggattgtgttggagaacagggatcgtgtgggctgtgtgtggcagactgttcgagaccatctataccacctctgtgttcaggcacaagatttctgcttccttgtggagcgggcagtggtggggttgctacgcctggccattcggcttctccggagagaagagatcagtgctcaggtgctgctctccctgcgcattttgctactgatgaagcccagtgtgctatcccgagtcagccaccaggttgcgtatgggctccatgaactcctgaagaccaatgcagccaacatccactcaggtgatgactgggccacactcttcacactgctggagtgcatcggctcaggtgtgaagcctccagctgctctgcaggccacagccagggcagatgcacctgatgccggggcccagtcagatagtgagctcccatcctaccatcagaatgacgtgagcctggatcgagggtacacttccgactcagaggtctacactgaccatggcaggccgggcaagatacaccgatcagccacagatgccgatgtggtcaacagtggttggttagtggttgggaaggatgacgttgataactccaagccagggcccagccgcccaggcccttcacccctgatcaatcaatacagcctaacagtgggactggatttggggccacacgacactaagtctctgcttaagtgtgtggaatcgctgtccttcatcgtgcgtgatgctgcccacatcacacctgacaactttgagctctgcgtcaagactctccggatctttgtggaggccagtctgaatggcggatgcaagtcccaggagaaacgtggcaagagtcacaaatatgacagcaaagggaaccgcttcaagaagaaatccaaagagggatcaatgcttcgccggcctcgaacctccagccaacatgcctctcggggcgggcagagtgatgatgatgaggacgaaggcgtgcctgccagctaccatacggtgtctttacaggtcagtcaggacttgctagacctgatgcacaccctgcacacgcgggcagcctctatctacagctcatgggcggaggagcaacgccacctggagacaggtggccagaagattgaagctgattctcgcaccctctgggcccactgctggtgccctttactgcagggtattgcctgcctgtgctgcgatgcccggcgccaggtacggatgcaggcactgacctatctgcagcgagcactacttgtacatgatctgcaaaagctagatgccctggaatgggagtcctgttttaacaaggtgctgtttcctctacttaccaagctcttggagaacatcagccctgcagatgtgggtgggatggaggagacccggatgagggcttccacattgctctctaaggtcttcctgcagcacctgtctccactgctgtcactctctacctttgcggccctctggctcaccatcttggacttcatggacaagtacatgcacgcaggctccagcgacttactgtcagaggcgatccctgagtctctgaagaacatgcttctggtgatggacacagcggagattttccacagtgcagatgcacggggaggcggcccctcggccctctgggagatcacctgggaacgcattgactgttttctccctcacctacgagatgaactcttcaagcagaccgtcatccaggaccccatgcccatggagcctcaaggccaaaagcctctcgcctcagcccacctgacttccgctgctggcgacactaggacacctggccatccaccgcccccagagattccatctgagctgggggcctgtgactttgagaagcccgagagcccccgagccgccagcagcagctccccaggatcaccagtggcctcaagccccagcaggctgagccccacccccgacgggcctccacccttggctcagcccccactgatcctgcagcccttggcctccccactgcaggtgggcgtgccacctatgactctgcccatcatcctcaaccctgcgctcatcgaggccacctcaccagtgcccctcctggccacaccccgccccacagatcccatacccacctctgaggtcaactaaggcaggtcactcagagatcaggaccagtgcttcccaccaggctttccttgaccccacttctggctgtcctgcgggccacaagctcttcaggccaagtcagagctgctgttgctgccacttggatggggacctgaaaaagagaatgttgatagccccagctaagacccccaatcagctgtgggacctttttcctcctctgcgctccattcctgggggttcagcctgagagtgaactcagctgtcatctgcagcctctgcctccagcccggcagctctggggaggcatccgtgtgccggccctgcagtgcctgcccacggtcaggcattgaaaactaagcccaaccactctgcactttgtttcccactcccattagccctgggccacctcctccagttcttcctcttttactaattagttggtcagtttggagagttgactggcaccatggagggtaggcaggtgggggctgggtgggggactgcccacaggagcatgtacatatggaaaaacagaacaacagtggactttttatgatataataaatgtcttagtacc

SEQ ID NO: 3046 - protein, 1859 aa, Homo sapiens
MVDKNIYIIQGEINIVVGAIKRNARWSTHTPLDEERDPLLHSFGHLKEVLNSITELSEIEPNVFLRPFLEVIRSEDTTGPITGLALTSVNKFLSYALIDPTHEGTAEGMENMADAVTHARFVGTDPASDEVVLMKILQVLRTLLLTPVGAHLTNESVCEIMQSCFRICFEMRLSELLRKSAEHTLVDMVQLLFTRLPQFKEEPKNYVGTNMKKLKMRAGGMSDSSKWKKQKRSPRPPRHMTKVTPGSELPTPNGTTLSSNLTGGMPFIDVPTPISSASSEAASAVVSPSTDSGLEFSSQTTSKEDLTDLEQPGSPGYSTATEPGSSELGVPEQPDLQEGTHVEKSQSASVESIPEVLEECTSPADHSDSASVHDMDYVNPRGVRFTQSSQKEGTALVPYGLPCIRELFRFLISLTNPHDRHNSEVMIHMGLHLLTVALESAPVAQCQTLLGLIKDEMCRHLFQLLSIERLNLYAASLRVCFLLFESMREHLKFQMEMYIKKLMEIITVENPKMPYEMKEMALEAIVQLWRIPSFVTELYINYDCDYYCSNLFEELTKLLSKNAFPVSGQLYTTHLLSLDALLTVIDSTEAHCQAKVLNSLTQQEKKETARPSCEIVDGTREASNTERTASDGKAVGMASDIPGLHLPGGGRLPPEHGKSGCSDLEEAVDSGADKKFARKPPRFSCLLPDPRELIEIKNKKKLLITGTEQFNQKPKKGIQFLQEKGLLTIPMDNTEVAQWLRENPRLDKKMIGEFVSDRKNIDLLESFVSTFSFQGLRLDEALRLYLEAFRLPGEAPVIQRLLEAFTERWMNCNGSPFANSDACFSLAYAVIMLNTDQHNHNVRKQNAPMTLEEFRKNLKGVNGGKDFEQDILEDMYHAIKNEEIVMPEEQTGLVRENYVWNVLLHRGATPEGIFLRVPTASYDLDLFTMTWGPTIAALSYVFDKSLEETIIQKAISGFRKCAMISAHYGLSDVFDNLIISLCKFTALSSESIENLPSVFGSNPKAHIAAKTVFHLAHRHGDILREGWKNIMEAMLQLFRAQLLPKAMIEVEDFVDPNGKISLQREETPSNRGESTVLSFVSWLTLSGPEQSSVRGPSTENQEAKRVALECIKQCDPEKMITESKFLQLESLQELMKALVSVTPDEETYDEEDAAFCLEMLLRIVLENRDRVGCVWQTVRDHLYHLCVQAQDFCFLVERAVVGLLRLAIRLLRREEISAQVLLSLRILLLMKPSVLSRVSHQVAYGLHELLKTNAANIHSGDDWATLFTLLECIGSGVKPPAALQATARADAPDAGAQSDSELPSYHQNDVSLDRGYTSDSEVYTDHGRPGKIHRSATDADVVNSGWLVVGKDDVDNSKPGPSRPGPSPLINQYSLTVGLDLGPHDTKSLLKCVESLSFIVRDAAHITPDNFELCVKTLRIFVEASLNGGCKSQEKRGKSHKYDSKGNRFKKKSKEGSMLRRPRTSSQHASRGGQSDDDEDEGVPASYHTVSLQVSQDLLDLMHTLHTRAASIYSSWAEEQRHLETGGQKIEADSRTLWAHCWCPLLQGIACLCCDARRQVRMQALTYLQRALLVHDLQKLDALEWESCFNKVLFPLLTKLLENISPADVGGMEETRMRASTLLSKVFLQHLSPLLSLSTFAALWLTILDFMDKYMHAGSSDLLSEAIPESLKNMLLVMDTAEIFHSADARGGGPSALWEITWERIDCFLPHLRDELFKQTVIQDPMPMEPQGQKPLASAHLTSAAGDTRTPGHPPPPEIPSELGACDFEKPESPRAASSSSPGSPVASSPSRLSPTPDGPPPLAQPPLILQPLASPLQVGVPPMTLPIILNPALIEATSPVPLLATPRPTDPIPTSEVN

SEQ ID NO: 3047 - DNA, 1146 bp, Homo sapiens
ctcgttggtggggctgggggatgagagctgcaccgcgcgggacaagtcgccggcggcgcccgacggagcagaagagagagcatggagctggagaggatcgtcagtgcagccctccttgcctttgtccagacacacctcccggaggccgacctcagtggcttggatgaggtcatcttctcctatgtgcttggggtcctggaggacctgggcccctcgggcccatcagaggagaacttcgatatggaggctttcactgagatgatggaggcctatgtgcctggcttcgcccacatccccaggggcacaataggggacatgatgcagaagctctcagggcagctgagcgatgccaggaacaaagagaacctgcaaccgcagagctctggtgtccaaggtcaggtgcccatctccccagagcccctgcagcggcccgaaatgctcaaagaagagactaggtcttcggctgctgctgctgcagacacccaagatgaggcaactggcgctgaggaggagcttctgccaggggtggatgtactcctggaggtgttccctacctgttcggtggagcaggcccagtgggtgctggccaaagctcggggggacttggaagaagctgtgcagatgctggtagagggaaaggaagaggggcctgcagcctgggagggccccaaccaggacctgcccagacgcctcagaggcccccaaaaggatgagctgaagtccttcatcctgcagaagtacatgatggtggatagcgcatagtatcagaagattcaccggcccatggctcccaaggaggcccccaagaagctgatccgatacatcgacaaccaggtagtgagcaccaaaggggagcgattcaaagatgtgcggaaccctgaggccgaggagatgaaggccacatacatcaacctcaagccagccagaaagtaccgcttccattgaggcactcgccggactctgcccgagccttctaggctcagatcccagagggatgcaggagccctatacccctacacaggggccccctaactcctgtcccccttctctactcctttgctccatagtgttaacctactctcggagctgcctccatgggcacagtaaaggtggcccaaggaaaaaaaaaaaaaaaaaaaaaaaaaa

SEQ ID NO: 3048 - protein, 226 aa, Homo sapiens
MELERIVSAALLAFVQTHLPEADLSGLDEVIFSYVLGVLEDLGPSGPSEENFDMEAFTEMMEAYVPGFAHIPRGTIGDMMQKLSGQLSDARNKENLQPQSSGVQGQVPISPEPLQRPEMLKEETRSSAAAAADTQDEATGAEEELLPGVDVLLEVFPTCSVEQAQWVLAKARGDLEEAVQMLVEGKEEGPAAWEGPNQDLPRRLRGPQKDELKSFILQKYMMVDSA

SEQ ID NO: 3049 - DNA, 2822 bp, Homo sapiens
gcgctagcggcggacccggctgggcagttccttccccagaaggagagattcctctgccatggagtcctacgatgtgatcgccaaccagcctgtcgtgatcgacaacggatccggtgtgattaaagctggttttgctggtgatcagatccccaaatactgctttccaaactatgtgggccgacccaagcacgttcgtgtcatggcaggagcccttgaaggcgacatcttcattggccccaaagctgaggagcaccgagggctgctttcaatccgctatcccatggagcatggcatcgtcaaggattggaacgacatggaacgcatttggcaatatgtctattctaaggaccagctgcagactttctcagaggagcatcctgtgctcctgactgaggcgcctttaaacccacgaaaaaaccgggaacgagctgccgaagttttcttcgagaccttcaatgtgcccgctcttttcatctccatgcaagctgtactcagcctttacgctacaggcaggaccacaggggtggtgctggattctggggatggagtcacccatgctgtgcccatctatgagggctttgccatgccccactccatcatgcgcatcgacatcgcgggccgggacgtctctcgcttcctgcgcctctacctgcgtaaggagggctacgacttccactcatcctctgagtttgagattgtcaaggccataaaagaaagagcctgttacctatccataaacccccaaaaggatgagacgctagagacagagaaagctcagtactacctgcctgatggcagcaccattgagattggtccttcccgattccgggcccctgagttgctcttcaggccagatttgattggagaggagagtgaaggcatccacgaggtcctggtgttcgccattcagaagtcagacatggacctgcggcgcacgcttttctctaacattgtcctctcaggaggctctaccctgttcaaaggttttggtgacaggctcctgagtgaagtgaagaaactagctccaaaagatgtgaagatcaggatatctgcacctcaggagagactgtattccacgtggattgggggctccatccttgcctccctggacacctttaagaagatgtgggtctccaaaaaggaatatgaggaagacggtgcccgatccatccacagaaaaaccttctaatgtcgggacatcatcttcacctctctctgaagttaactccactttaaaactcgctttcttgagtcggagtgtttgcgaggaactgcctgtgtgtgagtgcgtgtgtggatatgagtgtgtgtgcacatgcgagtgccgtgtggccctgggaccctgggcccagaaaggacgatgaactacctgcagtggtgatggcctgaggcctggggttgaccactaactggctcctgacagggaagagcgctggcagaggctgtgctccctcctcaggtggcctctggctggctgtgggggactccgtttactaccacagggagacagagggaggtaagccatcccccgggagaccttgctgctgaccatcctaggctgggctggccccaccctcacccccacccccagggtgccctgaggccccaggcagctgctgcctccactatcgatgcctcctgactgcacactgaggactgggactggggttgagttctgtctggttttgttgccattttggtttgggaggctggaaaagcaccccaagagctattacagagactggagtcaggagagagcaggaggccctcatgttcaccagggaacaggaccacaccggccactggaggagggcaggagcagtcctcactctgaatggctgcagagttaatgttcccagcccagtcccctttcgggggccttgggagagtttaaggcacctgctggttccaggacctcgctttccatctgttcttgttgcaatgccatcttcaaaccgttttatttattgaagtgtttgttcagttaggggctggagagagggagcttgctgcctcctgccttgctacactaatgtttacagcacctaagcttagcctccagggccccacctctcccagctgatggtgagctgacagtgtccacaggttccaggaccatttgagattggaagctacactcaaagacactcccaccaggctctttctcccttttcctcttgctcactgccctggaatcaacaggctggttgctggttagattttctgaaacaggaggtaaaatttttctttggcagaggcccctaagcaagggaggggtgttggagagccagtgcccttaagactggagaaagctgcaatttaccaagttgccttttgccactgtagctgaccaggggactaggttgtagaggtgggaaggccccctctgggctgatcttgtgccattcttgaccttggacctgcttggttaaggagggagtgggccagaccagagtgccaggagctaatggagccaggcctgactcctaggagtggtccaaaggccttcagcctagatggtgcaaagctggggccagcctgtcttcaccggcaccctcacctgtgacaccaagacccaccccaatcccagacttcacacagtattctcccccacgccgtcctatgaccaaaggcccctgccaggtgtgggccacagcagcaggtatgtgtgaaagcaacgtagcgccccgcggactgcagtgcgcttaaccaactcacctcccttctcttagcccaagcctgtccctcgcacagcctcgcacaaaccacattgcctggtggggcccagtgtactgaaataaagtcgttccgatagacacgtc

SEQ ID NO: 3050 - protein, 376 aa, Homo sapiens
MESYDVIANQPVVIDNGSGVIKAGFAGDQIPKYCFPNYVGRPKHVRVMAGALEGDIFIGPKAEEHRGLLSIRYPMEHGIVKDWNDMERIWQYVYSKDQLQTFSEEHPVLLTEAPLNPRKNRERAAEVFFETFNVPALFISMQAVLSLYATGRTTGVVLDSGDGVTHAVPIYEGFAMPHSIMRIDIAGRDVSRFLRLYLRKEGYDFHSSSEFEIVKAIKERACYLSINPQKDETLETEKAQYYLPDGSTIEIGPSRFRAPELLFRPDLIGEESEGIHEVLVFAIQKSDMDLRRTLFSNIVLSGGSTLFKGFGDRLLSEVKKLAPKDVKIRISAPQERLYSTWIGGSILASLDTFKKMWVSKKEYEEDGARSIHRKTF

SEQ ID NO: 3051 - DNA, 4898 bp, Homo sapiens
cgccgtgcgcaggcgcggagctagacctcgctgcagcccccatcgcctcggggagtctcacccaccgagtccgcccgctggcccgtcagtgctctccccgtcgtttgccctctccagttcccccagtgcctgccctacgcaccccgatggcggagctgcggcctagcggcgcccccggccccaccgcgcccccggcccctggcccgactgcccccccggccttcgcttcgctctttcccccgggactgcacgccatctacggagagtgccgccgcctttaccctgaccagccgaacccgctccaggttaccgctatcgtcaagtactggttgggtggcccagaccccttggactatgttagcatgtacaggaatgtggggagcccttctgctaacatccccgagcactggcactacatcagcttcggcctgagtgatctctatggtgacaacagagtccatgagtttacaggaacagatggacctagtggttttggctttgagttgacctttcgtctgaagagagaaactggggagtctgccccaccaacatggcccgcagagttaatgcagggcttggcacgatacgtgttccagtcagagaacaccttctgcagtggggaccatgtgtcctggcacagccctttggataacagtgagtcaagaattcagcacatgctgctgacagaggacccacagatgcagcccgtgcagacaccctttggggtagttaccttcctccagatcgttggtgtctgcactgaagagctacactcagcccagcagtggaacgggcagggcatcctggagctgctgcggacagtgcctattgctggcggcccctggctgataactgacatgcggaggggagagaccatatttgagatcgatccacacctgcaagagagagttgacaaaggcatcgagacagatggctccaacctgagtggtgtcagtgccaagtgtgcctgggatgacctgagccggccccccgaggatgacgaggacagccggagcatctgcatcggcacacagccccggcgactctctggcaaagacacagagcagatccgggagaccctgaggagaggactcgagatcaacagcaaacctgtccttccaccaatcaaccctcagcggcagaatggcctcgcccacgaccgggccccgagccgcaaagacagcctggaaagtgacagctccacggccatcattccccatgagctgattcgcacgcggcagcttgagagcgtacatctgaaattcaaccaggagtccggagccctcattcctctctgcctaaggggcaggctcctgcatggacggcactttacatataaaagtatcacaggtgacatggccatcacgtttgtctccacgggagtggaaggcgcctttgccactgaggagcatccttacgcggctcatggaccctggttacaaattctgttgaccgaagagtttgtagagaaaatgttggaggatttagaagatttgacttctccagaggaattcaaacttcccaaagagtacagctggcctgaaaagaagctgaaggtctccatcctgcctgacgtggtgttcgacagtccgctacactagcctgggctgggccctgcaggggccagcagggagcccagctgctccccagtgacttccagtgtaacagttgtgtcaacgagatctccacaaataaaaggacaagtgtgaggaagactgcgcagtgccaccccgcagcccagtggggtgccatgcacaggccacaggccctccacctcacctccagctcaggggccgcaccccgccgctggctaagccttgtgacccatcaggccagtgagtgggcaaatgcggaccctccctgcctgcagcctgcacagattctggtttgaggtttgactctggaccctggctgtgcccctaggtggagacagccctctttctcacctaccccctgccgcacagcccagcaggagggaggcggacagccagatgcagagcgagtggatgcacttcccagctcatctctggaagcctttgctactcaagctcctctggccgcggaacaattcctctgatcatgtttggttttcttcttccttattttattttgtagaaaccgggtggtattttattgctctgcaaagatgtccagaagccatgtatataatgttttttaaacagaacttcattccccgttgaactttcgcattctctgacagaggcctagggctgtatctctccctgggctgccaccagagaaggtgcttggtgttcgcctgccagcccagagccctggaggagccggctgcacagagaggcttttcttcccagctgggcctgatggagcccggggcagggggagagtagagacactcccttgtgcagctttgagcctagtttagctggggccagggaggggtgctactgttttccaagtgaatgggtctcaaagacttggtgaccccagcctcatcttctaggccttttccatccaaccaggcctacctgggagagggtgaggttcagcacatcacacaccatccccactgtcattcagggcctgggtctccagctctgtaaccagtcctgtcccatttcctcagtccctgggcctcccagccttcaggctgtagggctgccttactaaaattgaaaaatccacctcttaacatctctttcactttggttttgctaacactgctctctgctgccctcccatcctccctgtatccattcatgccctatctttcattctccactcctaatccctctcctttctggcatcctggcctctcgtggtcctcagcccctcacccccagtactgcagatctcacagtttgccttccagaagccagcctatctctagcccatggttttggagttcctctcgggttatctcccacgcctgacctggaaccagcaagcccctttcctgccttcttacccccaactctagggatgggactgttacaatacttcaagatcactctttacacctcttcaaagcaaagtcatgacaatgcagggctcctcattgctcccatctgcctctgctgcacacacaggcaccagcagggatgccacaggagtgcccacagggtgcaggactccactgatgagagatccagccaaagagctgcccccaggggtatgagggcaccagctgggttctccagggagcaggagttggacctccatggagccactaggcctggcctcctctacacatccccagggctatctggttaattccatcaagctcagagttaaaaggcatatcagcctggagtatttgggagagactggctgcagatccccgccagccaagatgcaagccactcgggacctgatgtcggcagctgtgcctctactgccctgaggacttaccagagggagccctactggccttcccccaccacagcagccctgcctgtgaagctcttgtttctgacatttcacaggcagagaggtgccatcagttcgcctccattccttgccaccatgaccagcctctccctgaactctctcttgctcgggacctgcctgagggctccctgctgcagttcgccgtacttccatctgctgggtgcctccatcgttggttgggtggggatggggcattttctgagctaagctttgtcattagtttgtgaagcacctggtcagcaacctgccccagacctggagggtctttgtggactgaaggtagacaccagccagcatggtggccctgttctgggggagcagggtaaggcaggaggaagtgggtgagctccgagatgatgagcacatgaagcctgtggccccttcgtacctgcaatatgtcaggagcctcacgctcacccaagatcctgcaggggccaggctccatctcactggctctgagggcaggacagggtatcacacatttctcaccaggcctcctttcctatgggcattggtgcctcccagaggtttcttgggctgctggctggtgagagaggacccttaaagaagatcaagccaagctgaccttggaccctgtccagcacagcttctggcacaggatgcttggtgaatgtaccctttctttccctccctgcagctctgagggagcccctgaccttgtagtgggtggaggaggtaaggggcctccctccctaaatctgcctcttctgcaagctacttggagacttgcctagttgtacccacccctccaggtccctggtgctagagcttctgagaagggcctttccctttcctctttgcctgctatataaggcaggctcctgtggctctgctggctcagtgtgggctgcaggaggactgcagactcagctgcaattctgaggggggtttgggaggcttgtgcgaggtctcaggcctgtgtggggagctggtgcctcttcctgcccgtatctttctcttccaagggcagtgctccaaggcagggactggagaagccaaggggagagtctaaaagggctagagcatttttaaaaatagacacagggtcttgggactggggtttcggattgagttgcaagcagggagaaaacctgaaggtcggtgcccctatggggctgaccagtagagaatttcctttactgtatttttgtgtctggtcttccctttctggcttctaggacatccatgccaggtgaggtgcctgggtccctgttacaagtcaggagccctgtagggagacccctccttttgtacaagtacctgaatgctgcgacaagcagatttttgtaaaattttatattagtttttaatgtcagtggcgactcggttcctggggctgcagccagcctgggacttttgtaagaatttttgggtgactcacttagatgtcgtttccttcttgccccctcttcctctctgtaatctaagtgcattaaacatctttgcag

SEQ ID NO: 3052 - protein, 484 aa, Homo sapiens
MAELRPSGAPGPTAPPAPGPTAPPAFASLFPPGLHAIYGECRRLYPDQPNPLQVTAIVKYWLGGPDPLDYVSMYRNVGSPSANIPEHWHYISFGLSDLYGDNRVHEFTGTDGPSGFGFELTFRLKRETGESAPPTWPAELMQGLARYVFQSENTFCSGDHVSWHSPLDNSESRIQHMLLTEDPQMQPVQTPFGVVTFLQIVGVCTEELHSAQQWNGQGILELLRTVPIAGGPWLITDMRRGETIFEIDPHLQERVDKGIETDGSNLSGVSAKCAWDDLSRPPEDDEDSRSICIGTQPRRLSGKDTEQIRETLRRGLEINSKPVLPPINPQRQNGLAHDRAPSRKDSLESDSSTAIIPHELIRTRQLESVHLKFNQESGALIPLCLRGRLLHGRHFTYKSITGDMAITFVSTGVEGAFATEEHPYAAHGPWLQILLTEEFVEKMLEDLEDLTSPEEFKLPKEYSWPEKKLKVSILPDVVFDSPLH

SEQ ID NO: 3053 - DNA, 1622 bp, Homo sapiens
agcagcggcgggggcccgagggattctgaaggaagatttccattaggtaatttgtttaatcagtgcaagcgaaattaagggaaaatggatgtagaaaatgagcagatactgaatgtaaaccctgcagatcctgataacttaagtgactctctcttttccggtgatgaagaaaatgctgggactgaggaaataaagaatgaaataaatggaaattggatttcagcatcctccattaacgaagctagaattaatgccaaggcaaaaaggcgactaaggaaaaactcatcccgggactctggcagaggcgattcggtcagcgacagtgggagtgacgcccttagaagtggattaactgtgccaaccagtccaaagggaaggttgctggataggcgatccagatctgggaaaggaaggggactaccaaagaaaggtggtgcaggaggcaaaggtgtctggggtacacctggacaggtgtatgatgtggaggaggtggatgtgaaagatcctaactatgatgatgaccaggagaactgtgtttatgaaactgtagttttgcctttggatgaaagggcatttgagaagactttaacaccaatcatacaggaatattttgagcatggagatactaatgaagttgcggaaatgttaagagatttaaatcttggtgaaatgaaaagtggagtaccagtgttggcagtatccttagcattggaggggaaggctagtcatagagagatgacatctaagcttctttctgacctttgtgggacagtaatgagcacaactgatgtggaaaaatcatttgataaattgttgaaagatctacctgaattagcactggatactcctagagcaccacagttggtgggccagtttattgctagagctgttggagatggaattttatgtaatacctatattgatagttacaaaggaactgtagattgtgtgcaggctagagctgctctggataaggctaccgtgcttctgagtatgtctaaaggtggaaagcgtaaagatagtgtgtggggctctggaggtgggcagcaatctgtcaatcaccttgttaaagagattgatatgctgctgaaagaatatttactctctggagacatatctgaagctgaacattgccttaaggaactggaagtacctcattttcaccatgagcttgtatatgaagctattataatggttttagagtcaactggagaaagtacatttaagatgattttggatttattaaagtccctttggaagtcttctaccattactgtagaccaaatgaaaagaggttatgagagaatttacaatgaaattccggacattaatctggatgtcccacattcatactctgtgctggagcggtttgtagaagaatgttttcaggctggaataatttccaaacaactcagagatctttgtccttcaaggggcagaaagcgttttgtaagcgaaggagatggaggtcgtcttaaaccagagagctactgaatataagaactcttgcagtcttagatgttataaaaatatatatctgaattgtaagagttgttagcacaagttttttttttttttttttttaagcacttgttttgggtacaaggcatttctgacatttt

SEQ ID NO: 3054 - protein, 469 aa, Homo sapiens
MDVENEQILNVNPADPDNLSDSLFSGDEENAGTEEIKNEINGNWISASSINEARINAKAKRRLRKNSSRDSGRGDSVSDSGSDALRSGLTVPTSPKGRLLDRRSRSGKGRGLPKKGGAGGKGVWGTPGQVYDVEEVDVKDPNYDDDQENCVYETVVLPLDERAFEKTLTPIIQEYFEHGDTNEVAEMLRDLNLGEMKSGVPVLAVSLALEGKASHREMTSKLLSDLCGTVMSTTDVEKSFDKLLKDLPELALDTPRAPQLVGQFIARAVGDGILCNTYIDSYKGTVDCVQARAALDKATVLLSMSKGGKRKDSVWGSGGGQQSVNHLVKEIDMLLKEYLLSGDISEAEHCLKELEVPHFHHELVYEAIIMVLESTGESTFKMILDLLKSLWKSSTITVDQMKRGYERIYNEIPDINLDVPHSYSVLERFVEECFQAGIISKQLRDLCPSRGRKRFVSEGDGGRLKPESY

SEQ ID NO: 3055 - DNA, 1872 bp, Homo sapiens
atgcctccaaaggtgacttcagagctgcttcggcagctgagacaagccatgaggaactctgagtatgtgaccgaaccgatccaggcctacatcatcccatcgggagatgctcatcagagtgagtatattgctccatgtgactgtcggcgggcttttgtctctggattcgatggctctgcgggcacagccatcatcacagaagagcatgcagccatgtggactgacgggcgctactttctccaggctgccaagcaaatggacagcaactggacacttatgaagatgggtctgaaggacacaccaactcaggaagactggctggtgagtgtgcttcctgaaggatccagggttggtgtggaccccttgatcattcctacagattattggaagaaaatggccaaagttctgagaagtgccggccatcacctcattcctgtcaaggagaacctcgttgacaaaatctggacagaccgtcctgagcgcccttgcaagcctctcctcacactgggcctggattacacaggcatctcctggaaggacaaggttgcagaccttcggttgaaaatggctgagaggaacgtcatgtggtttgtggtcactgccttggatgagattgcgtggctatttaatctccgaggatcagatgtggagcacaatccagtatttttctcctacgcaatcataggactagagacgatcatgctcttcattgatggtgaccgcatagacgcccccagtgtgaaggagcacctgcttcttgacttgggtctggaagccgaatacaggatccaggtgcatccctacaagtccatcctgagcgagctcaaggccctgtgtgctgacctctccccaagggagaaggtgtgggtcagtgacaaggccagctatgctgtgagcgagaccatccccaaggaccaccgctgctgtatgccttacacccccatctgcatcgccaaagctgtgaagaattcagctgagtcagaaggcatgaggccggctcacattaaagatgctgttgctctctgtgaactctttaactggctggagaaagaggttcccaaaggtggtgtgacagagatctcagctgctgacaaagctgaggagtttcgcaggcaacaggcagactttgtggacctgagcttcccaacaatttccagtacgggacccaacggcgccatcattcactacgcgccagtccctgagacgaataggaccttgtccctggatgaggtgtaccttattgactcgggtgctcaatacaaggatggcaccacagatgtgacgcggacaatgcattttgggacccctacagcctacgagaaggaatgcttcacatatgtcctcaagggccacatagctgtgagtgcagccgttttcccgactggaaccaaaggtcaccttcttgactcctttgcccgttcagctttatgggattcaggcctagattacttgcacgggactggacatggtgttgggtcttttttgaatgtccatgagggtccttgcggcatcagttacaaaacattctctgatgagcccttggaggcaggcatgattgtcactgatgagcccgggtactatgaagatggggcttttggaattcgcattgagaatgttgtccttgtggttcctgtgaagaccaagtataattttaataaccggggaagcctgacctttgaacctctaacattggttccaattcagaccaaaatgatagatgtggattctcttacagacaaagagtgcgactggctcaacaattaccacctgacctgcagggatgtgattgggaaggaattgcagaaacagggccgccaggaagctctcgagtggctcatcagagagacgcaacccatctccaaacagcattaa

SEQ ID NO: 3056 - protein, 623 aa, Homo sapiens
MPPKVTSELLRQLRQAMRNSEYVTEPIQAYIIPSGDAHQSEYIAPCDCRRAFVSGFDGSAGTAIITEEHAAMWTDGRYFLQAAKQMDSNWTLMKMGLKDTPTQEDWLVSVLPEGSRVGVDPLIIPTDYWKKMAKVLRSAGHHLIPVKENLVDKIWTDRPERPCKPLLTLGLDYTGISWKDKVADLRLKMAERNVMWFVVTALDEIAWLFNLRGSDVEHNPVFFSYAIIGLETIMLFIDGDRIDAPSVKEHLLLDLGLEAEYRIQVHPYKSILSELKALCADLSPREKVWVSDKASYAVSETIPKDHRCCMPYTPICIAKAVKNSAESEGMRPAHIKDAVALCELFNWLEKEVPKGGVTEISAADKAEEFRRQQADFVDLSFPTISSTGPNGAIIHYAPVPETNRTLSLDEVYLIDSGAQYKDGTTDVTRTMHFGTPTAYEKECFTYVLKGHIAVSAAVFPTGTKGHLLDSFARSALWDSGLDYLHGTGHGVGSFLNVHEGPCGISYKTFSDEPLEAGMIVTDEPGYYEDGAFGIRIENVVLVVPVKTKYNFNNRGSLTFEPLTLVPIQTKMIDVDSLTDKECDWLNNYHLTCRDVIGKELQKQGRQEALEWLIRETQPISKQH

SEQ ID NO: 3057 - DNA, 1056 bp, Homo sapiens
ccgtccagagactgctgaacccctatccatctgctaccaccacccactctggacacagaacatccagtcatggaaaaaaatgagctggttcagaaggccaaactggctgagcaggctgagcaatatgataacatggcagcctgcatgaagtctgtaactgagcaaggagctgaattatccaatgaggagaggaatcttctctcagttgcttataaaaatgttgtaggagcccgtaggtcatcttggagggtcatctcaagtattgaacaaaagacggaaggtgttgagaaaaaacagcagatggctcgagaatacagagagaaaattgagatggagctaagagatatctccaatgatgtactatctcttttggaaaagttcttgatctccaatgcttcacaagcagagagcaaagtcttctatttgaaaatgaaaggagattactaccgttacttggctgaggttgccgctggtgatggcaagaaagggattgtgggtcagtcacaacaagcataccaagaagcttttgaaatcagcaaaaaggaaatgcaaccaacacatactgtcagactgggtctggcccttaacttctcttgttctattatgagattctgaactccccagataaagtctgctctcttgcaaagatggcttttgatgaaggcattgctgaacttgatacattaaatgaagagtcatacaaagacagcacgctaataatgcaattaccgagagacaacttgacattgtggacactggatacccaaggagacaaagctgaagcaggagaaagaggggaaaattaaccggccttccaacttttgtctgcctctttctaaaatttacacagtagaccatttgtcatccatggtgtcccacaaatggttttttgtttacaatttatggcagatgtgtgttacttttatttgaatttctatatttcccatgtggtttttatgtttaatattaggggagtagagccagttaacatttagggagttatctgttttcatcttgaggtggccaatatggggatgtggaatttttatacaagtt

SEQ ID NO: 3058 - DNA, 5610 bp, Homo sapiens
aacatttttgaaagatcactcagctttaacacaccttggctgggtctggataaaaaaaaagtgagcactgcaaatttctagaagaaaacatcaggagaagaaagagagagggggatttattcaaagttgtttccaattccttcaaaacctcaaaccaggtggctatggtatggatgtaaccaagaaaaacaaacgagatggaactgaagtcactgagagaattgtcactgaaacagtaaccacaagacttacatccttaccaccaaaaggcgggaccagcaatggctatgctaaaacagcctctcttggtggagggagccggctggagaaacaaagcctgactcatggcagcagcggctacataaactcaactggaagcacacgaggccatgcctccacctctagttacaggagggctcactcacctgcctccactctgcccaactccccaggctcaacctttgaaaggaaaactcacgttacccgccatgcgtatgaagggagctccagtggcaactcttctccggagtaccctcggaaggaatttgcatcttcttcaaccagaggacggagtcaaacacgagagagtgaaattcgagttcgactgcagagtgcgtccccatccacccgatggacagaattggatgatgttaagcgtttgctcaaggggagtcgatcggcaagtgtgagccccacccggaattcctccaacacactccccatccccaagaaaggcactgtggagaccaaaattgtgacagcgagctcccagtcggtgtcaggcacctacgatgcaacgatcctggatgccaaccttccctcccatgtgtggtcctccaccctgcccgcggggtcctccatggggacctatcacaacaacatgacaacccagagctcatccctcctcaacaccaatgcctactctgcgggatcagtcttcggagttccaaacaacatggcgtcctgctcacccactttgcaccctggactcagcacatcctcctcagtgtttggcatgcagaacaatctggcccccagcttgaccaccctgtcccatggcaccaccaccacttccacagcatatggggtgaagaaaaacatgccccagagtcctgcggctgtgaacactggcgtttccacctccgccgcctgcaccacaagtgtgcagagcgatgaccttttgcacaaggactgcaagttcctgatcctagagaaagacaacacacctgccaagaaggagatggagctgctcatcatgaccaaggacagcgggaaggtctttacagcctcccctgccagcatcgctgcaacttctttttcagaagacaccctaaaaaaagaaaagcaagctgcctacaatgctgactcaggcctaaaagccgaagctaatggagacctgaagactgtgtccacaaagggcaagaccaccactgcagatatccacagctacggcagcagtggtggtggtggcagtggaggaggtggcggtgttggtggcgctggcggcggcccttggggaccagcgccagcctggtgcccctgcggctcctgctgcagctggtggaagtggctgctgggcctgctgctcacctggctgctactcctggggctgctcttcggcctcattgctctggcggaggaggtgaggaagctgaaggcgcgtgtggatgagctggagaggatcaggaggagcatactgccctatggggacagcatggatagaatagaaaaggaccgcctccagggcatggcacccgcggcgggagcagacctggacaaaattgggctgcacagtgacagccaggaggagctctggatgttcgtgaggaagaagctaatgatggaacaggaaaatggaaatctccgaggaagccctggccctaaaggtgacatgggaagtccaggccctaaaggagatcgagggttccctgggactccaggtatccctgggcccttgggccacccaggtccacaaggaccaaagggtcaaaaaggcagcgtgggagatcctggcatggaaggccccatgggccagagagggcgagaaggccccatgggacctcgtggtgaggcagggcctcctggatctggagagaaaggggaaagaggggctgctggtgaaccaggtcctcatggcccacctggtgtcccaggttctgtgggtcccaaaggttccagcggctctcctggcccacagggccctccaggtcctgtaggtctccaagggctccgaggtgaagtaggacttcctggtgtcaaaggtgacaaaggaccaatgggaccaccaggacccaaaggtgaccagggtgagaaaggacctcgaggcctcacaggcgagcctggcatgagaggtttgcctggtgctgttggtgagcccggggctaaaggagcaatgggtcctgctggcccagacggacaccaaggcccaagaggtgaacaaggtcttactgggatgcctggaatccgtggcccaccaggaccttctggagacccaggaaagccaggtctcacaggaccccagggacctcagggacttcccggtacccctggccgaccaggaataaaaggtgaaccaggagctccaggcaagatcgtgacttcggaggggtcatcgatgctcactgtcccaggccccccaggacctcctggagccatgggacccccaggacctccaggtgccccaggccctgccggcccagctggtctcccaggacatcaagaagttcttaatttacaaggtcccccaggcccacccggcccacgcgggccaccagggccttccattccaggcccaccaggaccccgaggcccaccaggggagggtttgccaggcccaccaggcccaccaggatcgttcctgtccaactcagaaaccttcctctccggccccccaggcccacctggccccccaggtcccaagggagaccaaggtcccccaggccccagaggacaccaaggcgagcaaggcctcccaggtttctcaacctcagggtccagttctttcggactcaaccttcagggaccaccaggcccacctggcccccagggacccaaaggtgacaaaggtgatccaggtgttccaggggctcttggcattcctagtggtccttctgaagggggatcatcaagtaccatgtacgtgtcaggcccgccagggccccctgggccccctgggcctccgggctctatcagcagctctggccaggagattcagcagtacatctctgagtacatgcagagtgacagtattagatcttacctatccggagttcagggtcccccaggcccacctggtcccccaggacctgtcaccaccatcacaggcgagactttcgactactcagagctggcaagccacgttgtgagctacttacggacttcggggtacggtgtcagcttgttctcgtcctccatctcttctgaagacattctggctgtgctgcagcgggatgacgtgcgtcagtacctacgtcagtacttgatgggccctcggggtccgccagggccaccaggagccagtggagatgggtccctcctgtctttggactatgcagagctgagtagtcgcattctcagctacatgtcgagttctgggatcagcattgggcttcctggtcccccggggccccctggcttgccgggaacctcctatgaggagctcctctccttgctgcgagggtctgaattcagaggcatcgttggacccccaggtcccccgggtccaccagggatcccaggcaatgtgtggtccagcatcagcgtggaggacctctcgtcttacttacatactgccggcttgtcattcatcccaggccctccaggacctcctggtcccccagggcctcgagggcccccgggtgtctcaggagccctggcaacctatgcagctgaaaacagcgacagcttccggagcgagctgatcagctacctcacaagtcctgatgtgcgcagcttcattgttggccccccaggccctcctgggccgcagggaccccctggggacagccgcctcctgtccacggatgcctcccacagtcggggtagcagctcctcctcacacagctcatctgtcaggcggggcagctcctacagctcttccatgagcacaggaggaggtggtgcaggctccctgggtgcaggcggtgcctttggtgaagctgcaggagacaggggtccctatggcactgacatcggcccaggcggaggctatggggcagcagcagaaggcggcatgtatgctggcaatggcggactattgggagctgactttgctggagatctggattacaatgagctggctgtgagggtgtcagagagcatgcagcgtcagggcctactgcaagggatggcctacactgtccagggcccaccaggccagcctgggccacaggggccacccggcatcagcaaggtcttctctgcctacagcaacgtgactgcggacctcatggacttcttccaaacttatggagccattcaaggaccccctgggcaaaaaggagagatgggcactccaggacccaaaggtgacaggggccctgctgggccaccaggtcatcctgggccacctggccctcgaggacacaagggagaaaaaggagacaaaggtgaccaagtctatgctgggcggagaaggagaagaagtattgctgtcaagccgtgagctagccatggcaggacagctcctggaccaggtctcataatgcatgtggcacttaggtccaaggtctccagagggtgaaagctggagtctgtcaatgtcctactgagacagcacagccaacctagctagcaacatttgttttagtctgaacaatatatacttatagaattcagtcaaagatacacaatctgaaacagcttcatggggtggactctaacagtagttgcaatgttttagaatgagacttacttctctgctatctagatctgaactccttggcttctttacttagttcaagccccagcctaggaaagccagttacataaaagttggctcaggagtcttagagctttacctaaatatgagcccagaaaacggaggatgggggtggggcgccttcctggaggtgacacttgatgggggtgtgttctggttactgttctaaggctgtgccatcagctccttcctcccctgttcattctgcattctctagtcagttggctaagaagtgactcttgcaactaaaaaaattaagaaattcacttcccctctaggaggtgatgatagggtttctaatggttatatgtatatcacattcccatttgcttagaaagtctgattgtagctatgattgtccgtaggcccatactagagttcatggatatgttatactgaaccaggccagagcaaacagaaaaagaaggttgagggcaatggacaaggaaggaataaagggagaagagggaaaacagaaaacctgatgctggggacacagcatcagctcaagacgtcaccctccattctgcactcagaaaatggcacttgggggactgggcgcagttggtctttaaccacttttcaatgtctaaaaacatttgtttgtggtctataagatgaaacatcatttcaatcgtaaaatttcccattaaagaagtttttttttctaa

SEQ ID NO: 3059 - DNA, 6440 bp, Homo sapiens
ctggtctccgcgtgtgtgagtaccgcggcgcgaggttagtggtagctgggtgcagacgccgtggcgctggagacccaaacatggcaaacctggaagaaagcttcccccgaggaggtacaagaaagatccacaaaccagagaaagctttccagcagtcagttgaacaagacaacttatttgatatttctactgaagagggatccaccaaaagaaaaaagagccagaaggggccagcaaaaacaaaaaagttgaaaatcgaaaagagagaaagcagcaagtccgcaagagagaagtttgaaatccttagtgttgagtccctgtgtgagggaatgcgtattttgggttgcgtgaaagaggtgaatgaactggaactggtgattagtctccccaatggcctccagggctttgtgcaagtcactgaaatctgtgatgcctacaccaaaaagctgaatgagcaggtgacacaagaacaacctctgaaggacctacttcacttgcctgaacttttctcacctggaatgctggtaagatgtgtggtgagcagtctgggcatcacagacaggggcaagaagagtgtcaagctgtctctgaaccccaaaaatgtcaacagagtgctgagtgctgaggccctgaagcctggcatgctacttacaggtaccgtatccagcctggaagaccatggctacctagtggacattggtgttgatgggaccagagcttttctgccactgctgaaagcccaggagtacatcagacagaagaacaaaggtgctaaactaaaggtgggtcagtacctgaactgcattgttgaaaaggtgaaaggcaacggaggagttgttagtctgtctgttggtcactcagaggtttctacggccattgctactgaacagcagagctggaaccttaataacttgctaccaggactggtggtcaaagctcaggtacagaaggtgactccatttggccttacgctaaacttcctcacattcttcacgggcgtggttgactttatgcacctggatcccaagaaagctggaacatatttctcaaatcaggcagtgagggcctgcatcctttgcgtccatcctcgaaccagagttgtgcacctgagcctgcgccccatcttcctacagcctggacgcccactcacccgactctcttgccagaaccttggagcagtgctggatgatgttcctgtccagggttttttcaaaaaggctggggccacctttaggctgaaggatggggttctggcctatgcccggctcagccatctctctgattctaagaacgtcttcaatcctgaggccttcaagccagggaacactcacaagtgtagaattattgactacagccaaatggatgaactggccttgctctctctacgaacgtctattattgaagctcagtaccttagatatcatgacatcgaacctggggcagtggtaaagggcacagtgctaaccataaagtcatatgggatgctggtgaaggtgggcgagcagatgaggggcctggtacctcccatgcacctggctgacatcctgatgaagaatccggagaagaagtaccacatcggggatgaggtcaagtgccgggttttgctttgtgaccctgaagccaagaagctgatgatgaccctgaaaaaaaccctgattgagtccaaactacctgtcattacctgctatgccgatgccaagcctggtctgcagacacatggcttcatcatcagggtcaaggactatggctgcattgtgaagttctacaacaatgtgcagggactggtgcccaagcatgagctcagtactgagtatatccctgacccggagagagttttttacactggccaggtggtgaaggttgtcgtattgaactgtgagccatccaaagagaggatgctcttatccttcaagctgtcgagtgatccagagccaaagaaagagcctgcaggacacagtcagaagaaaggaaaagccattaacattgggcagttggtagatgtgaaggttttagagaagaccaaagatgggctggaggtggctgtcctgccccacaacatccgtgctttcctccccacatctcatctgtcggaccacgttgccaacggcccattgttacatcattggctccaggcaggtgacatccttcaccgagtcctgtgtctgagccagagcgaggggcgtgttcttctttgcaggaagccagccttggtctccacagtagaaggtggccaggatcccaagaacttctcagaaatccatcctggaatgctgctcattggttttgtgaagagcatcaaggactatggcgtgttcatccagttcccctcaggtcttagcggactggccccaaaagctatcatgagtgacaaatttgtgacctccacaagtgaccactttgttgagggccagacagtagcggcaaaggtgaccaatgtggatgaggagaagcagcggatgctgctgtcactgcggctgtcggactgtggtctgggggacttggctatcaccagcctcctcctcctgaatcagtgcctggaggagctgcagggcgtgcgcagccttatgagcaaccgagactctgtgttgatccagacgctggccgagatgaccccaggaatgttccttgacctagtggtgcaggaggtgttggaagatggctctgtggtattcagtgggggtccagtgcccgacctggtcctgaaagccagcagataccatcgcgcagggcaggaggtggaatctgggcagaaaaagaaggttgttatcttaaatgttgatcttttgaagttggaagtgcacgtttcccttcaccaggacttggtgaatagaaaagctagaaagctgaggaaaggcagcgaacaccaggcgattgtgcagcacttggagaagtcctttgccattgcctccttggtagagacgggccacctggcagctttctccctgacctctcacctcaacgacaccttccgctttgactcagagaaattgcaggtgggacagggtgtctccctaaccctcaagaccacagaaccaggagtgactggccttcttttggctgtggaggggccggctgccaagaggaccatgaggccgacccagaaggactctgagacagttgatgaggatgaagaagtggatccagctctgactgtagggaccataaagaagcacaccctctccatcggggacatggtcacagggactgtcaagtccattaagcctacccatgtggttgtgactctggaagatggcattattggctgtatccatgcctcccacattctagatgatgttccagagggcacctctcctactaccaagctgaaggttgggaagacggtcactgcccgagtgattggcgggcgagacatgaagacattcaagtatctcccaataagtcaccccagattcgttcgaaccatcccggagctgagtgttcggccaagtgagctggaggatggccacactgctcttaacactcactctgttagccccatggagaagattaaacagtaccaggccggccagactgttacttgcttcttaaagaaatacaatgtggtgaagaaatggcttgaggtggagattgccccagacatccgggggagaattcccttattgctcacttctctgagcttcaaggttctgaagcatccagataagaagttccgggttggccaggccctgagggccaccgttgttggcccagattcctccaagaccctcttatgtctgtccctcacaggtcctcacaagcttgaggaaggggaagtggccatgggccgagtggtgaaggtgactcccaacgaggggctgaccgtctccttcccctttgggaagataggaacagtcagtatatttcacatgagtgactcctactccgagacgcccctggaagacttcgtcccccagaaggttttcagatgttacatcctgtccactgcagacaacgtattgactttgtcgctgcgatcatccagaacaaacccggagacgaaaagcaaagtagaagatccagagattaactccatccaggacattaaggaagggcagcttctgaggggctatgtagggtccatccagccacacggtgtgttctttcgccttggcccctccgttgtgggtttggctcggtactcccatgtctcccagcacagcccgtccaagaaagccctttataacaaacacctccctgaagggaagctgctcacagccagggtcctacgccttaaccaccagaagaacctggtagagctgtctttcctccccggagacactgggaagccagacgtgctttctgcttccttggaagggcaacttacaaagcaagaggagaggaaaacagaggctgaggagagagaccaaaaaggggaaaagaaaaatcagaaaaggaacgagaagaagaaccagaaggggcaggaggaggtggagatgcccagcaaggagaagcaacagccccagaagccacaggcgcagaagcggggcgggcgggagtgccgggagtctgggagtgagcaggaaagagtgagcaagaagccaaagaaagccggcctgtcagaggaggacgacagccttgtggacgtgtactatcgggagggaaaagaggaggcagaagagacgaatgtgctgcccaaggagaagcaaaccaagccagcagaagcgccccggctgcagctgtcttcaggcttcgcttggaatgtgggactagactctctgaccccggccttgccacctctagcagagagctcagacagcgaggaggatgagaagccacaccaagccacgataaagaaaagcaagaaagaaagggagttggagaagcagaaggcagagaaggaactgtcccgcattgaggaggcgctgatggatcctgggcggcagccagagtccgcggatgattttgaccgactggtgctgagctcccccaacagctccattctgtggctgcagtacatggctttccacctgcaggccacggagatcgagaaggcccgtgccgtggctgagagggcccttaagaccatctccttcagagaggagcaggagaagctgaacgtgtgggtggctctgctgaacctggagaacatgtacggctctcaggagtccctgaccaaggtctttgagcgagccgtgcagtacaacgagcctctcaaagtctttctccacctggctgacatctacgccaagtcagagaaattccaggaagctggtgaactctacaaccggatgctgaagcgtttccggcaggagaaagctgtgtggatcaaatacggcgccttccttctgcggaggagccaggctgcagccagtcaccgcgtgctgcagcgagccctggagtgcctgcctagcaaggagcatgtggatgtcattgccaagtttgcccagcttgagtttcagctgggggatgcagagcgggccaaagccatttttgagaacacgctgagcacctacccaaagcgcacagatgtctggtcggtctatatcgacatgaccatcaagcacggcagccagaaggacgtccgggacatctttgagcgggtcattcatctgagcttggcccccaagagaatgaagttcttcttcaagcgctacctggactacgagaagcagcatggcactgagaaggatgtgcaggcagtcaaggccaaggccctggagtatgtggaggccaagagctcagtgctagaggactagtggcaggctggctctgtgggacactgtcaacaatgggccagcccggccccgcctcgagtgcctgggcactcggaaaactgttacctcaggactctatttaaatgctgctttttctgcagcacgcttggggaaatcctgtcaggatgaaaaggaagttgagattttttaaatccctcttcgcttgctttattttcagtaccaacttgttatctttttccttatctgaggctacctggggattgtgggcagcaggcccctggactcccagaaatgctgagggtccctcttccaggggagttccctggggagcaagagtagaggggctattcccgagggtcctgtggtcagggtcctgctttgtccctggcaggctgtcagtccagctggagggggtcagtaggctccagggagtgggccctcccctccgatcttggagtctctgggtgttccttcagcctcagcctcactggtaccttctgccctttaggggaggctatgagtctgggacaggaggacaaattcagagcccagagggggaaatggagaaacctgggctgctgaggaaagccacgggtgttggcgtgaactgatgatgtctcatcccacgcccactatggccacattacctaacctctccatatctgggctattcaaggtcttggaggccagcacagacccagctagttgttgaagccagttcttttttgtcttggtcatgagggaattaaacgttttctctggcag

SEQ ID NO: 3060 - protein, 1871 aa, Homo sapiens
MANLEESFPRGGTRKIHKPEKAFQQSVEQDNLFDISTEEGSTKRKKSQKGPAKTKKLKIEKRESSKSAREKFEILSVESLCEGMRILGCVKEVNELELVISLPNGLQGFVQVTEICDAYTKKLNEQVTQEQPLKDLLHLPELFSPGMLVRCVVSSLGITDRGKKSVKLSLNPKNVNRVLSAEALKPGMLLTGTVSSLEDHGYLVDIGVDGTRAFLPLLKAQEYIRQKNKGAKLKVGQYLNCIVEKVKGNGGVVSLSVGHSEVSTAIATEQQSWNLNNLLPGLVVKAQVQKVTPFGLTLNFLTFFTGVVDFMHLDPKKAGTYFSNQAVRACILCVHPRTRVVHLSLRPIFLQPGRPLTRLSCQNLGAVLDDVPVQGFFKKAGATFRLKDGVLAYARLSHLSDSKNVFNPEAFKPGNTHKCRIIDYSQMDELALLSLRTSIIEAQYLRYHDIEPGAVVKGTVLTIKSYGMLVKVGEQMRGLVPPMHLADILMKNPEKKYHIGDEVKCRVLLCDPEAKKLMMTLKKTLIESKLPVITCYADAKPGLQTHGFIIRVKDYGCIVKFYNNVQGLVPKHELSTEYIPDPERVFYTGQVVKVVVLNCEPSKERMLLSFKLSSDPEPKKEPAGHSQKKGKAINIGQLVDVKVLEKTKDGLEVAVLPHNIRAFLPTSHLSDHVANGPLLHHWLQAGDILHRVLCLSQSEGRVLLCRKPALVSTVEGGQDPKNFSEIHPGMLLIGFVKSIKDYGVFIQFPSGLSGLAPKAIMSDKFVTSTSDHFVEGQTVAAKVTNVDEEKQRMLLSLRLSDCGLGDLAITSLLLLNQCLEELQGVRSLMSNRDSVLIQTLAEMTPGMFLDLVVQEVLEDGSVVFSGGPVPDLVLKASRYHRAGQEVESGQKKKVVILNVDLLKLEVHVSLHQDLVNRKARKLRKGSEHQAIVQHLEKSFAIASLVETGHLAAFSLTSHLNDTFRFDSEKLQVGQGVSLTLKTTEPGVTGLLLAVEGPAAKRTMRPTQKDSETVDEDEEVDPALTVGTIKKHTLSIGDMVTGTVKSIKPTHVVVTLEDGIIGCIHASHILDDVPEGTSPTTKLKVGKTVTARVIGGRDMKTFKYLPISHPRFVRTIPELSVRPSELEDGHTALNTHSVSPMEKIKQYQAGQTVTCFLKKYNVVKKWLEVEIAPDIRGRIPLLLTSLSFKVLKHPDKKFRVGQALRATVVGPDSSKTLLCLSLTGPHKLEEGEVAMGRVVKVTPNEGLTVSFPFGKIGTVSIFHMSDSYSETPLEDFVPQKVFRCYILSTADNVLTLSLRSSRTNPETKSKVEDPEINSIQDIKEGQLLRGYVGSIQPHGVFFRLGPSVVGLARYSHVSQHSPSKKALYNKHLPEGKLLTARVLRLNHQKNLVELSFLPGDTGKPDVLSASLEGQLTKQEERKTEAEERDQKGEKKNQKRNEKKNQKGQEEVEMPSKEKQQPQKPQAQKRGGRECRESGSEQERVSKKPKKAGLSEEDDSLVDVYYREGKEEAEETNVLPKEKQTKPAEAPRLQLSSGFAWNVGLDSLTPALPPLAESSDSEEDEKPHQATIKKSKKERELEKQKAEKELSRIEEALMDPGRQPESADDFDRLVLSSPNSSILWLQYMAFHLQATEIEKARAVAERALKTISFREEQEKLNVWVALLNLENMYGSQESLTKVFERAVQYNEPLKVFLHLADIYAKSEKFQEAGELYNRMLKRFRQEKAVWIKYGAFLLRRSQAAASHRVLQRALECLPSKEHVDVIAKFAQLEFQLGDAERAKAIFENTLSTYPKRTDVWSVYIDMTIKHGSQKDVRDIFERVIHLSLAPKRMKFFFKRYLDYEKQHGTEKDVQAVKAKALEYVEAKSSVLED

SEQ ID NO: 3061 - DNA, 581 bp, Homo sapiens
ccgagaggtggttacattcgttgaaggacaccagctgcggaatttgcggctttggcagacccagctgagtcactgtcactgcctaccaatctcgaccggacctcgaccggctcgtctgtgctgccaatcgactcggcgtggcgtcggtcgtggtagataggcggtcatgcatacgaattttcagctcttgttctggtgaccttttgaatacgtcttgtctataaaagaaattcatgcctttgtaaaatacacagattgaaatcatggcaggtccagaaagtgatgcgcaataccagttcactggtattaaaaaatatttcaactcttatactctcacaggtagaatgaactgtgtactggccacatatggaagcattgcattgattgtcttatatttcaagttaaggtccaaaaaaactccagctgtgaaagcaacataaatggattttaaactgtctacggttcttaacctcatctgttaagttcccatgcctggagaagctaatgccaactcatcatgtgataattcaatttgtacaataaattatgaacccaaaaaaaaaaaaaaaaaaaaaaaaaaa

SEQ ID NO: 3062 - protein, 58 aa, Homo sapiens
MAGPESDAQYQFTGIKKYFNSYTLTGRMNCVLATYGSIALIVLYFKLRSKKTPAVKAT

SEQ ID NO: 3063 - DNA, 689 bp, Homo sapiens
cggcatgtggaagaaggtgaagatggcggtggccagggccggggtcttgggagtccagtggctgcaaagggcatcccggaacgtgatgccgctgggcgcacggacagcctcccacatgaccaaggacatgttcccggggccctatcctaggaccccagaagaacgggccgccgccgccaagaagtataatatgcgtgtggaagactacgaaccttacccggatgatggcatggggtatggcgactacccgaagctccctgaccgctcacagcatgagagagatccatggtatagctgggaccagccgggcctgaggttgaactggggtgaaccgatgcactggcacctagacatgtacaacaggaaccgtgtggatacatcccccacacctgtttcttggcatgtcatgtgtatgcagctcttcggtttcctggctttcatgatattcatgtgctgggtgggggacgtgtaccctgtctaccagcctgtgggaccaaagcagtatccttacaataatctgtacctggaacgaggcggtgatccctccaaagaaccagagcgggtggttcactatgagatctgaggaggcttcgtgggcttttgggtcctctaactaggactccctcattcctagaaatttaaccttaatgaaatccctaataaaactcagtgctgtgttaaaaaaaaaa

SEQ ID NO: 3064 - protein, 186 aa, Homo sapiens
MAVARAGVLGVQWLQRASRNVMPLGARTASHMTKDMFPGPYPRTPEERAAAAKKYNMRVEDYEPYPDDGMGYGDYPKLPDRSQHERDPWYSWDQPGLRLNWGEPMHWHLDMYNRNRVDTSPTPVSWHVMCMQLFGFLAFMIFMCWVGDVYPVYQPVGPKQYPYNNLYLERGGDPSKEPERVVHYEI

SEQ ID NO: 3065 - DNA, 1444 bp, Homo sapiens
acggtcacccgttgccagctctagcctttaaattcccggctcggggacctccacgcaccgcggctagcgccgacaaccagctagcgtgcaaggcgccgcggctcagcgcgtaccggcgggcttcgaaaccgcagtcctccggcgaccccgaactccgctccggagcctcagccccctggaaagtgatcccggcatccgagagccaagatgccggcccacttgctgcaggacgatatctctagctcctataccaccaccaccaccattacagcgcctccctccagggtcctgcagaatggaggagataagttggagacgatgcccctctacttggaagacgacattcgccctgatataaaagatgatatatatgaccccacctacaaggataaggaaggcccaagccccaaggttgaatatgtctggagaaacatcatccttatgtctctgctacacttgggagccctgtatgggatcactttgattcctacctgcaagttctacacctggctttggggggtattctactattttgtcagtgccctgggcataacagcaggagctcatcgtctgtggagccaccgctcttacaaagctcggctgcccctacggctctttctgatcattgccaacacaatggcattccagaatgatgtctatgaatgggctcgtgaccaccgtgcccaccacaagttttcagaaacacatgctgatcctcataattcccgacgtggctttttcttctctcacgtgggttggctgcttgtgcgcaaacacccagctgtcaaagagaaggggagtacgctagacttgtctgacctagaagctgagaaactggtgatgttccagaggaggtactacaaacctggcttgctgatgatgtgcttcatcctgcccacgcttgtgccctggtatttctggggtgaaacttttcaaaacagtgtgttcgttgccactttcttgcgatatgctgtggtgcttaatgccacctggctggtgaacagtgctgcccacctcttcggatatcgtccttatgacaagaacattagcccccgggagaatatcctggtttcacttggagctgtgggtgagggcttccacaactaccaccactcctttccctatgactactctgccagtgagtaccgctggcacatcaacttcaccacattcttcattgattgcatggccgccctcggtctggcctatgaccggaagaaagtctccaaggccgccatcttggccaggattaaaagaaccggagatggaaactacaagagtggctgagtttggggtccctcaggttcctttttcaaaaaccagccaggcagaggttttaatgtctgtttattaactactgaataatgctaccaggatgctaaagatgatgatgttaacccattccagtacagtattcttttaaaattcaaaagtattgaaagcc

SEQ ID NO: 3066 - DNA, 1941 bp, Homo sapiens
tctcttgattcctagtctctcgatatggcacctccgtcagtctttgccgaggttccgcaggcccagcctgtcctggtcttcaagctcactgccgacttcagggaggatccggacccccgcaaggtcaacctgggagtgggagcatatcgcacggatgactgccatccctgggttttgccagtagtgaagaaagtggagcagaagattgctaatgacaatagcctaaatcacgagtatctgccaatcctgggcctggctgagttccggagctgtgcttctcgtcttgcccttggggatgacagcccagcactcaaggagaagcgggtaggaggtgtgcaatctttggggggaacaggtgcacttcgaattggagctgatttcttagcgcgttggtacaatggaacaaacaacaagaacacacctgtctatgtgtcctcaccaacctgggagaatcacaatgctgtgttttccgctgctggttttaaagacattcggtcctatcgctactgggatgcagagaagagaggattggacctccagggcttcctgaatgatctggagaatgctcctgagttctccattgttgtcctccacgcctgtgcacacaacccaactgggattgacccaactccggagcagtggaagcagattgcttctgtcatgaagcaccggtttctgttccccttctttgactcagcctatcagggcttcgcatctggaaacctggagagagatgcctgggccattcgctattttgtgtctgaaggcttcgagttcttctgtgcccagtccttctccaagaacttcgggctctacaatgagagagtcgggaatctgactgtggttggaaaagaacctgagagcatcctgcaagtcctttcccagatggagaagatcgtgcggattacttggtccaatccccccgcccagggagcacgaattgtggccagcaccctctctaaccctgagctctttgaggaatggacaggtaatgtgaagacaatggctgaccggattctgaccatgagatctgaactcagggcacgactagaagccctcaaaacccctgggacctggaaccacatcactgatcaaattggcatgttcagcttcactgggttgaaccccaagcaggttgagtatctggtcaatgaaaagcacatctacctgctgccaagtggtcgaatcaacgtgagtggcttaaccaccaaaaatctagattacgtggccacctccatccatgaagcagtcaccaaaatccagtgaagaaacaccacccgtccagtaccaccaaagtagttctctgtcatgtgtgttccctgcctgcacaaacctacatgtacataccatggattagagacacttgcaggactgaaagctgctctggtgaggcagcctctgtttaaaccggccccacatgaagagaacatcccttgagacgaatttggagactgggattagagcctttggaggtcaaagcaaattaagatttttatttaagaataaaagagtactttgatcatgagacataggtatcttgtccctctcactaaaaaggagtgttgtgtgtggcggccacgtgcttctatgtggtgtttgactctgtacaaattctagtcccaaagatcaagttgtctgaaggagccaaagtgtgaatgtgggtgtcggctgcggcattaaattcatcatctcaacccagagtgtctggtctccctgctctttctgcatggttgtgtccctagtcctaagctttggttctttagggtgactgtggtaagaaggatatttaatcatgacatgcacggacacgtacatatttaactgaaacaagttttaccaaacagtatttactcgtgatgtgcgtagtgcattctgatatttttgagccattctattgtgttctacttcacctaaaaaaataaaataaaaatgttgatcaag

SEQ ID NO: 3067 - protein, 413 aa, Homo sapiens
MAPPSVFAEVPQAQPVLVFKLTADFREDPDPRKVNLGVGAYRTDDCHPWVLPVVKKVEQKIANDNSLNHEYLPILGLAEFRSCASRLALGDDSPALKEKRVGGVQSLGGTGALRIGADFLARWYNGTNNKNTPVYVSSPTWENHNAVFSAAGFKDIRSYRYWDAEKRGLDLQGFLNDLENAPEFSIVVLHACAHNPTGIDPTPEQWKQIASVMKHRFLFPFFDSAYQGFASGNLERDAWAIRYFVSEGFEFFCAQSFSKNFGLYNERVGNLTVVGKEPESILQVLSQMEKIVRITWSNPPAQGARIVASTLSNPELFEEWTGNVKTMADRILTMRSELRARLEALKTPGTWNHITDQIGMFSFTGLNPKQVEYLVNEKHIYLLPSGRINVSGLTTKNLDYVATSIHEAVTKIQ

SEQ ID NO: 3068 - DNA, 3665 bp, Homo sapiens
ggctggggggccgcgggcgggaggcggataaaaaggccccagggcgcccggggagggagcccgttagcgctgctccgccgcggcgcccgcccagccccggactgtccgcgctccatctggtatcttggcctcagctgtccttgaagtcaccatggcgaggtccccaccagccaccctctttctgttcctgctgctgctaggccagccccctcccagcaggccacagtcactgggcaccactaagctccggctggtgggcccagagagcaagccagaggagggccgcctggaggtgctgcaccagggccagtggggcaccgtgtgtgatgacaactttgctatccaggaggccacagtggcttgccgccagctgggcttcgaagctgccttgacctgggcccacagtgccaagtacggccaaggggagggacccatctggctggacaatgtgcagtgtgtgggcacagagagctccttggaccagtgcgggtctaatggctggggagtcagtgactgcagtcactcagaagacgtaggggtgatatgccacccccggcgccatcgtggctacctttctgaaactgtctccaatgcccttgggccccagggccggcggctggaggaggtgcggctcaagcccatccttgccagtgccaagcagcatagcccagtgaccgagggagccgtggaggtgaagtatgagggccactggcggcaggtgtgtgaccagggctggaccatgaacaacagcagggtggtgtgcgggatgctgggcttccccagcgaggtgcctgtcgacagccactactacaggaaagtctgggatctgaagatgagggaccctaagtctaggctgaagagcctgacgaataagaactccttctggatccaccaggtcacctgcctggggacagagccccacatggccaactgccaggtgcaggtggctccagcccggggcaagctgcggccagcctgcccaggtggcatgcatgctgtggtcagctgtgtggcagggcctcacttccgcccaccgaagacaaagccacaacgcaaagggtcctgggcagaggagccgagggtgcgcctgcgctccggggcccaggtgggcgagggccgggtggaagtgctcatgaaccgccagtggggcacggtctgtgaccacaggtggaacctcatctctgccagtgtcgtgtgtcgtcagctgggctttggctctgctcgggaggccctctttggggcccggctgggccaagggctagggcccatccacctgagtgaggtgcgctgcaggggatatgagcggaccctcagcgactgccctgccctggaagggtcccagaatggttgccaacatgagaatgctgctgctgtcaggtgcaatgtccctaacatgggctttcagaatcaggtgcgcttggctggtgggcgtatccctgaggaggggctattggaggtgcaggtggaggtgaacggggtcccacgctgggggagcgtgtgcagtgaaaactgggggctcaccgaagccatggtggcctgccgacagctcggcctgggttttgccatccatgcctacaaggaaacctggttctggtcggggacgccaagggcccaggaggtggtgatgagtggggtgcgctgctcaggcacagagctggccctgcagcagtgccagaggcacgggccggtgcactgctcccacggtggcgggcgcttcctggctggagtctcctgcatggacagtgcaccagacctggtgatgaacgcccagctagtgcaggagacggcctacttggaggaccgcccgctcagccagctgtattgtgcccacgaggagaactgcctctccaagtctgcggatcacatggactggccctacggataccgccgcctattgcgcttctccacacagatctacaatctgggccggactgactttcgtccaaagactggacgcgatagctgggtttggcaccagtgccacaggcattaccacagcattgaggtcttcacccactacgacctcctcactctcaatggctccaaggtggctgaggggcacaaggccagcttctgtctggaggacacaaactgccccacaggactgcagcggcgctacgcatgtgccaactttggagaacagggagtgactgtaggctgctgggacacctaccggcatgacattgattgccagtgggtggatatcacagatgtgggccccgggaattatatcttccaggtgattgtgaacccccactatgaagtggcagagtcagatttctccaacaatatgctgcagtgccgctgcaagtatgatgggcaccgggtctggctgcacaactgccacacagggaattcatacccagccaatgcagaactctccctggagcaggaacagcgtctcaggaacaacctcatctgaagctgtcactgcacactcctagctgctgccgatacaccagatacctcagcttattggagccatgcccttcacagagtcccaactcagaggaaaagggccagtgccaaggggcaccaagaacctgctcaggaagccttttgatggcaagatcaccaatccagatggtattgctccctcaggatggctctgggcctgcccctaagggcctgtggcctatggaatatgtcctccaggctttgctcagctgagctcctcttctgtaaggaaacccagtcatccctgaatcttgccacagagatccgggattcaggagctctcagtttcttagggatggactatggcccagtcccccatctaagtggtgctttgcaaatgtcttggaggagtataggacagaggaccaaaatacacagcaggtagtgttagctctctgctaggagctcaaagcaacacaacttgtatcaaaatcacaactggcagagaagctggtggatccaatcctttcttcatctgttgttatttagaactcacctctcacactctgttctttagtgtccttacctttatcttaccacacacatgggtgtttctattatccttggaagcacagacctcgggcatccccttattgcctgatgggccaacaccaacagttacggagtgcttgagaaggggcaagtttcacagaaatggccagatagggccttcctacagagcagcaagagtaggccaagcagaaagactgctgaggtaacacggaccccagcccctgtcagggcctctgccaaggaaataatatggaccatttacctggcaggcagtctgctctctctcaggatcaccacgcatctcaggattggtctaaacttcaagtctcaaccaagtgtctgaagtgaactttgcattgaataaatttttgccatggaaagaacatcaaacaagccactcatctctacagagataagaaaacaagtttggcagagcaagagacagaagaccgtggagaaatcagaagggggaacagtcagtttagttaaggatggaacctgggaaaggccaccattcctgcttgatggggctctgatttgctcttgctcaagtggaataaaaccccatggtcttcttgacatgattcttgatcttttctccactgagacacacttaagtgatgatccttacaggactgacaccctaatgccaataaaagttgctcattatggactgctacaaaaaaaaaaaaaaa

SEQ ID NO: 3069 - protein, 756 aa, Homo sapiens
MARSPPATLFLFLLLLGQPPPSRPQSLGTTKLRLVGPESKPEEGRLEVLHQGQWGTVCDDNFAIQEATVACRQLGFEAALTWAHSAKYGQGEGPIWLDNVQCVGTESSLDQCGSNGWGVSDCSHSEDVGVICHPRRHRGYLSETVSNALGPQGRRLEEVRLKPILASAKQHSPVTEGAVEVKYEGHWRQVCDQGWTMNNSRVVCGMLGFPSEVPVDSHYYRKVWDLKMRDPKSRLKSLTNKNSFWIHQVTCLGTEPHMANCQVQVAPARGKLRPACPGGMHAVVSCVAGPHFRPPKTKPQRKGSWAEEPRVRLRSGAQVGEGRVEVLMNRQWGTVCDHRWNLISASVVCRQLGFGSAREALFGARLGQGLGPIHLSEVRCRGYERTLSDCPALEGSQNGCQHENAAAVRCNVPNMGFQNQVRLAGGRIPEEGLLEVQVEVNGVPRWGSVCSENWGLTEAMVACRQLGLGFAIHAYKETWFWSGTPRAQEVVMSGVRCSGTELALQQCQRHGPVHCSHGGGRFLAGVSCMDSAPDLVMNAQLVQETAYLEDRPLSQLYCAHEENCLSKSADHMDWPYGYRRLLRFSTQIYNLGRTDFRPKTGRDSWVWHQCHRHYHSIEVFTHYDLLTLNGSKVAEGHKASFCLEDTNCPTGLQRRYACANFGEQGVTVGCWDTYRHDIDCQWVDITDVGPGNYIFQVIVNPHYEVAESDFSNNMLQCRCKYDGHRVWLHNCHTGNSYPANAELSLEQEQRLRNNLI

SEQ ID NO: 3070 - DNA, 3243 bp, Homo sapiens
gaaaggaggagaggaagagaggactaagaggggagcaaggcgaggaggccgcggcgggcgcagcgggcacctgggccgtgctgcccccgcgagcaaggcgccgccattccgctgctcggggcgccgccgccgccgccaccgcgcccaggggccatgctcccgccgcccccgcgccagccgccgccccaggcgcgtgcggcccgcggcgcggtgcgcctgcagcggcccttcctgcgcagcccgctgggcgtgttgcggctgctgcagctgctggccggcgctgccttctggatcactatcgccaccagcaagtaccagggccccgtgcacttcgcgctcttcgtgtccgtgctcttctggctgctcaccctgggcctctacttcctcacgctgctgggcaagcacgagctggtccccgtgctgggctcgcgctggctcatggtcaacgtggcgcacgatgtgctggcggccgcgctctacggcgccgccaccggcatcatgagcgaccagatgcagcgccacagctactgcaacctcaaggattacccgctcccctgcgcctaccacgccttcctggcggccgccgtctgcggcggcgtctgccacggcctctacctgctttcggcgctctatggctgcgggcgtcgctgccagggcaagcaggaggtggcgtgaggccgcccgcgcccgccgcggccccgatcggggcgggggaatccccggagaccagcctccttaatcccttcccccgccgccgccccgcgcgggtgcgccctggcaccctctccctgccctccagcgtttccactgtcgcccgcgcccgggaaccctgacgctcagctcccgcccgacggcagcgccgccgccgcccagaatcccagcccagaatcccgaccgccgcgccggacgcgccgtctcccgggacaagcgcaggctgcgatccgaggggctgacacacactcgcagacgagccgccccgaggcgaaacctcgcggttcctcttcccttccctgctgagactaagacgtggacaggggccgcgcagatccgggggaggctcccaaattggaaccaggcttctggctgcccccttccctcccgccccgtggtcggaagagcactcccttccctggcccctcatccagcctccggtgctgtaaaacgcaggcgctgggccgcgggcggagctgaggacaggccttggctggtcccaggatgagcgacgagtttggttttagctggggattgtgctggcatcctgcgaagctcctcccagccggtctctctgtgctcggttgtcttggggtggggcccatccgccgaggtggggaccgataggagaagccggtgggttgtacccttacacttgtggagtctcctcttgcctctacctactccgcctttgtccttaaggtttttgcaggccagtgccaaacacacactaactgtcctggcctctccgtgacacaagtctcttcccagccttcctcacaggcttctgccgcccccctcatctccaccctcccccatatctgtttgcattaggagttccacgaccatggtggaatgttaaggtgaaccccaccccttcttacagatggggacccagagcctgctcttgggaacagccagagtaagattggaacccagacttgcagtccagcgctgtttgcattaaaagggtgggtgagtcaggacccctggctcaggagccgcctctcctaaaagagggtttcaaggccaaatgggtttgtcaacggtgctgtctccctttcttggagatgctcattagcttatcaaagactgagaagtcccgctgttacagaaataatttagtttgctgtattaactgctcctgggcctggagcagtattcccaccttaagattcccagcatccctgtgctgtcccggctctcattcatgccgaagggcccaacccattggctgtgttctgtttgaagatttggggggcgccttctctttcttccccagggaattctctagcagagggaggggacccaccccagtgaggaagtagattgctgcctctagccagagacctgaactggggaatttgaacattcctttacattgttggagaaatgaagccaaagttattcagatggttttcccaggctaaaggaaagtcacctgcaagagatcccggcactgatctggagcagctgacagggtgggtctcccttaccaaagagaagaaccactctctggcgctggggtgacctgctggctgggcctgtaaggtttccatgttgctgaggccatggagattcccagagctggtcacaccgaccgctctcagggcccgctgccctgggctggcaacaccattctggccttggcctgcagaagctttcagagtcttcactggcagtagggggagatggggagaggaatgatctctgcccagccccttcctttccaaaccatgcaatggaagagcccagatgggtgaagattgattttgccttaactcaagagaattcctgttctccttgtgctatgatttggacacaagattctggatacctggaacttagctgtgtactcctgtaccctaaacagtggatttgagttccagcgtttattcttttttccttttttcagatcaccatctaagttacatctttagctcaggtccatccttctcaagatctccttcttagccccccagcccctggtgctgtctgtggtcaggtgaccttactcaggagcagatatctccttggccgccatggagcctcatccatccacacgtgcctgtagcattccagagctcactgcccttctagatgtgccttcccgcttggcttccagcggcttgtgctcactctgtctgccaggtatgagaagaacacgtaagaccgccaccacactcaccctccctcaaggccctgtgccataggggtggccacccgacctgcccccagaacttttggatactggaggcagttgcataggtctccctctctgggcaccaggactcagtccagcccaagactactctgggcagctcccatcccagtctggggccatttgcagactcaggaaaggatttctacagtgttctataaaagccaaaagagagagtgggtttgggaagagtgagggtggttggggagaggggaccgatgtgcctcattgtttagtggtgattacaaatatgcttttctggataaagtttggttgtttgctcttaaaaaaaaaaaaaaaaaaaaactcga

SEQ ID NO: 3071 - protein, 173 aa, Homo sapiens
MLPPPPRQPPPQARAARGAVRLQRPFLRSPLGVLRLLQLLAGAAFWITIATSKYQGPVHFALFVSVLFWLLTLGLYFLTLLGKHELVPVLGSRWLMVNVAHDVLAAALYGAATGIMSDQMQRHSYCNLKDYPLPCAYHAFLAAAVCGGVCHGLYLLSALYGCGRRCQGKQEVA

SEQ ID NO: 3072 - DNA, 535 bp, Homo sapiens
gatggagcccgaccatcctttctacagcaacatcagtaaggatcgcaggtatgcagacctcacagaagatcagctaccctcctgtgagagtctgaaggatactattgccagagctctgcccttctggaatgaagaaatagttccccagatcaaggaggggaaacgtgtactgattgcagcccatggcaacagcctccggggcattgtcaagcatctggagggtctctctgaagaggctatcatggagctgaacctgccgactggtattcccattgtctatgaattggacaagaacaagtgaaggccggcggggaggatactgtcccgagtgcttcctggtgtgtgtattagaatcccttcctgccttgtttcatggcagtgaaatgcctcttggtcctgtccaagtgtatctttcactgatttctgaatcatgttctagttgcttgaccctgccacatgggtccagtgttcatctgagcataactgtactaaatcctttttccatatcagtataataaaggagtgatgtgcaata

SEQ ID NO: 3073 - DNA, 1794 bp, Homo sapiens; identical to SEQ ID NO: 3028

SEQ ID NO: 3074 - DNA, 12674 bp, Homo sapiens
gggcgggaggactcgactcggtgggagccgctagagccgggcgcccggggacgtagcctgtagggccaccgggtccccgtcagaggcggcggcgggagcagcggggactgcaggccggggtgcagcgaacgcgaccccgcgggctgcggcccggtgtgtgcggagcgtggcgggcgcagcttaccgggcggaggtgagcgcggcgccggctcctcctgcggcggactttgggtgcgacttgacgagcggtggttcgacaagtggccttgcgggccggatcgtcccagtggaagagttgtaaatttgcttctggccttcccctacggattatacctggccttcccctacggattatactcaacttactgtttagaaaatgtggcccacgagacgcctggttactatcaaaaggagcggggtcgacggtccccactttcccctgagcctcagcacctgcttgtttggaaggggtattgaatgtgacatccgtatccagcttcctgttgtgtcaaaacaacattgcaaaattgaaatccatgagcaggaggcaatattacataatttcagttccacaaatccaacacaagtaaatgggtctgttattgatgagcctgtacggctaaaacatggagatgtaataactattattgatcgttccttcaggtatgaaaatgaaagtcttcagaatggaaggaagtcaactgaatttccaagaaaaatacgtgaacaggagccagcacgtcgtgtctcaagatctagcttctcttctgaccctgatgagaaagctcaagattccaaggcctattcaaaaatcactgaaggaaaagtttcaggaaatcctcaggtacatatcaagaatgtcaaagaagacagtaccgcagatgactcaaaagacagtgttgctcagggaacaactaatgttcattcctcagaacatgctggacgtaatggcagaaatgcagctgatcccatttctggggattttaaagaaatttccagcgttaaattagtgagccgttatggagaattgaagtctgttcccactacacaatgtcttgacaatagcaaaaaaaatgaatctcccttttggaagctttatgagtcagtgaagaaagagttggatgtaaaatcacaaaaagaaaatgtcctacagtattgtagaaaatctggattacaaactgattacgcaacagagaaagaaagtgctgatggtttacagggggagacccaactgttggtctcgcgtaagtcaagaccaaaatctggtgggagcggccacgctgtggcagagcctgcttcacctgaacaagagcttgaccagaacaaggggaagggaagagacgtggagtctgttcagactcccagcaaggctgtgggcgccagctttcctctctatgagccggctaaaatgaagacccctgtacaatattcacagcaacaaaattctccacaaaaacataagaacaaagacctgtatactactggtagaagagaatctgtgaatctgggtaaaagtgaaggcttcaaggctggtgataaaactcttactcccaggaagctttcaactagaaatcgaacaccagctaaagttgaagatgcagctgactctgccactaagccagaaaatctctcttccaaaaccagaggaagtattcctacagatgtggaagttctgcctacggaaactgaaattcacaatgagccatttttaactctgtggctcactcaagttgagaggaagatccaaaaggattccctcagcaagcctgagaaattgggcactacagctggacagatgtgctctgggttacctggtcttagttcagttgatatcaacaactttggtgattccattaatgagagtgagggaatacctttgaaaagaaggcgtgtgtcctttggtgggcacctaagacctgaactatttgatgaaaacttgcctcctaatacgcctctcaaaaggggagaagccccaaccaaaagaaagtctctggtaatgcacactccacctgtcctgaagaaaatcatcaaggaacagcctcaaccatcaggaaaacaagagtcaggttcagaaatccatgtggaagtgaaggcacaaagcttggttataagccctccagctcctagtcctaggaaaactccagttgccagtgatcaacgccgtaggtcctgcaaaacagcccctgcttccagcagcaaatctcagacagaggttcctaagagaggagggagaaagagtggcaacctgccttcaaagagagtgtctatcagccgaagtcaacatgatattttacagatgatatgttccaaaagaagaagtggtgcttcggaagcaaatctgattgttgcaaaatcatgggcagatgtagtaaaacttggtgcaaaacaaacacaaactaaagtcataaaacatggtcctcaaaggtcaatgaacaaaaggcaaagaagacctgctactccaaagaagcctgtgggcgaagttcacagtcaatttagtacaggccacgcaaactctccttgtaccataataatagggaaagctcatactgaaaaagtacatgtgcctgctcgaccctacagagtgctcaacaacttcatttccaaccaaaaaatggactttaaggaagatctttcaggaatagctgaaatgttcaagaccccagtgaaggagcaaccgcagttgacaagcacatgtcacatcgctatttcaaattcagagaatttgcttggaaaacagtttcaaggaactgattcaggagaagaacctctgctccccacctcagagagttttggaggaaatgtgttcttcagtgcacagaatgcagcaaaacagccatctgataaatgctctgcaagccctcccttaagacggcagtgtattagagaaaatggaaacgtagcaaaaacgcccaggaacacctacaaaatgacttctctggagacaaaaacttcagatactgagacagagccttcaaaaacagtatccactgcaaacaggtcaggaaggtctacagagttcaggaatatacagaagctacctgtggaaagtaagagtgaagaaacaaatacagaaattgttgagtgcatcctaaaaagaggtcagaaggcaacactactacaacaaaggagagaaggagagatgaaggaaatagaaagaccttttgagacatataaggaaaatattgaattaaaagaaaacgatgaaaagatgaaagcaatgaagagatcaagaacttgggggcagaaatgtgcaccaatgtctgacctgacagacctcaagagcttgcctgatacagaactcatgaaagacacggcacgtggccagaatctcctccaaacccaagatcatgccaaggcaccaaagagtgagaaaggcaaaatcactaaaatgccctgccagtcattacaaccagaaccaataaacaccccaacacacacaaaacaacagttgaaggcatccctggggaaagtaggtgtgaaagaagagctcctagcagtcggcaagttcacacggacgtcaggggagaccacgcacacgcacagagagccagcaggagatggcaagagcatcagaacgtttaaggagtctccaaagcagatcctggacccagcagcccgtgtaactggaatgaagaagtggccaagaacgcctaaggaagaggcccagtcactagaagacctggctggcttcaaagagctcttccagacaccaggtccctctgaggaatcaatgactgatgagaaaactaccaaaatagcctgcaaatctccaccaccagaatcagtggacactccaacaagcacaaagcaatggcctaagagaagtctcaggaaagcagatgtagaggaagaattcttagcactcaggaaactaacaccatcagcagggaaagccatgcttacgcccaaaccagcaggaggtgatgagaaagacattaaagcatttatgggaactccagtgcagaaactggacctggcaggaactttacctggcagcaaaagacagctacagactcctaaggaaaaggcccaggctctagaagacctggctggctttaaagagctcttccagactcctggtcacaccgaggaattagtggctgctggtaaaaccactaaaataccctgcgactctccacagtcagacccagtggacaccccaacaagcacaaagcaacgacccaagagaagtatcaggaaagcagatgtagagggagaactcttagcgtgcaggaatctaatgccatcagcaggcaaagccatgcacacgcctaaaccatcagtaggtgaagagaaagacatcatcatatttgtgggaactccagtgcagaaactggacctgacagagaacttaaccggcagcaagagacggccacaaactcctaaggaagaggcccaggctctggaagacctgactggctttaaagagctcttccagacccctggtcatactgaagaagcagtggctgctggcaaaactactaaaatgccctgcgaatcttctccaccagaatcagcagacaccccaacaagcacaagaaggcagcccaagacacctttggagaaaagggacgtacagaaggagctctcagccctgaagaagctcacacagacatcaggggaaaccacacacacagataaagtaccaggaggtgaggataaaagcatcaacgcgtttagggaaactgcaaaacagaaactggacccagcagcaagtgtaactggtagcaagaggcacccaaaaactaaggaaaaggcccaacccctagaagacctggctggcttgaaagagctcttccagacaccagtatgcactgacaagcccacgactcacgagaaaactaccaaaatagcctgcagatcacaaccagacccagtggacacaccaacaagctccaagccacagtccaagagaagtctcaggaaagtggacgtagaagaagaattcttcgcactcaggaaacgaacaccatcagcaggcaaagccatgcacacacccaaaccagcagtaagtggtgagaaaaacatctacgcatttatgggaactccagtgcagaaactggacctgacagagaacttaactggcagcaagagacggctacaaactcctaaggaaaaggcccaggctctagaagacctggctggctttaaagagctcttccagacacgaggtcacactgaggaatcaatgactaacgataaaactgccaaagtagcctgcaaatcttcacaaccagacccagacaaaaacccagcaagctccaagcgacggctcaagacatccctggggaaagtgggcgtgaaagaagagctcctagcagttggcaagctcacacagacatcaggagagactacacacacacacacagagccaacaggagatggtaagagcatgaaagcatttatggagtctccaaagcagatcttagactcagcagcaagtctaactggcagcaagaggcagctgagaactcctaagggaaagtctgaagtccctgaagacctggccggcttcatcgagctcttccagacaccaagtcacactaaggaatcaatgactaacgaaaaaactaccaaagtatcctacagagcttcacagccagacctagtggacaccccaacaagctccaagccacagcccaagagaagtctcaggaaagcagacactgaagaagaatttttagcatttaggaaacaaacgccatcagcaggcaaagccatgcacacacccaaaccagcagtaggtgaagagaaagacatcaacacgtttttgggaactccagtgcagaaactggaccagccaggaaatttacctggcagcaatagacggctacaaactcgtaaggaaaaggcccaggctctagaagaactgactggcttcagagagcttttccagacaccatgcactgataaccccacgactgatgagaaaactaccaaaaaaatactctgcaaatctccgcaatcagacccagcggacaccccaacaaacacaaagcaacggcccaagagaagcctcaagaaagcagacgtagaggaagaatttttagcattcaggaaactaacaccatcagcaggcaaagccatgcacacgcctaaagcagcagtaggtgaagagaaagacatcaacacatttgtggggactccagtggagaaactggacctgctaggaaatttacctggcagcaagagacggccacaaactcctaaagaaaaggccaaggctctagaagatctggctggcttcaaagagctcttccagacaccaggtcacactgaggaatcaatgaccgatgacaaaatcacagaagtatcctgcaaatctccacaaccagacccagtcaaaaccccaacaagctccaagcaacgactcaagatatccttggggaaagtaggtgtgaaagaagaggtcctaccagtcggcaagctcacacagacgtcagggaagaccacacagacacacagagagacagcaggagatggaaagagcatcaaagcgtttaaggaatctgcaaagcagatgctggacccagcaaactatggaactgggatggagaggtggccaagaacacctaaggaagaggcccaatcactagaagacctggccggcttcaaagagctcttccagacaccagaccacactgaggaatcaacaactgatgacaaaactaccaaaatagcctgcaaatctccaccaccagaatcaatggacactccaacaagcacaaggaggcggcccaaaacacctttggggaaaagggatatagtggaagagctctcagccctgaagcagctcacacagaccacacacacagacaaagtaccaggagatgaggataaaggcatcaacgtgttcagggaaactgcaaaacagaaactggacccagcagcaagtgtaactggtagcaagaggcagccaagaactcctaagggaaaagcccaacccctagaagacttggctggcttgaaagagctcttccagacaccaatatgcactgacaagcccacgactcatgagaaaactaccaaaatagcctgcagatctccacaaccagacccagtgggtaccccaacaatcttcaagccacagtccaagagaagtctcaggaaagcagacgtagaggaagaatccttagcactcaggaaacgaacaccatcagtagggaaagctatggacacacccaaaccagcaggaggtgatgagaaagacatgaaagcatttatgggaactccagtgcagaaattggacctgccaggaaatttacctggcagcaaaagatggccacaaactcctaaggaaaaggcccaggctctagaagacctggctggcttcaaagagctcttccagacaccaggcactgacaagcccacgactgatgagaaaactaccaaaatagcctgcaaatctccacaaccagacccagtggacaccccagcaagcacaaagcaacggcccaagagaaacctcaggaaagcagacgtagaggaagaatttttagcactcaggaaacgaacaccatcagcaggcaaagccatggacacaccaaaaccagcagtaagtgatgagaaaaatatcaacacatttgtggaaactccagtgcagaaactggacctgctaggaaatttacctggcagcaagagacagccacagactcctaaggaaaaggctgaggctctagaggacctggttggcttcaaagaactcttccagacaccaggtcacactgaggaatcaatgactgatgacaaaatcacagaagtatcctgtaaatctccacagccagagtcattcaaaacctcaagaagctccaagcaaaggctcaagatacccctggtgaaagtggacatgaaagaagagcccctagcagtcagcaagctcacacggacatcaggggagactacgcaaacacacacagagccaacaggagatagtaagagcatcaaagcgtttaaggagtctccaaagcagatcctggacccagcagcaagtgtaactggtagcaggaggcagctgagaactcgtaaggaaaaggcccgtgctctagaagacctggttgacttcaaagagctcttctcagcaccaggtcacactgaagagtcaatgactattgacaaaaacacaaaaattccctgcaaatctcccccaccagaactaacagacactgccacgagcacaaagagatgccccaagacacgtcccaggaaagaagtaaaagaggagctctcagcagttgagaggctcacgcaaacatcagggcaaagcacacacacacacaaagaaccagcaagcggtgatgagggcatcaaagtattgaagcaacgtgcaaagaagaaaccaaacccagtagaagaggaacccagcaggagaaggccaagagcacctaaggaaaaggcccaacccctggaagacctggccggcttcacagagctctctgaaacatcaggtcacactcaggaatcactgactgctggcaaagccactaaaataccctgcgaatctcccccactagaagtggtagacaccacagcaagcacaaagaggcatctcaggacacgtgtgcagaaggtacaagtaaaagaagagccttcagcagtcaagttcacacaaacatcaggggaaaccacggatgcagacaaagaaccagcaggtgaagataaaggcatcaaagcattgaaggaatctgcaaaacagacaccggctccagcagcaagtgtaactggcagcaggagacggccaagagcacccagggaaagtgcccaagccatagaagacctagctggcttcaaagacccagcagcaggtcacactgaagaatcaatgactgatgacaaaaccactaaaataccctgcaaatcatcaccagaactagaagacaccgcaacaagctcaaagagacggcccaggacacgtgcccagaaagtagaagtgaaggaggagctgttagcagttggcaagctcacacaaacctcaggggagaccacgcacaccgacaaagagccggtaggtgagggcaaaggcacgaaagcatttaagcaacctgcaaagcggaagctggacgcagaagatgtaattggcagcaggagacagccaagagcacctaaggaaaaggcccaacccctggaagatctggccagcttccaagagctctctcaaacaccaggccacactgaggaactggcaaatggtgctgctgatagctttacaagcgctccaaagcaaacacctgacagtggaaaacctctaaaaatatccagaagagttcttcgggcccctaaagtagaacccgtgggagacgtggtaagcaccagagaccctgtaaaatcacaaagcaaaagcaacacttccctgcccccactgcccttcaagaggggaggtggcaaagatggaagcgtcacgggaaccaagaggctgcgctgcatgccagcaccagaggaaattgtggaggagctgccagccagcaagaagcagagggttgctcccagggcaagaggcaaatcatccgaacccgtggtcatcatgaagagaagtttgaggacttctgcaaaaagaattgaacctgcggaagagctgaacagcaacgacatgaaaaccaacaaagaggaacacaaattacaagactcggtccctgaaaataagggaatatccctgcgctccagacgccaaaataagactgaggcagaacagcaaataactgaggtctttgtattagcagaaagaatagaaataaacagaaatgaaaagaagcccatgaagacctccccagagatggacattcagaatccagatgatggagcccggaaacccatacctagagacaaagtcactgagaacaaaaggtgcttgaggtctgctagacagaatgagagctcccagcctaaggtggcagaggagagcggagggcagaagagtgcgaaggttctcatgcagaatcagaaagggaaaggagaagcaggaaattcagactccatgtgcctgagatcaagaaagacaaaaagccagcctgcagcaagcactttggagagcaaatctgtgcagagagtaacgcggagtgtcaagaggtgtgcagaaaatccaaagaaggctgaggacaatgtgtgtgtcaagaaaataagaaccagaagtcatagggacagtgaagatatttgacagaaaaatcgaactgggaaaaatataataaagttagttttgtgataagttctagtgcagtttttgtcataaattacaagtgaattctgtaagtaaggctgtcagtctgcttaagggaagaaaactttggatttgctgggtctgaatcggcttcataaactccactgggagcactgctgggctcctggactgagaatagttgaacaccgggggctttgtgaaggagtctgggccaaggtttgccctcagctttgcagaatgaagccttgaggtctgtcaccacccacagccaccctacagcagccttaactgtgacacttgccacactgtgtcgtcgtttgtttgcctatgtcctccagggcacggtggcaggaacaactatcctcgtctgtcccaacactgagcaggcactcggtaaacacgaatgaatggatgagcgcacggatgaatggagcttacaagatctgtctttccaatggccgggggcatttggtccccaaattaaggctattggacatctgcacaggacagtcctatttttgatgtcctttcctttctgaaaataaagttttgtgctttggagaatgactcgtgagcacatctttagggaccaagagtgactttctgtaaggagtgactcgtggcttgccttggtctcttgggaatacttttctaactagggttgctctcacctgagacattctccacccgcggaatctcagggtcccaggctgtgggccatcacgacctcaaactggctcctaatctccagctttcctgtcattgaaagcttcggaagtttactggctctgctcccgcctgttttctttctgactctatctggcagcccgatgccacccagtacaggaagtgacaccagtactctgtaaagcatcatcatccttggagagactgagcactcagcaccttcagccacgatttcaggatcgcttccttgtgagccgctgcctccgaaatctcctttgaagcccagacatctttctccagcttcagacttgtagatataactcgttcatcttcatttactttccactttgccccctgtcctctctgtgttccccaaatcagagaatagcccgccatcccccaggtcacctgtctggattcctccccattcacccaccttgccaggtgcaggtgaggatggtgcaccagacagggtagctgtcccccaaaatgtgccctgtgcgggcagtgccctgtctccacgtttgtttccccagtgtctggcggggagccaggtgacatcataaatacttgctgaatgaatgcagaaatcagcggtactgacttgtactatattggctgccatgatagggttctcacagcgtcatccatgatcgtaagggagaatgacattctgcttgagggagggaatagaaaggggcagggaggggacatctgagggcttcacagggctgcaaagggtacagggattgcaccagggcagaacaggggagggtgttcaaggaagagtggctcttagcagaggcactttggaaggtgtgaggcataaatgcttccttctacgtaggccaacctcaaaactttcagtaggaatgttgctatgatcaagttgttctaacactttagacttagtagtaattatgaacctcacatagaaaaatttcatccagccatatgcctgtggagtggaatattctgtttagtagaaaaatcctttagagttcagctctaaccagaaatcttgctgaagtatgtcagcaccttttctcaccctggtaagtacagtatttcaagagcacgctaagggtggttttcattttacagggctgttgatgatgggttaaaaatgttcatttaagggctacccccgtgtttaatagatgaacaccacttctacacaaccctccttggtactgggggagggagagatctgacaaatactgcccattcccctaggctgactggatttgagaacaaatacccacccatttccaccatggtatggtaacttctctgagcttcagtttccaagtgaatttccatgtaataggacattcccattaaatacaagctgtttttactttttcgcctcccagggcctgtgggatctggtcccccagcctctcttgggctttcttacactaactctgtacctaccatctcctgcctcccttaggcaggcacctccaaccaccacacactccctgctgttttccctgcctggaactttccctcctgccccaccaagatcatttcatccagtcctgagctcagcttaagggaggcttcttgcctgtgggttccctcacccccatgcctgtcctccaggctggggcaggttcttagtttgcctggaattgttctgtacctctttgtagcacgtagtgttgtggaaactaagccactaattgagtttctggctcccctcctggggttgtaagttttgttcattcatgagggccgactgcatttcctggttactctatcccagtgaccagccacaggagatgtccaataaagtatgtgatgaaatggtctt

SEQ ID NO: 3075 - DNA, 3352 bp, Homo sapiens
cgcggacggggcgcgggcggacgatggaactccacatctggagcaccggctgcaagttgccagcgtcgccaaggagagtatcccgctgttcacctacggcctgatcaaacttgccttcctgtcctccaagaccagaagatgatgattattctccaccgtctaagagaccaaaggccaatgagctaccgcagccaccagtcccggaacccgccaatgctgggaagcggaaagtgagggagttcaacttcgagaaatggaatgctcgcatcactgatctacgtaaacaagttgaagaattgtttgaaaggaaatatgctcaagccataaaagccaaaggtccggtgacgatcccgtaccctcttttctagtctcatgttgaagatctttatgtagaaggacttcctgaaggaattccttttagaaggccatctacttacggaattcctcgcctggagaggatattacttgcaaaggaaaggattcgttttgtgattaagaaacatgagcttctgagttcaacacgtgaagatttacagcttgataagccagcttcaggagtaaaggaagaatggtatgccagaatcactaaattaagaaagatggtggatcagcttttctgcaaaaaatttgcggaagccttggggagcactgaagccaaggctgtaccgtaccaaaaatttgaggcacacccgaatgatctgtacgtggaaggactgccagaaaacattcctttccgaagtccctcatggtatggaatcccaaggctggaaaaaatcattcaagtgggcaatcgaattaaatttgttattaaaagaccagaacttctgactcacagtaccactgaagttactcagccaagaacgaatacaccagtcaaagaagattggaatgtcagaattaccaagctacggaagcaagtggaagagatttttaatttgaaatttgctcaagctcttggactcaccgaggcagtaaaagtaccatatcctgtgtttgaatcaaacccggagttcttgtatgtggaaggcttgccagaggggattcccttccgaagccctacctggtttggaattccacgacttgaaaggatcgtccacgggagtaataaaatcaagttcgttgttaaaaaacctgaactagttatttcctacttgcctcctgggatggctagtaaaataaacactaaagctttgcagtcccccaaaagaccacgaagtcctgggagtaattcaaaggttcctgaaattgaggtcaccgtggaaggccctaataacaacaatcctcaaacctcagctgttcgaaccccgacccagactaacggttctaacgttcccttcaagccacgagggagagagttttcctttgaggcctggaatgccaaaatcacggacctaaaacagaaagttgaaaatctcttcaatgagaaatgtggggaagctcttggccttaaacaagctgtgaaggtgccgttcgcgttatttgagtctttcccggaagacttttatgtggaaggcttacctgagggtgtgccattccgaagaccatcgacttttggcattccgaggctggagaagatactcagaaacaaagccaaaattaagttcatcattaaaaagcccgaaatgtttgagacggcgattaaggagagcacctcctctaagagccctcccagaaaaataaattcatcacccaatgttaatactactgcatcaggtgttgaagaccttaacatcattcaggtgacaattccagatgatgataatgaaagactctcgaaagttgaaaaagctagacagctaagagaacaagtgaatgacctctttagtcggaaatttggtgaagctattggtatgggttttcctgtgaaagttccctacaggaaaatcacaattaaccctggctgtgtggtggttgatggcatgcccccgggggtgtccttcaaagcccccagctacctggaaatcagctccatgagaaggatcttagactctgccgagtttatcaaattcacggtcattagaccatttccaggacttgtgattaataaccagctggttgatcagagtgagtcaaaaggccccgtgatacaagaatcagctgaaccaagccagttggaagttccagccacagaagaaataaaagagactgatggaagctctcagatcaagcaagaaccagaccccacgtggtagacctcttccctcctaggcttaaagtatcagtggttgagaagagcttttcggacctgttactaccccaagctgtgtaatatacttgtataacagaaataccttctatacaaacctttttttctacttttagatagaaatgtctactttttcagcagttctgtgaattaaagagcagagtgactgtgggtctggaatggctggtgtacttgggaatgtactatcaggattttacagcaatgctgggaaatgacagggaaaatgacaggaatgaatctcaccagattttttatgtactcagcagagccttgagttacggtgtttattttccaatcaagtgaagatatctcctacttctcctactggaacatctcagcttctgcagtgaagaaaaattcctgtgatagttcagttctttagtttttctatttgaaaaaaaaaaatcatttaaatgatcctttgttcacggctctccttaatgactgagtgaacagttcctatctgtatatttgactaaaccttttcctaagctatctctcatggttcctatgtttttttatcataattaaaagcaaaaccatctggatcacctaacagtcagaggtcagtatctcagcgtgtgaattatagaggaaatacagagagaacctcttccacttttacttttcgtccaaataaaatgcatggtgtaccagaagttgaagatcgggttgaggattggggctagctcgatgacactaaggccccaacatcgcgggacctgctgtggcgcggattcttaggaacgctgttctagccggccccctctccaggggtcgccgtggccggcattatttcctagttcttcttgtaaccctgaggtgccagcgcggggagtgaggaggggtcagggggctaaggatgcaacctctgacgttctgcgccttcctaggagagtcttacatgtgttgagatttcacaagcaatgcgagttgtaaaataccagctctacaagaagctaggctctgtgacggcatagttttcagtagctttatcacaatattcacaatggagaattatatgacatggtagcagaaataggcccttttatgtgttgcttctattttacctcaaattgtagatatagggtaatcaataaaatccatccatgcctttcacacact

SEQ ID NO: 3076 - DNA, 2013 bp, Homo sapiens
aattcctgtcctcaggcgctgtcagatctgtggtttttctacttgaaggacacaatgttttccaaactagcacatttgcagaggtttgctgtacttagtcgcggagttcattcttcagtggcttctgctacatctgttgcaactaaaaaaacagtccaaggccctccaacctctgatgacatttttgaaagggaatataagtatggtgcacacaactaccatcctttacctgtagccctggagagaggaaaaggtatttacttatgggatgtagaaggcagaaaatattttgacttcctgagttcttacagtgctgtcaaccaagggcattgtcaccccaagattgtgaatgctctgaagagtcaagtggacaaattgaccttaacatctagagctttctataataacgtacttggtgaatatgaggagtatattactaaacttttcaactaccacaaagttcttcctatgaatacaggagtggaggctggagagactgcctgtaaactagctcgtaagtggggctataccgtgaagggcattcagaaatacaaagcaaagattgtttttgcagctgggaacttctggggtaggacgttgtctgctatctccagttccacagacccaaccagttacgatggttttggaccatttatgccgggattcgacatcattccctataatgatctgcccgcactggagcgtgctcttcaggatccaaatgtggctgcgttcatggtagaaccaattcagggtgaagcaggcgttgttgttccggatccaggttacctaatgggagtgcgagagctctgcaccaggcaccaggttctctttattgctgatgaaatacagacaggattggccagaactggtagatggctggctgttgattatgaaaatgtcagacctgatatagtcctccttggaaaggccctttctgggggcttataccctgtgtctgcagtgctgtgtgatgatgacatcatgctgaccattaagccaggggagcatgggtccacatacggtggcaatccactaggctgccgagtggccatcgcagcccttgaggttttagaagaagaaaaccttgctgaaaatgcagacaaattgggcattatcttgagaaatgaactcatgaagctaccttctgatgttgtaactgccgtaagaggaaaaggattattaaacgctattgtcattaaagaaaccaaagattgggatgcttggaaggtgtgtctacgacttcgagataatggacttctggccaagccaacccatggcgacattatcaggtttgcgcctccgctggtgatcaaggaggatgagcttcgagagtccattgaaattattaacaagaccatcttgtctttctgagggtagccagctgttttcagtggtccctgggagccagctggagacaggtggtcctgtaaaagctttattcctaatgtgggcacattccactcccatgagtcttcaaaaactttttttttgaatatatttttttcagttgatacataatagaacaacgtttatgaacctgccgtttgctttgtaacgtaactaaataatgtaatggcatctatattcagttgaagtgttttgatgtgcatgtgtacttcctaaggtgaaatgcatctatatacagacagcctctaaatcaagtccttcagtataattgatatatgtttttataatttcctcactggtataagtgtttcatatttgaaaaagttatctctgggtattgcataaaaggcttcatcttataaagtgaaatcattgttattgaattttaggaaggattaatggttaagtgtatataaaatactaatattaagtaaacttcatattggccaacaccagggttgtattctatggatgtcattattttgaattaagaattagtgtttaacattcctaaattgttttgagtgcttgattataatttgtaaaaaatgtttattttcaatacttctttaaatttaaaataaagcttatatttcaaatgtc

SEQ ID NO: 3077 - protein, 439 aa, Homo sapiens
MFSKLAHLQRFAVLSRGVHSSVASATSVATKKTVQGPPTSDDIFEREYKYGAHNYHPLPVALERGKGIYLWDVEGRKYFDFLSSYSAVNQGHCHPKIVNALKSQVDKLTLTSRAFYNNVLGEYEEYITKLFNYHKVLPMNTGVEAGETACKLARKWGYTVKGIQKYKAKIVFAAGNFWGRTLSAISSSTDPTSYDGFGPFMPGFDIIPYNDLPALERALQDPNVAAFMVEPIQGEAGVVVPDPGYLMGVRELCTRHQVLFIADEIQTGLARTGRWLAVDYENVRPDIVLLGKALSGGLYPVSAVLCDDDIMLTIKPGEHGSTYGGNPLGCRVAIAALEVLEEENLAENADKLGIILRNELMKLPSDVVTAVRGKGLLNAIVIKETKDWDAWKVCLRLRDNGLLAKPTHGDIIRFAPPLVIKEDELRESIEIINKTILSF

SEQ ID NO: 3078 - DNA, 2425 bp, Homo sapiens
gccgccgccgccacaccggcccttcgggagcgtctgaggaggcgcgggccgctgcgggctcgggcgccgcagcgcgccggcccgagcccctggacgaggcccacggagccgctcgccccgacccagccgcccgatgtcctcaaaatggaggcagcgggggcggcggcgtgaagaaagcggcgctgtgggcgcgggagtaggggcccgggcggaggcggtggcgggatggggctgctgctcatgatcctggcgtcggccgtgctgggttccttcctcacgctcctcgcccagttcttcctgctgtaccgcagacagcccgagccgccggcggacgaggccgcccgcgcgggcgagggcttccgctacatcaagccagtgccgggcctgctcctaagggagtacctttatggcggcggccgggatgaggagccctccggagcggcccctgagggcggcgcgacccccaccgcggcccccgagacccccgccccgccgacgcgggagacttgctacttcctcaacgccaccatcctattcctgttccgggagttgcgggacaccgcgctgacccgccgctgggtcaccaagaagatcaaggtggagttcgaggagctgctgcagaccaagacggccgggcgcctgctggaggggctgagcctgcgggacgtgttcctgggcgagacggtgcccttcatcaagaccatccggctcgtgcggccagtcgtgccctcggccaccggggagcccgatggccctgaaggggaggcgctgcccgccgcctgccccgaggagctggccttcgaggcggaggtggagtacaacgggggcttccacctggccatcgacgtggacctggtcttcggcaagtccgcctacttgtttgtcaagctgtcccgcgtggtgggaaggctgcgcttggtctttacgcgcgtgcccttcacccactggttcttctccttcgtggaagacccgctgatcgacttcgaggtgcgctcccagtttgaagggcggcccatgccccagctcacctccatcatcgtcaaccagctcaagaagatcatcaagcgcaagcacaccctaccgaattacaagatcaggttgaattaataaaaggaaatttacaaagtgttggacttacacttcgtcttgtccagtcaactgatgggtatgctgggcacgtcatcattgaaactgtggctccaaactcgcctgctgcaattgcagatcttcagcggggagatcgacttatcgccattggaggtgtgaaaatcacatcaacactgcaagtgttgaagcttatcaagcaggctggtgaccgagtcctggtgtactatgaaaggcctgttggccagagtaatcaaggtgcagtgctgcaagataactttggccagttggaagaaaactttttgtcaagctcatgccaatcgggttatgaagaggaagctgccgggttgacagtagatactgaaagtagagagctggattctgaatttgaagacttggcaagtgatgtcagagcacaaaatgagttcaaagatgaggcacaatcattaagtcatagtcccaaacgtgttccaacaacactttctattaaaccccttggagctatatcaccagttttaaaccgtaaattagctgtaggaagtcacccactaccaccgaaaattcagtccaaagatggaaataaacctccacccctaaaaacttctgagataacagacccagcacaagtgtcaaaaccaacccaaggatctgctttcaaaccacctgtgccaccacgaccacaagcgaaagttcctttgccttccgccgatgctccaaatcaggcagaaccagatgttctcgttgaaaagccagagaaggtggtgccacctcctcttgtagataaatctgctgaaaagcaagcaaaaaatgtggatgccatagacgatgcagctgcacctaagcaatttttagcaaagcaagaagtggccaaagatgtcacttcagaaacttcctgccctactaaggacagttcggacgaccgtcaaacatgggaatcatcagaaattctttatcgtaataagctaggaaaatggacaagaaccagagcatcctgtttgtttgacatagaagcctgtcacaggtacttaaacattgcattgtggtgcagggatcctttcaagttgggaggtctcatctgtttggggcatgttagtttaaaacttgaagatgtggctttaggatgcctagctacatcaaacacggaatacctttccaaattgagactggaagccccctcacctaaggctatagtcactagaaccgcactacgcaatctgagtatgcaaaagggattcaatgacaaattttgctatggtgacattactattcacttcaaatatttgaaagaaggagaatcagaccaccatgtagttactaacgt

SEQ ID NO: 3079 - protein, 293 aa, Homo sapiens
MGLLLMILASAVLGSFLTLLAQFFLLYRRQPEPPADEAARAGEGFRYIKPVPGLLLREYLYGGGRDEEPSGAAPEGGATPTAAPETPAPPTRETCYFLNATILFLFRELRDTALTRRWVTKKIKVEFEELLQTKTAGRLLEGLSLRDVFLGETVPFIKTIRLVRPVVPSATGEPDGPEGEALPAACPEELAFEAEVEYNGGFHLAIDVDLVFGKSAYLFVKLSRVVGRLRLVFTRVPFTHWFFSFVEDPLIDFEVRSQFEGRPMPQLTSIIVNQLKKIIKRKHTLPNYKIRLN

SEQ ID NO: 3080 - DNA, 477 bp, Homo sapiens
aatcaagaggttccaatctttgtgttcactttaagaacaccatgaaactgctcaggccatcaagggtatacatatatgaaaagccaagaagtatctgaaagatgtcactttacagaaacagtgtgtaccattcctacgttacaatggtggagttagcaggtgtacgcaggccaagcagtggggctggacacaaggtcggtggcccaaaaagagtgctgaattctctggtcattgagcacatccaagtgaacaaaacacctaagatgcgccgccggacccacagagctcatggtcggattaacccatacatgagctctccctgccacattgagatgatccttacggaaaaggaacagattgttcctaaatcagaagaggaggttgcccagaagaaaaagatatcccagaagaaactgaagaaacaaaaacttatggcacaggagtaaattcagcattaaaataaatgtaattaaaagg

SEQ ID NO: 3081 - protein, 114 aa, Homo sapiens
MSLYRNSVYHSYVTMVELAGVRRPSSGAGHKVGGPKRVLNSLVIEHIQVNKTPKMRRRTHRAHGRINPYMSSPCHIEMILTEKEQIVPKSEEEVAQKKKISQKKLKKQKLMAQE

SEQ ID NO: 3082 - DNA, 5254 bp, Homo sapiens
ggcgactgctggcgaggcgcgtgggaccttacgctggttccccttcgtctcctctcccggcccgggccactagagagttcgctgacgccgggtgagctgagcctgccgccaagatgccggcctattttcagaggccggaaaatgccctcaaacgcgccaacgaatttcttgaggttggcaaaaagcagcctgctctggatgttctttatgatgttatgaaaagtaaaaaacatagaacatggcaaaagatacacgaaccaattatgttgaaatacttggaactttgcgtggatcttcgcaagagccacttggcaaaggaggggttataccagtataagaacatttgtcaacaggtgaacataaaatctctggaggatgttgttagggcatatttgaaaatggcagaggaaaaaactgaagctgctaaagaagaatctcagcagatggtcttagatatagaggatctagataatattcaaactcctgagagtgttctcctaagtgctgtaagtggtgaagacactcaggatcgtactgacagattacttttaactccatgggttaaattcctgtgggagtcttacaggcagtgtttggaccttcttagaaacaattctagagtagagcgcctgtaccatgatattgcccagcaagctttcaaattctgcctccaatacacgcgtaaggctgaattccgtaaactgtgtgacaatttgagaatgcacttatcgcagattcagcgccaccataaccaaagtacggcaatcaatcttaataatccagagagccagtccatgcatttggaaaccagacttgttcagctggacagtgctatcagcatggaattgtggcaggaagcattcaaagctgtggaagatattcacgggctattctccttgtctaaaaaaccacctaaacctcagttgatggcaaattactataacaaagtctcaactgtgttttggaaatctggaaatgctctttttcatgcatctacactccatcgtctttaccatctctctagagaaatgagaaagaatctcacacaagatgagatgcaaagaatgtctactagagtccttttagccactctttccatccctattactcctgagcgtacggatattgctcgacttctggatatggatggcattatagttgaaaaacagcgtcgccttgcaacactactaggtcttcaagccccaccgacacgaattggccttattaatgatatggtcagatttaatgtactacaatatgttgtcccagaagtgaaagacctttacaattggcttgaagtagaatttaacccattaaaactctgtgagcgagtcacaaaggttctaaattgggttagggaacaacctgaaaaggaaccggaattgcagcagtatgtgccacaactgcaaaacaacaccatcctccgccttctgcagcaggtgtcacagatttatcagagcattgagttttctcgtttgacttctttggttccttttgttgatgctttccaactggaacgggccatagtagatgcagccaggcattgcgacttgcaggttcgtattgatcacacttctcggaccctgagttttggatctgatttgaattatgctactcgagaagatgctccgattggtcctcatttgcaaagcatgccttcagagcagataagaaaccagctgacagccatgtcctcagtacttgcaaaagcacttgaagtcattaaaccagctcatatactgcaagagaaagaagaacagcatcagttggctgtcactgcataccttaaaaattcacgaaaagagcaccagcggatcctggctcgccgccagacaattgaggagagaaaagagcgccttgagagtctgaatattcagcgtgagaaagaagaattggaacagagggaagctgaactccagaaagtgcggaaggctgaggaagagaggctgcgccaggaagcaaaggagagagagaaggagcgtatcttacaggaacatgaacaaatcaaaaagaaaactgtccgagagcgtttggagcagatcaagaaaacagaactgggtgccaaagcattcaaagatattgatattgaagaccttgaggaattggatccagattttatcatggctaaacaggttgaacaactggagaaagaaaagaaagaacttcaagaacgcctaaagaatcaagaaaagaagattgactattttgaaagagccaaacgtttggaagaaattcctttgataaagagcgcttacgaggaacagagaattaaagacatggatctgtgggagcaacaagaggaagaaagaattactacaatgcagctagaacgtgaaaaggctcttgaacataagaatcgaatgtcacgaatgcttgaagacagagatttattcgtaatgcgactcaaagctgcacggcagtctgtttatgaggaaaaacttaaacagtttgaagagcgattagcagaagaaaggcataatcgattggaagaacggaaaaggcagcgtaaagaagaacgcaggataacatactatagagaaaaagaagaggaggagcagagaagggcagaagaacaaatgctaaaagagcgggaagagagagagcgcgccgaacgagcaaaacgcgaggaagagctacgagagtatcaggagcgggtgaagaaattagaagaagtggaaaggaaaaaacgccaaagggagttggaaattgaagaacgagaacggcgtagagaggaagagagaagacttggcgatagttccctttctagaaaggactctcgttggggagatagagattcagaaggcacctggagaaaaggacctgaagcagattctgagtggagaagaggcccgccagagaaggagtggagacgtggagaagggcgagatgaggacaggtctcatagaagagatgaagagcggccccggcgtctgggggatgatgaagatagagagccctctcttagaccagacgatgatcgggttccccggcgtggcatggatgatgacagaggccctagacgtggtcctgaggaagataggttctctcgtcgtggggcagacgatgaccggccttcctggcgtaacacagatgatgacaggcctcccagacgaattgccgatgaagacaggggaaactggcgtcatgcggatgatgacagaccacctagacgaggactggatgaggacagaggaagctggcgaacagctgatgaggacagaggaccaagacgtgggatggatgatgaccgggggccgaggcgaggaggcgctgatgatgagcgatcatcctggcgtaatgctgatgatgaccggggtcccaggcgagggttggatgatgatcggggtcccaggcgaggcatggatgatgaccggggtcccaggcgaggcatggatgatgaccggggtcccaggcgaggcatggatgatgaccggggtcccaggcgagggttggatgatgatcgaggaccttggaggaacgccgatgatgacagaattcccaggcgtggtgcagaggatgacaggggcccttggagaaacatggatgatgatcgcctttcaagacgtgctgatgatgatcggtttcccagacggggtgatgactcaagacctggtccttggagaccattagtcaagccaggtggatggagagagaaagaaaaagccagagaggagagctggggtccacctcgagaatcaaggccatcagaagaacgtgaatgggacagagaaaaagaaagggacagagataatcaagatcgggaggagaatgacaaggaccctgagagagaaagggacagagagagagatgtggatcgagaggatcgcttcagaagacctagggatgaaggtggctggagaagaggaccagctgaggaatcttcaagctggagagactcaagtcgccgggacgatagggatagggatgaccgtcgccgtgagagggatgaccggcgtgatctaagagaaagacgagatctaagagacgacagggaccgaagaggacctccactcagatcagaacgtgaagaagtaagttcttggagacgtgctgatgacaggaaagatgaccgggtggaagagcgggaccctcctcgtcgagttcctcccccagctctttcaagagaccgagaaagagaccgagaccgagaaagagaaggtgaaaaagagaaggcctcatggagagctgagaaagatagggaatctctccgtcgtactaaaaatgagactgatgaagatggatggaccacagtacgacgttaagtctcaagataatggatttaaactggtgtcttaaataggtttgatcacattcaaggattattatacttgtgcttcaaccaatctaaattggattctttaatgttgtttcaccataacacaaaaagcatgaacttgtattaatcctatataatagattgatcatgcaccatatccacaggaggttggaaaaaccatgccattttctggaatttaagggtgttgcattatttcatcaatcatttgttgacaaaaaagaaaaactaaaaaataaatttaaaatgtgacccttcaggtattgagtaacacctttatcttggtatagaactgatactttttttttgattttgaaatatctgataataatttggaatgaagtaaggttctgttaaaatatatttgaagaccctttaaagcagtgaatctgaaacaattttcacacccttaagtggttgatacgtacctattttaggtattttgaggtatttaccataaactaaatttagaaattttttagattcacttgaagtaaacattacaaacattggatacggtggggttttctttagattttacttgagagaaggtgagtacaaagcaatttgcagttgttgtaatgacaagattactgcgcaagtgtgaatccaaacagtatagcttttaaattttaaagcatttggtaaattatcgctgagtttttttctgttgccaatagcaaactgcttttccattaatggagaattcatgcctttcaagcattttaaatatgacaatatttataaatgtatggtttggaggaatcgtttaaattctctttcctaattttctttcttttgaagatagattctttcaacaagtaatttgtagtaatgactgtgttgacttcaattttggagcgcagtagctatgttaaagatgaactatttggtctcattgaagccaacacagaacttgctgctgtgttttttcttcagtgataaataaaatacttacag

SEQ ID NO: 3083 - protein, 1382 aa, Homo sapiens
MPAYFQRPENALKRANEFLEVGKKQPALDVLYDVMKSKKHRTWQKIHEPIMLKYLELCVDLRKSHLAKEGLYQYKNICQQVNIKSLEDVVRAYLKMAEEKTEAAKEESQQMVLDIEDLDNIQTPESVLLSAVSGEDTQDRTDRLLLTPWVKFLWESYRQCLDLLRNNSRVERLYHDIAQQAFKFCLQYTRKAEFRKLCDNLRMHLSQIQRHHNQSTAINLNNPESQSMHLETRLVQLDSAISMELWQEAFKAVEDIHGLFSLSKKPPKPQLMANYYNKVSTVFWKSGNALFHASTLHRLYHLSREMRKNLTQDEMQRMSTRVLLATLSIPITPERTDIARLLDMDGIIVEKQRRLATLLGLQAPPTRIGLINDMVRFNVLQYVVPEVKDLYNWLEVEFNPLKLCERVTKVLNWVREQPEKEPELQQYVPQLQNNTILRLLQQVSQIYQSIEFSRLTSLVPFVDAFQLERAIVDAARHCDLQVRIDHTSRTLSFGSDLNYATREDAPIGPHLQSMPSEQIRNQLTAMSSVLAKALEVIKPAHILQEKEEQHQLAVTAYLKNSRKEHQRILARRQTIEERKERLESLNIQREKEELEQREAELQKVRKAEEERLRQEAKEREKERILQEHEQIKKKTVRERLEQIKKTELGAKAFKDIDIEDLEELDPDFIMAKQVEQLEKEKKELQERLKNQEKKIDYFERAKRLEEIPLIKSAYEEQRIKDMDLWEQQEEERITTMQLEREKALEHKNRMSRMLEDRDLFVMRLKAARQSVYEEKLKQFEERLAEERHNRLEERKRQRKEERRITYYREKEEEEQRRAEEQMLKEREERERAERAKREEELREYQERVKKLEEVERKKRQRELEIEERERRREEERRLGDSSLSRKDSRWGDRDSEGTWRKGPEADSEWRRGPPEKEWRRGEGRDEDRSHRRDEERPRRLGDDEDREPSLRPDDDRVPRRGMDDDRGPRRGPEEDRFSRRGADDDRPSWRNTDDDRPPRRIADEDRGNWRHADDDRPPRRGLDEDRGSWRTADEDRGPRRGMDDDRGPRRGGADDERSSWRNADDDRGPRRGLDDDRGPRRGMDDDRGPRRGMDDDRGPRRGMDDDRGPRRGLDDDRGPWRNADDDRIPRRGAEDDRGPWRNMDDDRLSRRADDDRFPRRGDDSRPGPWRPLVKPGGWREKEKAREESWGPPRESRPSEEREWDREKERDRDNQDREENDKDPERERDRERDVDREDRFRRPRDEGGWRRGPAEESSSWRDSSRRDDRDRDDRRRERDDRRDLRERRDLRDDRDRRGPPLRSEREEVSSWRRADDRKDDRVEERDPPRRVPPPALSRDRERDRDREREGEKEKASWRAEKDRESLRRTKNETDEDGWTTVRR

SEQ ID NO: 3084 - DNA, 1309 bp, Homo sapiens
ctccacgcgcggcctggcggcggcggccactctaaccagcgcaaaatgtccctggaacaggaggaggaaacgcaacctgggcggctcctaggacgcagagacgccgtccccgccttcattgagcccaacgtgcgcttctggatcaccgagcgccaatcctttattcgacgatttcttcaatggacagaattattagatcctacaaatgtgttcatttcagttgaaagtatagaaaactcgaggcaactattgtgcacaaatgaagatgtttccagccctgcctcggcggaccaaaggatacaagaagcttggaagcggagtcttgcaacagtgcatcccgacagcagcaacctgatccccaagctttttcgacctgcagcgttcctgcctttcatggcacccacggtatttttgtcaatgacgccactgaaagggatcaagtccgtgattttacctcaggttttcctctgtgcctacatggcagcgttcaacagcatcaatggaaacagaagttacacttgtaagccactagaaagatcattactaatggcgggagccgttgcttcttcaactttcttaggagtaatccctcagtttgtccagatgaagtatggcctgactggcccttggattaaaagactcttacctgtgatcttcctcgtgcaagccagtggaatgaatgtctacatgtcccgaagtcttgaatccattaaggggattgcggtcatggacaaggaaggcaatgtcctgggtcattccagaattgctgggacaaaggctgttagagaaacgctagcatccagaatagtgctgtttgggacctcagctctgattcctgaagtcttcacctacttttttaaaaggacccagtatttcaggaaaaacccagggtcattgtggattttgaaactgtcttgtactgtcctggcaatgggactgatggtgccattttcttttagtatatttccacagattggacagatacagtactgtagtcttgaagagaaaattcagtctccaacagaagaaacagaaatcttttatcacagaggggtgtaggcgtgagttttaggtgaatttatgtggttcctgcttgaaaaccttcccctctccaggttcggtttagagaactttgccacaggtcttctggggtttttaaggctggctggagaagacagtgggagggtgccccgtctgacacccctggggttgctgagggaacggttggagtggggatcggcctgcgaaaggatactgtgaaatcactaattaactaataaacctgtctcaagttgaggatttgaagaaa

SEQ ID NO: 3085 - protein, 337 aa, Homo sapiens
MSLEQEEETQPGRLLGRRDAVPAFIEPNVRFWITERQSFIRRFLQWTELLDPTNVFISVESIENSRQLLCTNEDVSSPASADQRIQEAWKRSLATVHPDSSNLIPKLFRPAAFLPFMAPTVFLSMTPLKGIKSVILPQVFLCAYMAAFNSINGNRSYTCKPLERSLLMAGAVASSTFLGVIPQFVQMKYGLTGPWIKRLLPVIFLVQASGMNVYMSRSLESIKGIAVMDKEGNVLGHSRIAGTKAVRETLASRIVLFGTSALIPEVFTYFFKRTQYFRKNPGSLWILKLSCTVLAMGLMVPFSFSIFPQIGQIQYCSLEEKIQSPTEETEIFYHRGV

SEQ ID NO: 3086 - DNA, 1534 bp, Homo sapiens
ctgaagatggcggctgctgtaggacggttgctccgagcgtcggttgcccgacatgtgagtgccattccttggggcatttctgccactgcagccctcaggcctgctgcatgtggaagaacgagcttgacaaatttattgtgttctggttccagtcaagcaaaattattcagcaccagttcctcatgccatgcacctgctgtcacccagcatgcaccctattttaagggtacagccgttgtcaatggagagttcaaagacctaagccttgatgactttaaggggaaatatttggtgcttttcttctatcctttggatttcacctttgtgtgtcctacagaaattgttgcttttagtgacaaagctaacgaatttcacgacgtgaactgtgaagttgtcgcagtctcagtggattcccactttagccatcttgcctggataaatacaccaagaaagaatggtggtttgggccacatgaacatcgcactcttgtcagacttaactaagcagatttcccgagactacggtgtgctgttagaaggttctggtcttgcactaagaggtctcttcataattgaccccaatggagtcatcaagcatttgagcgtcaacgatctcccagtgggccgaagcgtggaagaaaccctccgcttggtgaaggcgttccagtatgtagaaacacatggagaagtctgcccagcgaactggacaccggattctcctacgatcaagccaagtccagctgcttccaaagagtactttcagaaggtaaatcagtagatcacccatgtgtatctgcaccttctcaactgagagaagaaccacagttgaaacctgcttttatcattttcaagatggttatttgtagaaggcaaggaaccaattatgcttgtattcataagtattactctaaatgttttgtttttgtaattctggctaagaccttttaaacatggttagttgctagtacaaggaatcctttattggtaacatcttggtggctggctagctagtttctacagaacataatttgcctctatagaaggctattcttagatcatgtctcaatggaaacactcttctttcttagccttacttgaatcttgcctataataaagtagagcaacacacattgaaagcttctgatcaacggtcctgaaattttcatcttgaatgtctttgtattaaactgaattttcttttaagctaacaaagatcataattttcaatgattagccgtgtaactcctgcaatgaatgtttatgtgattgaagcaaatgtgaatcgtattattttaaaaagtggcagagtgacttaactgatcatgcatgatccctcatccctgaaattgagtttatgtagtcattttacttattttattcattagctaactttgtctatgtatatttctagatattgattagtgtaatcgattataaaggatatttatcaaatccagggattgcattttgaaattataattattttctttgctgaagtattcattgtaaaacatacaaaataaacatattttaaa

SEQ ID NO: 3087 - protein, 256 aa, Homo sapiens
MAAAVGRLLRASVARHVSAIPWGISATAALRPAACGRTSLTNLLCSGSSQAKLFSTSSSCHAPAVTQHAPYFKGTAVVNGEFKDLSLDDFKGKYLVLFFYPLDFTFVCPTEIVAFSDKANEFHDVNCEVVAVSVDSHFSHLAWINTPRKNGGLGHMNIALLSDLTKQISRDYGVLLEGSGLALRGLFIIDPNGVIKHLSVNDLPVGRSVEETLRLVKAFQYVETHGEVCPANWTPDSPTIKPSPAASKEYFQKVNQ

SEQ ID NO: 3088 - DNA, 2556 bp, Homo sapiens
cagagggaggaagaagcggcggcggcggcggcggcggcggcggctcctctttgcagagggggaaactcttgggctgagagcaggaataatgcggtaggcaaggcgggctgctggctcccccggctccggcagcagcggcggcagcccgagcagcggcagcagcagcggcagcaccccaggcgctgacagccccgccggccggctccgttgctgaccgccgactgtcaatggagctggaaaacatcgtggccaacacggtcttgctgaaagccagggaagggggcggaggaaagcgcaaagggaaaagcaagaagtggaaagaaatcctgaagttccctcacattagccagtgtgaagacctccgaaggaccatagacagagattactgcagtttatgtgacaagcagccaatcgggaggctgcttttccggcagttttgtgaaaccaggcctgggctggagtgttacattcagttcctggactccgtggcagaatatgaagttactccagatgaaaaactgggagagaaagggaaggaaattatgaccaagtacctcaccccaaagtcccctgttttcatagcccaagttggccaagacctggtctcccagacggaggagaagctcctacagaagccgtgcaaagaactcttttctgcctgtgcacagtctgtccacgagtacctgaggggagaaccattccacgaatatctggacagcatgttttttgaccgctttctccagtggaagtggttggaaaggcaaccggtgaccaaaaacactttcaggcagtatcgagtgctaggaaaagggggcttcggggaggtctgtgcctgccaggttcgggccacgggtaaaatgtatgcctgcaagcgcttggagaagaagaggatcaaaaagaggaaaggggagtccatggccctcaatgagaagcagatcctcgagaaggtcaacagtcagtttgtggtcaacctggcctatgcctacgagaccaaggatgcactgtgcttggtcctgaccatcatgaatgggggtgacctgaagttccacatctacaacatgggcaaccctggcttcgaggaggagcgggccttgttttatgcggcagagatcctctgcggcttagaagacctccaccgtgagaacaccgtctaccgagatctgaaacctgaaaacatcctgttagatgattatggccacattaggatctcagacctgggcttggctgtgaagatccccgagggagacctgatccgcggccgggtgggcactgttggctacatggctccagaggtcctgaacaaccagaggtacggcctgagccccgactactggggccttggctgcctcatctatgagatgatcgagggccagtcgccgttccgcggccgcaaggagaaggtgaagcgggaggaggtggaccgccgggtcctggagacggaggaggtgtactcccacaagttctccgaggaggccaagtccatctgcaagatgctgctcacgaaagatgcgaagcagaggctgggctgccaggaggagggggctgcagaggtcaagagacaccccttcttcaggaacatgaacttcaagcgcttagaagccgggatgttggaccctcccttcgttccagacccccgcgctgtgtactgtaaggacgtgctggacatcgagcagttctccactgtgaagggcgtcaatctggaccacacagacgacgacttctactccaagttctccacgggctctgtgtccatcccatggcaaaacgagatgatagaaacagaatgctttaaggagctgaacgtgtttggacctaatggtaccctcccgccagatctgaacagaaaccaccctccggaaccgcccaagaaagggctgctccagagactcttcaagcggcagcatcagaacaattccaagagttcgcccagctccaagaccagttttaaccaccacataaactcaaaccatgtcagctcgaactccaccggaagcagctagtttcggctctggcctccaagtccacagtggaaccagcccagacccttctccttagaagtggaagtagtggagcccctgctctggtggggctgccaggggagaccccgggagccggggaaggaggccgtccatcccgtcgacgtagaacctcgaggtttctcaaagaaatttccactcaggtctgttttccgaggcggccccggccggggtggattggatttgtctttggtgaacattgcaatagaaatccaattggatacgacaacttgcacgtattttaatagcgtcataactagaactgaattttgtctttatgatttttaaagaaaagttttgtaaatttctctactgtctcagtttacattttgtatatttgtatttaaatgaaagtgagactttgagggtgtatattttctgtgcagccactgttaagccatgtgttccaaggcattttagcggggagggggttatcaaaaaaaaaaaaatgtgactcaagacttccagagcctcaaatgagaaaatgtctttattaaatgtagaaagtgatccatacttc

SEQ ID NO: 3089 - DNA, 3088 bp, Homo sapiens
gcgtgatcggtttccggtcagtggtgtggtaccgggtacccggagacgtgtatcggacggtgggccgcagccatggccgagagaaaacctaacggtggcagcggcggcgcctccacttcctcatcgggcactaacttacttttctcctcctcggccacggagttcagcttcaatgtgcccttcatcccagtcacccaggcctccgcttctccggcctccctgctcttaccgggagaggattccacagatgttggtgaggaggacagcttccttggtcagacttctattcacacatctgccccacagacatttagttacttctctcaggtatcaagcagcagtgatccttttgggaatattggacagtcaccattaacaactgcagcaacctcagttggacaatcaggattccccaagcccctgactgctctcccttttacaactggatcccaagatgtctcgaatgcattttcaccatccatttcgaaggctcaacctggtgctccaccttcctcactgatgggaataaattcttatctgccttctcagccaagtagtctccctccttcatattttgggaaccaaccccaaggaattccccaaccaggatacaatccatatcgccatacccctggcagcagcagggctaatccttacattgcaccaccccagctgcagcagtgccaaacaccaggccctcctgctcatcctccaccttctggaccccctgttcagatgtaccagatgcctccaggatctttgccaccggttccttcttcagtgcagtcaccggcacagcagcaggtacctgccagacctggggctccctctgttcaagtgccatctccttttctacttcaaaaccaatatgagcctgttcagccccactggttttactgcaaggaggtagaatacaaacaactgtggatgccttttagtgtgttcgactctttgaatcttgaagaaatctataattcagttcagccagatccggagagcgtggttcttggcacggatggagggcgctacgatgtttacctctatgaccgaataaggaaggctgcctactgggaagaggagccagccgaagtgagacgctgtacttggttttacaagggggacacagatagtcgatttattccctatactgaggagttcagtgaaaaactagaggctgaatataaaaaagctgtaaccactaatcagtggcaccgaagattagagtttccaagtggagagacaattgttatgcacaatccaaaggttattgttcagttccagccctcctcagtgccagatgaatggggcaccacgcaagatggacagacaaggcccagggttgtaaagcgtggaattgatgataaccttgatgaaattcccgacggggagatgcctcaagttgaccatttggtgtttgtggtgcatggcattggacctgtgtgtgacttacgctttaggagcattattgagtgtgtggatgattttagggtggtttctctcaaattgctgcggacacatttcaagaaatctttagatgacgggaaagtaagcagagtggagttccttccagttcattggcatagttctttgggtggggacgccacaggtgtggacaggaatattaagaaaatcactttgccaagtattggtcgatttcgtcactttaccaatgaaactttgctagatattttattttataacagccccacctactgtcagacaattgtggaaaaagtaggaatggagataaaccatctgcatgcactctttatgagtcggaacccagacttcaaaggaggtgtctctgttgctggtcacagtttaggttctttaatattgtttgacatcctgtctaatcaaaaagatttgaatttatcaaagtgccctggacctcttgctgttgctaatggagttgtgaagcagctacattttcaggaaaagcagatgcctgaagagccaaagctgactttggatgagtcgtatgaccttgttgttgaaaataaagaagtcctaactttgcaagaaactctggaagcacttagcctctctgaatattttagcacttttgaaaaggaaaagattgatatggagtccctgcttatgtgtacagttgatgacctgaaggaaatggggataccccttggacccagaaagaagatagctaactttgtagaacataaagcagccaaactgaaaaaagcagcgtcagaaaagaaggcagtggcggccacttctacaaaaggacaagagcaaagtgcccagaagactaaagacatggcttccctcccctcagaatccaatgagccaaagaggaaacttccagttggtgcttgcgtgtcttctgtgtgtgtgaattatgaatcttttgaagttggcgccggacaggtttctgttgcttacaactcattagattttgaaccagagatattctttgccttggggtctccaattgctatgtttctcactattcgaggagttgataggatagatgagaattacagccttcctacctgtaaagggttcttcaatatttatcatccgcttgatccagtggcatatagattagaacctatgattgttccagatttggacctaaaagctgttctcattccacatcacaaaggcagaaaaagacttcatttagaattgaaagagagtctctctcgtatgggatctgatttgaagcagggttttattagctctctcaaaagtgcttggcagacattaaatgagtttgcccgtgctcatacgtcttcaacccagttgcaagaagaattggagaaggtggccaatcagatcaaagaagaagaagaaaagcaagtagttgaagcagaaaaggttgttgaaagtccagatttttccaaggatgaggactacttaggaaaggttggaatgttaaatggaggccgccgaattgactacgttctccaagaaaaaccaatagagagttttaatgaataccttttcgctcttcagagtcacttatgctattgggaatctgaagatactgctctgttactacttaaagaaatttatcgaacaatgaacattagtccagaacagccccagcattgatcaaacttcagtt

SEQ ID NO: 3090 - protein, 1000 aa, Homo sapiens
MAERKPNGGSGGASTSSSGTNLLFSSSATEFSFNVPFIPVTQASASPASLLLPGEDSTDVGEEDSFLGQTSIHTSAPQTFSYFSQVSSSSDPFGNIGQSPLTTAATSVGQSGFPKPLTALPFTTGSQDVSNAFSPSISKAQPGAPPSSLMGINSYLPSQPSSLPPSYFGNQPQGIPQPGYNPYRHTPGSSRANPYIAPPQLQQCQTPGPPAHPPPSGPPVQMYQMPPGSLPPVPSSVQSPAQQQVPARPGAPSVQVPSPFLLQNQYEPVQPHWFYCKEVEYKQLWMPFSVFDSLNLEEIYNSVQPDPESVVLGTDGGRYDVYLYDRIRKAAYWEEEPAEVRRCTWFYKGDTDSRFIPYTEEFSEKLEAEYKKAVTTNQWHRRLEFPSGETIVMHNPKVIVQFQPSSVPDEWGTTQDGQTRPRVVKRGIDDNLDEIPDGEMPQVDHLVFVVHGIGPVCDLRFRSIIECVDDFRVVSLKLLRTHFKKSLDDGKVSRVEFLPVHWHSSLGGDATGVDRNIKKITLPSIGRFRHFTNETLLDILFYNSPTYCQTIVEKVGMEINHLHALFMSRNPDFKGGVSVAGHSLGSLILFDILSNQKDLNLSKCPGPLAVANGVVKQLHFQEKQMPEEPKLTLDESYDLVVENKEVLTLQETLEALSLSEYFSTFEKEKIDMESLLMCTVDDLKEMGIPLGPRKKIANFVEHKAAKLKKAASEKKAVAATSTKGQEQSAQKTKDMASLPSESNEPKRKLPVGACVSSVCVNYESFEVGAGQVSVAYNSLDFEPEIFFALGSPIAMFLTIRGVDRIDENYSLPTCKGFFNIYHPLDPVAYRLEPMIVPDLDLKAVLIPHHKGRKRLHLELKESLSRMGSDLKQGFISSLKSAWQTLNEFARAHTSSTQLQEELEKVANQIKEEEEKQVVEAEKVVESPDFSKDEDYLGKVGMLNGGRRIDYVLQEKPIESFNEYLFALQSHLCYWESEDTALLLLKEIYRTMNISPEQPQH

SEQ ID NO: 3091 - DNA, 568 bp, Homo sapiens
gaaccgccatcttccagtaattcgccaaaatgacgaacacaaagggaaagaggagaggcacccgatatatgttctctaggccttttagaaaacatggagttgttcctttggccacatatatgcgaatctataagaaaggtgatattgtagacatcaagggaatgggtactgttcaaaaaggaatgccccacaagtgttaccatggcaaaactggaagagtctacaatgttacccagcatgctgttggcattgttgtaaacaaacaagttaagggcaagattcttgccaagagaattaatgtgcgtattgagcacattaagcactctaagagccgagatagcttcctgaaacgtgtgaaggaaaatgatcagaaaaagaaagaagccaaagagaaaggtacctgggttcaactaaagcgccagcctgctccacccagagaagcacactttgtgagaaccaatgggaaggagcctgagctgctggaacctattccctatgaattcatggcataataggtgttaaaaaaaaaaataaaggacctctgggctacaaaaaaaaaaaaaaaaaa

SEQ ID NO: 3092 - protein, 160 aa, Homo sapiens [sequence omitted]

SEQ ID NO: 3093 - DNA, 2619 bp, Homo sapiens
gaagcaaggaggcggcggcggccgagcgagtggcgagtagtggaaacgttgcttctgaggggagcccaagatgaccggttctaacgagttcaagctgaaccagccacccgaggatggcatctcctccgtgaagttcagccccaacacctcccagttcctgcttgtctcctcctgggacacgtccgtgcgtctctacgatgtgccggccaactccatgcggctcaagtaccagcacaccggcgccgtcctggactgcgccttctacgatccaacgcatgcctggagtggaggactagatcatcaattgaaaatgcatgatttgaacactgatcaagaaaatcttgttgggacccatgatgcccctatcagatgtgttgaatactgtccagaagtgaatgtgatggtcactggaagttgggatcagacagttaaactgtgggatcccagaactccttgtaatgctgggaccttctctcagcctgaaaaggtatataccctctcagtgtctggagaccggctgattgtgggaacagcaggccgcagagtgttggtgtgggacttacggaacatgggttacgtgcagcagcgcagggagtccagcctgaaataccagactcgctgcatacgagcgtttccaaacaagcagggttatgtattaagctctattgaaggccgagtggcagttgagtatttggacccaagccctgaggtacagaagaagaagtatgccttcaaatgtcacagactaaaagaaaataatattgagcagatttacccagtcaatgccatttcttttcacaatatccacaatacatttgccacaggtggttctgatggctttgtaaatatttgggatccatttaacaaaaagcgactgtgccaattccatcggtaccccacgagcatcgcatcacttgccttcagtaatgatgggactacgcttgcaatagcgtcatcatatatgtatgaaatggatgacacagaacatcctgaagatggtatcttcattcgccaagtgacagatgcagaaacaaaacccaagtcaccatgtacttgacaagatttcatttacttaagtgccatgttgatgataataaaacaattcgtactccccaatggtggatttattactattaaagaaaccagggaaaatattaattttaatattataacaacctgaaaataatggaaaagaggtttttgaatttttttttttaaataaacaccttcttaagtgcatgagatggtttgatggtttgctgcattaaaggtatttgggcaaacaaaattggagggcaagtgactgcagttttgagaatcagttttgaccttgatgattttttgtttccactgtggaaataaatgtttgtaaataagtgtaataaaaatccctttgcattctttctggaccttaaatggtagaggaaaaggctcgtgagccatttgtttcttttgctggttatagttgctaattctaaagctgcttcagactgcttcatgaggaggttaatctacaattaaacaatatttcctcttggccgtccattattttctgaagcagatggttcatcatttcctgggctgttaaacaaagcgaggttaaggttagactcttgggaatcagctagttttcaatcttattagggtgcagaaggaaaactaataagaaaacctcctaatatcattttgtgactgtaaacaattatttattagcaaacaattgatcccagaagggcaaattgtttgagtcagtaatgagctgagaaaagacagagcatatctgtgtatttggaaaaataattgtaacgtaattgcagtgcatttagacaggcatctatttggacctgtttctatctctaaatgaatttttggaaacattaatgaggtttacatatttctctgacatttatatagttcttatgtccatttcagttgaccagccgctggtgattaaagttaaaaagaaaaaaattatagtgagaatgagattcatttcaatgtaatgcactaaagcagaacacgaacttagcttggcctattctaggtagttccaaatagtatttttgttgtcaaactttaaaatttatattaatttgcaaatgtatgtctctgagtaggacttggacctttcctgagatttattttatccgtgatgtattttttttaattcttttgatacagagaagggtctttttttttttaagtatttcagtgaaaacttggtgtaagtctgaacccatcttttgaaatgtattttcttcattgcaggtccacctaatcatcctgtgaaagtggtttctctatggaaagctttgtttgcttcctacaaatacatgcttattccttaagggatgtgttagagttactgtggatttctctgttttctgtcttacaagaaacttgtctatgtaccttaatactttgtttaggatgaggagtctttgtgtccctgtacagtagtctgacgtatttccccttctgtcccctagtaagcccagttgctgtatctgaacagtttgagctctttttgtaatatactctaaacctgttatttctgtgctaataaacgagatgcagaacccttgaaaaaaaaaaaaaaaaaaaaaaaaaaaaaaaaaa

SEQ ID NO: 3094 - protein, 328 aa, Homo sapiens
MTGSNEFKLNQPPEDGISSVKFSPNTSQFLLVSSWDTSVRLYDVPANSMRLKYQHTGAVLDCAFYDPTHAWSGGLDHQLKMHDLNTDQENLVGTHDAPIRCVEYCPEVNVMVTGSWDQTVKLWDPRTPCNAGTFSQPEKVYTLSVSGDRLIVGTAGRRVLVWDLRNMGYVQQRRESSLKYQTRCIRAFPNKQGYVLSSIEGRVAVEYLDPSPEVQKKKYAFKCHRLKENNIEQIYPVNAISFHNIHNTFATGGSDGFVNIWDPFNKKRLCQFHRYPTSIASLAFSNDGTTLAIASSYMYEMDDTEHPEDGIFIRQVTDAETKPKSPCT

SEQ ID NO: 3095 - DNA, 2336 bp, Homo sapiens
attttccacgctgtaccggcggaaattcaagcactggaagagaggttccggggctgggctggcctgactgaaggcggcggaatggagacgcggaccgaggacgggggcctcacccgccgccccacgctggcctcttcttgggatgttgcaggcggggccctgacccacagcctcctcctcacccgggccggtctcggccccggtgacttcgactgggaggagctgctggcaccgcctgctccaggtcaggatctggtgattttgaagagaaaccacaacgacaaagatgaaaacccctgcttcctttacctgaggtgtggccctgatggaggtgaagaaatcgcttctattggcattttaagttcagcaagaaatatggaagtgtacttaggagaggagtactgtggaaccagtaggggcaagaatgtttgtactgtcctggatgacagtgaacatgaaaagatcattttgtataaaaaaaatctaaaattggagtcctccacacatgcttgtaaaataaagttgctctcctttggcgaaaggcagtgtgtgttcatcagtaaagttgtggtacacatgagatcagtttttgcaaattcttcaacaagctctcctgctctaggatcaaggatagaccttgacaaggtccaaaccataatggagtccatggggtcaaagttatctcctggagctcagcagttgatggatatggttaggtgtcagcagcggaattgtattcccattggagagcagcttcagtcggtgttgggcaattctggatacaagcatatgattggactacaatcctcatctaccttaggaaccttaaacaagtcgtcctccacaccttttccttttagaactggattgacatctgggaacgtgactgaaaacttacaaacttacattgataaaagtacacaactgcctggtggagagaattctaccaagcttgatgagtgtaaagttatgcctcaaaaccattcctttcttgaaaatgatcttaaaaatgcaatggcctctttcttaccaaagaaagtaagtgacaactcaaatatacccaactccgagttgctgccttttctccagaatttatgtagtcaagttaatcatctccatgtgggaaataagaccgagtgtcaggaaaacatcaccaagcatggtgaacgcattcttggtgttggaatggaagagcaatctatttgctcctacttggaaaagattctttctaaaaatatggaactgatggaaaagaaacttatggattacattgatcagcgaatacatgaactccaggagcacattgatgataagattgctttgttactggatttgctgcaaaatcctaactccccgcccactgggatacctctaagacattatgactctggagaaagactttcaaatggagaaagataagctctcaacataaacagtgtactgcagatatttattacatatttattacaaagccaaaacccaaaaatatttataaaaagcaagtatttaatgtcctttgagggatcattgtcttacacaaagtgacctcagttttcgtttttactacacttgttattttaaatccagtactgtacactgagttaatatgatacagtcaaattatttttgctcacgatatttttcagtcttacagaaatgtatgtatatttgtgttaagagtttaaaatgcttgaggatttctaatacagttcattagtttgtattgtatatgtgtttaagtataatttttatttatacaaagatcttatagtcttagaagtatgaaaaataatgcttaagagtatttgatttttttctttttctaattatcttggaaaattggatacttaagacttggagcctttacttcagattaccagtttacattttgtattgcttgtgtgagataatgaataagatgtgatatttggcatgtgtaaacttagttcactctggggttgttaatattatttgtttcattacagagtagctgtaggtaggaaagtaaacatcagaactagcctagtccttgttacgattagtactttggatttgatttttcctgtaaaacagatgcagtcatcttgtttgacctcagtaaccccagacagtttaagaaaacctctccttttgagctgatacaggttttttccccagaatccttttctggcatgtttattgtatgaaataatgaggctctccatggaaggatgaacacatatgagtcaagggattgcaattctctctgatagacttagttttcagaccttataactattgtatatgcattgaagggtgatatatttgcatataaaaataaacgcacctgctctggg

SEQ ID NO: 3096 - protein, 445 aa, Homo sapiens
METRTEDGGLTRRPTLASSWDVAGGALTHSLLLTRAGLGPGDFDWEELLAPPAPGQDLVILKRNHNDKDENPCFLYLRCGPDGGEEIASIGILSSARNMEVYLGEEYCGTSRGKNVCTVLDDSEHEKIILYKKNLKLESSTHACKIKLLSFGERQCVFISKVVVHMRSVFANSSTSSPALGSRIDLDKVQTIMESMGSKLSPGAQQLMDMVRCQQRNCIPIGEQLQSVLGNSGYKHMIGLQSSSTLGTLNKSSSTPFPFRTGLTSGNVTENLQTYIDKSTQLPGGENSTKLDECKVMPQNHSFLENDLKNAMASFLPKKVSDNSNIPNSELLPFLQNLCSQVNHLHVGNKTECQENITKHGERILGVGMEEQSICSYLEKILSKNMELMEKKLMDYIDQRIHELQEHIDDKIALLLDLLQNPNSPPTGIPLRHYDSGERLSNGER

SEQ ID NO: 3097 - DNA, 1290 bp, Homo sapiens
gtgagcggcaacatggcgtccaggtctaagcggcgtgccgtggaaagtggggttccgcagccgccggatcccccagtccagcgcgacgaggaagaggaaaaagaagtcgaaaatgaggatgaagacgatgatgacagtgacaaggaaaaggatgaagaggacgaggtcattgacgaggaagtgaatattgaatttgaagcttattccctatcagataatgattatgacggaattaagaaattactgcagcagctttttctaaaggctcctgtgaacactgcagaactaacagatctcttaattcaacagaaccatattgggagtgtgattaagcaaacggatgtttcagaagacagcaatgatgatatggatgaagatgaggtttttggtttcataagccttttaaatttaactgaaagaaagggtacccagtgtgttgaacaaattcaagagttggttctacgcttctgtgagaagaactgtgaaaagagcatggttgaacagctggacaagtttttaaatgacaccaccaagcctgtgggccttctcctaagtgaaagattcattaatgtccctccacagatcgctctgcccatgtaccagcagcttcagaaagaactggcgggggcacacagaaccaataagccatgtgggaagtgctacttttaccttctgattagtaagacatttgtggaagcaggaaaaaacaattccaaaaagaaacctagcaacaaaaagaaagctgcgttaatgtttgcaaatgcagaggaagaatttttctatgaggagcagggaaaacctgaggtgcttggaggtccagacacaagaagaggattggaaccagttccgatacagcacaatggtggttcacgggggcaagtgacagccctggtttctctgaaggctggactaattcaatcaagatcaactctaagtgatttccagggaaccttcatgactgttggaattgctctgtcataataagtcagggatatttaggaggctcatagtctcctggagggataaaacatctcggcacctagtaatggtaaattagtcaatatttgttagtttcgtttgagatctcaaatgttaggattttctgaagtctcagtgtctttcagagtttgagataccttgttttcattttttctaatttttaatttaaaagtaataaagaatattttgtaatgattaggatgaaaattttatcgtcaattataagccaaaatttgctaaaattaaagtcagtatacttggaaaaaaaaaaaaaaaaaaaaaaaaaaaaaa

SEQ ID NO: 3098 - protein, 322 aa, Homo sapiens
MASRSKRRAVESGVPQPPDPPVQRDEEEEKEVENEDEDDDDSDKEKDEEDEVIDEEVNIEFEAYSLSDNDYDGIKKLLQQLFLKAPVNTAELTDLLIQQNHIGSVIKQTDVSEDSNDDMDEDEVFGFISLLNLTERKGTQCVEQIQELVLRFCEKNCEKSMVEQLDKFLNDTTKPVGLLLSERFINVPPQIALPMYQQLQKELAGAHRTNKPCGKCYFYLLISKTFVEAGKNNSKKKPSNKKKAALMFANAEEEFFYEEQGKPEVLGGPDTRRGLEPVPIQHNGGSRGQVTALVSLKAGLIQSRSTLSDFQGTFMTVGIALS

SEQ ID NO: 3099 - DNA, 1326 bp, Homo sapiens
gcggagcgagccctgaaaggctataggcgagggggcggctccgcggggccgggcgaggagtccagagagccatggccgccctgcgtgtcctgctgtcctgcgcccgcggcccgctgaggcccccggttcgctgtcccgcctggcgtcccttcgcctcgggtgctaactttgagtacatcatcgcagaaaaaagagggaagaataacaccgtggggttgatccaactgaaccgccccaaggccctcaatgcactttgcgatggcctgattgacgagctcaaccaggccctgaagatcttcgaggaggacccggccgtgggggccattgtcctcaccggcggggataaggcctttgcagctggagctgatatcaaggaaatgcagaacctgagtttccaggactgttactccagcaagttcttgaagcactgggaccacctcacccaggtcaagaagccagtcatcgctgctgtcaatggctatgcctttggcgggggctgtgagcttgccatgatgtgtgatatcatctatgccggtgagaaggcccagtttgcacagccggagatcttaataggaaccatcccaggtgcgggcggcacccagagactcacccgtgctgttgggaagtcgctggcgatggagatggtcctcaccggtgaccggatctcagcccaggacgccaagcaagcaggtcttgtcagcaagatttgtcctgttgagacactggtggaagaagccatccagtgtgcagaaaaaattgccagcaattctaaaattgtagtagcgatggccaaagaatcagtgaatgcagcttttgaaatgacattaacagaaggaagtaagttggagaagaaactcttttattcaacctttgccactgatgaccggaaagaagggatgaccgcgtttgtggaaaagagaaaggccaacttcaaagaccagtgagaaccagctgcccctgcttcacacctctgcttggagaggacaagtgcagcctgtcagttttagaagcaagtaaatcatcctcttttcaagagcagtgtccgtggtgtgcagttcctctccaattgctgcgtggtcgtggcccgacctctcacggcatgacagccttcgtcacccagcctgtgagggtcctgactggagcaccttctaaatctaagattctgctgaggagcccccgctggtccctctgggcatgctgtgctcggacggaaagcggggcctgcgggtccttgtgtccctgccgctgaagaatggggctgctctgagggaaacgctgtctgctgccttcatacagatgctgattaaagtgatagcgattcagatt

SEQ ID NO: 3100 - protein, 290 aa, Homo sapiens
MAALRVLLSCARGPLRPPVRCPAWRPFASGANFEYIIAEKRGKNNTVGLIQLNRPKALNALCDGLIDELNQALKIFEEDPAVGAIVLTGGDKAFAAGADIKEMQNLSFQDCYSSKFLKHWDHLTQVKKPVIAAVNGYAFGGGCELAMMCDIIYAGEKAQFAQPEILIGTIPGAGGTQRLTRAVGKSLAMEMVLTGDRISAQDAKQAGLVSKICPVETLVEEAIQCAEKIASNSKIVVAMAKESVNAAFEMTLTEGSKLEKKLFYSTFATDDRKEGMTAFVEKRKANFKDQ

SEQ ID NO: 3101 - DNA, 2846 bp, Homo sapiens
ggcggaagtggctccgggactgcggagaacatattgtgatgttcgtgcctcagagctaaaactatgagtgaatttcggattcaccatgacgtcaatgaactgcttagcctgctgcgtgtccacggaggagatggggctgaggtctacattgacctgcttcaaaagaacaggaccccgtacgtcactaccactgtctctgctcacagtgccaaggttaaaattgcagagttttctcgtactccagaagactttctaaagaaatatgatgaactgaaatctaaaaatacaaggaaccttgacccgctggtgtacctgttgtcaaagctcacggaagacaaagagactctgcagtacttacaacagaatgcaaaagaaagagctgagcttgcagccgctgctgtgggcagcagtaccaccagcatcaacgtccctgccgcggcctccaagatctccatgcaggagcttgaggaactgaggaagcagcttggcagcgtggccacaggctccacgctgcagcagtctctggaacttaaaagaaagatgcttcgagacaagcagaacaaaaaaaattcaggccagcacctccccatcttcccagcatgggtgtatgagagacctgccctgatcggggatttcctgattggtgctggcatcagcacagacaccgctttgccgataggcacgttgcccctggcctcgcaggagtcggccgtggtggaggacctgctgtacgtgctggtgggcgtggacgggaggtacgtcagtgctcagcccctggctgggaggcagagccggaccttcctcgtggaccccaacctggacctgtccatcagggagctggtgcacaggatcctcccagtggccgccagctactccgctgtgaccaggttcattgaagagaagtcttccttcgagtacgggcaggtgaaccacgccctggcggccgccatgcgcaccctggtgaaggagcacctgattctggtgtcacagctggagcagctgcacaggcagggcctcctttcgctgcagaagctctggttctacatccagccagccatgcgcaccatggacatcctggcctccctcgccacctcggtggacaaaggcgaatgtcttggggggtccacgctgagcctgctccacgacaggagcttcagctacacaggggacagccaggcgcaggagctatgcctgtacctaaccaaggcggccagtgctccctacttcgaggttctggagaagtggatctacaggggcatcatccacgacccatacagtgagtttatggtcgaggagcacgagctgcggaaggagaggatccaggaggattacaacgacaagtactgggaccagcggtacaccatcgtccagcagcagatcccgtccttcctgcagaaaatggcggacaagatcctcagcacaggaaaatatctaaatgtggtcagagagtgtggccatgacgtcacctgcccggtggctaaagagatcatctacacgttaaaagagcgggcgtatgtggagcagatcgagaaggcgtttaactacgccagcaaggtgctgctggacttcctgatggaggagaaggagctggtggctcacctcaggtccatcaagcgctacttcctcatggaccagggcgacttcttcgtgcacttcatggacctcgcggaggaggagctccggaagccggtggaggacatcacgccccctcgcctggaagcgctcctggagctggcgctgcgcatgagcacggccaacactgaccccttcaaggacgacctcaagatcgacctgatgccccatgacctcatcactcagctcttgcgcgtcctggccatcgagaccaagcaggagaaggcgatggcgcacgccgaccccacggagctggcgctgagcggcctggaggccttctctttcgactacatcgtcaagtggcccctttcgctcatcatcaacaggaaagccctcactcgctaccagatgctcttcaggcacatgttctattgcaagcacgtggagcggcagctctgcagcgtctggatcagcaacaaaaccgccaagcagcactcgctgcactccgcccagtggtttgctggggctttcactctgcggcagcgaatgctcaacttcgtccagaatattcaatactacatgatgttcgaagtgatggaaccgacctggcacatcctggagaaaaacctgaaatccgcctccaacattgacgacgtccttggccaccacacaggcttcctggacacctgcctgaaggactgcatgctcaccaaccccgagctgctgaaggtcttctccaagctcatgtctgtgtgcgtcatgttcaccaactgcatgcagaaatttacacagagcatgaaattagatggcgagctgggcgggcagacgctggagcacagcaccgtcctggggctgcccgcaggggccgaggagcgggcccggaaggagctcgccaggaagcacctggctgagcacgcagacactgtgcagctggtgtccggcttcgaggccaccatcaacaagtttgacaagaacttctcagcccacctgctggacctcctggcccggctgagcatctatagcaccagtgactgtgagcacggcatggccagcgtcatctccaggcttgacttcaatggtttctacacggagcgcctggagcgcctgtctgcagagaggagccagaaggccaccccccaagtgcctgtcctgcgggggcccccggctcctgcacccagggtcgcagtcaccgcacagtgagccctggctgtgacaggaaggaagggtgtggggtcagcagggactggtgcaaatgggtccagaattttcaaatc

SEQ ID NO: 3102 - protein, 902 aa, Homo sapiens
MSEFRIHHDVNELLSLLRVHGGDGAEVYIDLLQKNRTPYVTTTVSAHSAKVKIAEFSRTPEDFLKKYDELKSKNTRNLDPLVYLLSKLTEDKETLQYLQQNAKERAELAAAAVGSSTTSINVPAAASKISMQELEELRKQLGSVATGSTLQQSLELKRKMLRDKQNKKNSGQHLPIFPAWVYERPALIGDFLIGAGISTDTALPIGTLPLASQESAVVEDLLYVLVGVDGRYVSAQPLAGRQSRTFLVDPNLDLSIRELVHRILPVAASYSAVTRFIEEKSSFEYGQVNHALAAAMRTLVKEHLILVSQLEQLHRQGLLSLQKLWFYIQPAMRTMDILASLATSVDKGECLGGSTLSLLHDRSFSYTGDSQAQELCLYLTKAASAPYFEVLEKWIYRGIIHDPYSEFMVEEHELRKERIQEDYNDKYWDQRYTIVQQQIPSFLQKMADKILSTGKYLNVVRECGHDVTCPVAKEIIYTLKERAYVEQIEKAFNYASKVLLDFLMEEKELVAHLRSIKRYFLMDQGDFFVHFMDLAEEELRKPVEDITPPRLEALLELALRMSTANTDPFKDDLKIDLMPHDLITQLLRVLAIETKQEKAMAHADPTELALSGLEAFSFDYIVKWPLSLIINRKALTRYQMLFRHMFYCKHVERQLCSVWISNKTAKQHSLHSAQWFAGAFTLRQRMLNFVQNIQYYMMFEVMEPTWHILEKNLKSASNIDDVLGHHTGFLDTCLKDCMLTNPELLKVFSKLMSVCVMFTNCMQKFTQSMKLDGELGGQTLEHSTVLGLPAGAEERARKELARKHLAEHADTVQLVSGFEATINKFDKNFSAHLLDLLARLSIYSTSDCEHGMASVISRLDFNGFYTERLERLSAERSQKATPQVPVLRGPPAPAPRVAVTAQ

SEQ ID NO: 3103 - DNA, 3236 bp, Homo sapiens
gacccggccatgcgcggcctcgggctctggctgctgggcgcgatgatgctgcctgcgattgcccccagccggccctgggccctcatggagcagtatgaggtcgtgttgccgtggcgtctgccaggcccccgagtccgccgagctctgccctcccacttgggcctgcacccagagagggtgagctacgtccttggggccacagggcacaacttcaccctccacctgcggaagaacagggacctgctgggctccggctacacagagacctatacggctgccaatggctccgaggtgacggagcagcctcgcgggcaggaccactgcttctaccagggccacgtagaggggtacccggactcagccgccagcctcagcacctgtgccggcctcaggggtttcttccaggtggggtcagacctgcacctgatcgagcccctggatgaaggtggcgagggcggacggcacgccgtgtaccaggctgagcacctgctgcagacggccgggacctgcggggtcagcgacgacagcctgggcagcctcctgggaccccggacggcagccgtcttcaggcctcggcccggggactctctgccatcccgagagacccgctacgtggagctgtatgtggtcgtggacaatgcagagttccagatgctggggagcgaagcagccgtgcgtcatcgggtgctggaggtggtgaatcacgtggacaagctatatcagaaactcaacttccgtgtggtcctggtgggcctggagatttggaatagtcaggacaggttccacgtcagccccgaccccagtgtcacactggagaacctcctgacctggcaggcacggcaacggacacggcggcacctgcatgacaacgtacagctcatcacgggtgtcgacttcaccgggactaccgtggggtttgccagggtgtccgccatgtgctcccacagctcaggggctgtgaaccaggaccacagcaagaaccccgtgggcgtggcctgtaccatggcccatgagatgggccacaacctgggcatggaccatgatgagaacgtccagggctgccgctgccaggaacgcttcgaggccggccgctgcatcatggcgggcagcattggctccagtttccccaggatgttcagtgactgcagccaggcctacctggagagctttttggagcggccgcagtcggtgtgcctcgccaacgcccctgacctcagccacctggtgggcggccccgtgtgtgggaacctgtttgtggagcgtggggagcagtgcgactgcggcccccccgaggactgccggaaccgctgctgcaactctaccacctgccagctggctgagggggcccagtgtgcgcacggtacctgctgccaggagtgcaaggtgaagccggctggtgagctgtgccgtcccaagaaggacatgtgtgacctcgaggagttctgtgacggccggcaccctgagtgcccggaagacgccttccaggagaacggcacgccctgctccgggggctactgctacaacggggcctgtcccacactggcccagcagtgccaggccttctgggggccaggtgggcaggctgccgaggagtcctgcttctcctatgacatcctaccaggctgcaaggccagccggtacagggctgacatgtgtggcgttctgcagtgcaagggtgggcagcagcccctggggcgtgccatctgcatcgtggatgtgtgccacgcgctcaccacagaggatggcactgcgtatgaaccagtgcccgagggcacccggtgtggaccagagaaggtttgctggaaaggacgttgccaggacttacacgtttacagatccagcaactgctctgcccagtgccacaaccatggggtgtgcaaccacaagcaggagtgccactgccacgcgggctgggccccgccccactgcgcgaagctgctgactgaggtgcacgcagcgtccgggagcctccccgtcttcgtggtggtggttctggtgctcctggcagttgtgctggtcaccctggcaggcatcatcgtctaccgcaaagcccggagccgcatcctgagcaggaacgtggctcccaagaccacaatggggcgctccaaccccctgttccaccaggctgccagccgcgtgccggccaagggcggggctccagccccatccaggggcccccaagagctggtccccaccacccacccgggccagcccgcccgacacccggcctcctcggtggctctgaagaggccgccccctgctcctccggtcactgtgtccagcccacccttcccagttcctgtctacacccggcaggcaccaaagcaggtcatcaagccaacgttcgcacccccagtgcccccagtcaaacccggggctggtgcggccaaccctggtccagctgagggtgctgttggcccaaaggttgccctgaagccccccatccagaggaagcaaggagccgagctcccacagcaccctaggggggcacctgcgcctgtgtggaaatttggagaagttgcggcagagaagccatgcgttccagcattccacggtccagctagtgccgctcagccctagaccctgactttgcaggctcagctgctgttctaacctcaggaatgcatctacctgagaggctcctgctgtccacgccctcagccaattccttctccccgccttggccacgtgtagccccagctgtctgcaggcaccaggctgggatgagctgtgtgcttgcgggtgcgtgtgtgtgtacgtgtctccaggtggccgctggtctcccgctgtgttcaggaggccacatatacagcccctcccagccacacctgcccctgctctggggcctgctgagccggctgccctgggcacccggttccaggcagcacagacgtggggcatccccagaaagactccatcccaggaccaggttcccctgcgtgctcttcgagagggtgtcagtgagcagactgcaccccaagctcccgactccaggtcccctgatcttggggcctgtttcccatgggattcaagagggacagccccagctttgtgtgtgtttaagcttaggaatcgcctttatggaaagggctatgtgggagagtcagctatcttgtctggttttcttgagacctcagatgtgtgttcagcagggctgaaagcttttattctttaataatgagaaatgtatattttactaataaattattgaccgagttctgtagattcttgttaga

SEQ ID NO: 3104 - DNA, 276 bp, Homo sapiens
atgggccagaatgttgcagattacatgtgctacttaatgcaagaagatgaagatgcttacaagaaacagttctctcaatacataaagaacagcgtaactccagacatgagagataagaaagctcatgctgctctacaagagaatccaggctatgagaagaagcccaagaaagaagttcgaaagaagaggcaaaaccgtcccaaaatggcctttgctcagaagaaagttcgggtagctcaaagaaggcaagcttccttggagctcaggagctgctga

SEQ ID NO: 3105 - protein, 91 aa, Homo sapiens
MGQNVADYMCYLMQEDEDAYKKQFSQYIKNSVTPDMRDKKAHAALQENPGYEKKPKKEVRKKRQNRPKMAFAQKKVRVAQRRQASLELRSC

SEQ ID NO: 3106 - DNA, 841 bp, Homo sapiens
tctaatacctattgatctgttactttctcccatcacgctcaggtgggaccatccagttgcaggaaaacaagcttaacacgcccactgattctacattatggtgagttctatgattattttattatatattacagtgtaataatggaaataaagtgcctaataaatgcaaatgtgcttacatcttttggcccagctcctacctcccggcagcctctccaggcccagaactttctccagtcagcctctacagaccaagatcatgactcacaatggcctatttaggcccataccctacgtcacggcagcctccacagatgaggctactgcctcacaacagcctccacaggcacagctccatcgttacaatggcctctttagacccagctcctgcctcccagccttctctccaggccctgaactttctcaagtcgacctcaccaggcccaggtcatgcttctttgcagcctctccaggcccagctcctgcatcttggtggcccctccaggcccagcctctgcctcccgtcagcctctacagtcccaacgtctgcctcacagcagattcttcacgcccagcatctacctcacttggaccctccagacccagatggtgtctcactgtggcatcctcaggcgaagctcctgccttttggcagcctctccaggcccagctcctcctgcctcccagtggcctctttcggcccagcccagctcatgcctcccggcggccttcccaagccccgcttttgactttcggtggcctctgcaggcctcgacaaggcccagcctcctgcctcccgaaggcctgcacaggcccagcctctgcctcacagcggactctc

SEQ ID NO: 3107 - DNA, 545 bp, Homo sapiens
cggccgcccccgcgactgcgccacgtctgaggcggctgtggccacgtctgaggcggctgtggccgcgtcggtgtccgcgtcgaggagccggggcagggcacgatggcggactgggctcgggctcagagcccgggcgctgtggaagagattctagaccgggagaacaagcgaatggctgacagcctggcctccaaagtcaccaggctcaaatcgctcgccctggacatcgatagggatgcagaggatcagaaccggtacctggatggcatggactcggatttcacaagcatgaccagcctgcttacagggagcgtgaagcgcttttccacaatggcaaggtccggacaagacaaccggaagcttctatgtggcatggccgtgggtctaattgtggccttcttcatcctctcctacttcttgtccagggcaaggacgtgagccagtgggagctggtgtctgtgggtgccaagggcagccagcggtcttccctgcctggtgttttgggctccacaggacttacctacaaaatactcctttgcaatgat

SEQ ID NO: 3108 - protein, 111 aa, Homo sapiens
MADWARAQSPGAVEEILDRENKRMADSLASKVTRLKSLALDIDRDAEDQNRYLDGMDSDFTSMTSLLTGSVKRFSTMARSGQDNRKLLCGMAVGLIVAFFILSYFLSRART

SEQ ID NO: 3109 - DNA, 2457 bp, Homo sapiens
cggggccggcgaactgcggcccggaacggctgaggaagggcccgtcccgccttccccggcgcgccatggagccccgggcggttgcagaagccgtggagacgggtgaggaggatgtgattatggaagctctgcggtcatacaaccaggagcactcccagagcttcacgtttgatgatgcccaacaggaggaccggaagagactggcggagctgctggtctccgtcctggaacagggcttgccaccctcccaccgtgtcatctggctgcagagtgtccgaatcctgtcccgggaccgcaactgcctggacccgttcaccagccgccagagcctgcaggcactagcctgctatgctgacatctctgtctctgaggggtccgtcccagagtccgcagacatggatgttgtactggagtccctcaagtgcctgtgcaacctcgtgctcagcagccctgtggcacagatgctggcagcagaggcccgcctagtggtgaagctcacagagcgtgtggggctgtaccgtgagaggagcttcccccacgatgtccagttctttgacttgcggctcctcttcctgctaacggcactccgcaccgatgtgcgccagcagctgtttcaggagctgaaaggagtgcgcctgctaactgacacactggagctgacgctgggggtgactcctgaagggaaccccccacccacgctccttccttcccaagagactgagcgggccatggagatcctcaaagtgctcttcaacatcaccctggactccatcaagggggaggtggacgaggaagacgctgccctttaccgacacctggggacccttctccggcactgtgtgatgatcgctactgctggagaccgcacagaggagttccacggccacgcagtgaacctcctggggaacttgcccctcaagtgtctggatgttctcctcaccctggagccacatggagactccacggagttcatgggagtgaatatggatgtgattcgtgccctcctcatcttcctagagaagcgtttgcacaagacacacaggctgaaggagagtgtagctcccgtgctgagcgtgctgactgaatgtgcccggatgcaccgcccagccaggaagttcctgaaggcccaggtgctgccccctctgcgggatgtgaggacacggcctgaggttggggagatgctgcggaacaagcttgtccgcctcatgacacacctggacacagatgtgaagagggtggctgccgagttcttgtttgtcctgtgctctgagagtgtgccccgattcatcaagtacacaggctatgggaatgctgctggccttctggctgccaggggcctcatggcaggaggccggcccgagggccagtactcagaggatgaggacacagacacagatgagtacaaggaagccaaagccagcataaaccctgtgaccgggagggtggaggagaagccgcctaaccctatggagggcatgacagaggagcagaaggagcacgaggccatgaagctggtgaccatgtttgacaagctctccaggaacagagtcatccagccaatggggatgagtccccggggtcatcttacgtccctgcaggatgccatgtgcgagactatggagcagcagctctcctcggaccctgactcggaccctgactgaggatggcagctcttctgctcccccatcaggactggtgctgcttccagagacttccttggggttgcaacctcgggaagccacatcccactggatccacacccgcccccacttctccatcttagaaaccccttctcttgactcccgttctgttcatgatttgcctctggtccagtttctcatctctggactgcaacggtcttcttgtgctagaactcaggctcagcctcgaattccacagacgaagtactttcttttgtctgcgccaagaggaatgtgttcagaagctgctgcctgagggcagggcctacctgggcacacagaagagcatatgggagggcaggggtttgggtgtgggtgcacacaaagcaagcaccatctgggattggcacactggcagagccagtgtgttggggtatgtgctgcacttcccagggagaaaacctgtcagaactttccatacgagtatatcagaacacacccttccaaggtatgtatgctctgttgttcctgtcctgtcttcactgagcgcagggctggaggcctcttagacattctccttggtcctcgttcagctgcccactgtagtatccacagtgcccgagttctcgctggttttggcaattaaacctccttcctactggtttagactacacttacaacaaggaaaatgcccctcgtgtgaccatagattgagatttataccacataccacacatagccacagaaacatcatcttgaaataaagaagagttttggacaaaaaaaaaaaaaaaaaaaaaaaaaaaaaaaaaaaaaa

SEQ ID NO: 3110 - protein, 531 aa, Homo sapiens
MEPRAVAEAVETGEEDVIMEALRSYNQEHSQSFTFDDAQQEDRKRLAELLVSVLEQGLPPSHRVIWLQSVRILSRDRNCLDPFTSRQSLQALACYADISVSEGSVPESADMDVVLESLKCLCNLVLSSPVAQMLAAEARLVVKLTERVGLYRERSFPHDVQFFDLRLLFLLTALRTDVRQQLFQELKGVRLLTDTLELTLGVTPEGNPPPTLLPSQETERAMEILKVLFNITLDSIKGEVDEEDAALYRHLGTLLRHCVMIATAGDRTEEFHGHAVNLLGNLPLKCLDVLLTLEPHGDSTEFMGVNMDVIRALLIFLEKRLHKTHRLKESVAPVLSVLTECARMHRPARKFLKAQVLPPLRDVRTRPEVGEMLRNKLVRLMTHLDTDVKRVAAEFLFVLCSESVPRFIKYTGYGNAAGLLAARGLMAGGRPEGQYSEDEDTDTDEYKEAKASINPVTGRVEEKPPNPMEGMTEEQKEHEAMKLVTMFDKLSRNRVIQPMGMSPRGHLTSLQDAMCETMEQQLSSDPDSDPD

SEQ ID NO: 3111 - DNA, 1581 bp, Homo sapiens
tttccggcagccatccccgcggtgctgacatcccggttgttcttctgtgccgggggtcttcctgctgtcatgaaggacgtaccgggcttcctacagcagagccagagctccgggcccgggcagcccgctgtgtggcaccgtctggaggagctctacacgaagaagttgtggcatcagctgacacttcaggtgcttgattttgtgcaggatccgtgctttgcccaaggagatggtctcattaagctttatgaaaactttatcagtgaatttgaacacagggtgaatcctctgtccctcgtggaaatcattcttcacgtagttagacagatgactgatcctaatgtggctcttacttttctggaaaagactcgtgagaaggtgaaaagtagtgatgaggcagtgatcctgtgtaaaacagcaattggagctctaaaattaaacatcggggacctacaggttacaaaggaaacaattgaagatgttgaagaaatgctcaacaaccttcctggtgtgacatcggttcacagtcgtttctatgatctctccagtaaatactatcaaacaatcggaaaccacgcgtcctactacaaagatgctctgcggtttttgggctgtgttgacatcaaggatctaccagtgtctgagcagcaggagagagccttcacgctggggctagcaggacttctcggcgagggagtttttaactttggagaactcctcatgcaccctgtgctggagtccctgaggaatactgaccggcagtggctgattgacaccctctatgccttcaacagtggcaacgtagagcggttccagactctgaagactgcctggggccagcagcctgatttagcagctaatgaagcccagcttctgaggaaaattcagttgttgtgcctcatggagatgactttcacacgacctgccaatcacagacaactcacttttgaagaaattgccaaaagtgctaaaatcacagtgaatgaggtggagcttctggtgatgaaggccctttcggtggggctggtgaaaggcagtatagacgaggtggacaaacgagtccacatgacctgggtgcagccccgagtgttggatttgcaacagatcaagggaatgaaggaccgcctggagttctggtgcacggatgtgaagagcatggagatgctggtggagcaccaggcccatgacatcctcacctagggccccctggttccccgtcgtgtctcctttgactcacctgagagaggcatttgcagccaatgaagctggctgctcagacggtcgacattgaatttgggtgggggttgggatcctgtctgaagtacagactgtccctgctctaaaaacaggactgtccctgatgggagccaggccacagggaggaggcttctttgtgggtctctcctgcagagggtgggggtctcagggtcttaggtgatacgggagagaaagaacgtgccaggcaggaggccccctgaagtctgtgtactccgaggtggatctccatccccatccacctgtacggacatcttttccgttgtggtttgagaatgttcctataataaacccctctgctttgtt

SEQ ID NO: 3112 - protein, 376 aa, Homo sapiens
MKDVPGFLQQSQSSGPGQPAVWHRLEELYTKKLWHQLTLQVLDFVQDPCFAQGDGLIKLYENFISEFEHRVNPLSLVEIILHVVRQMTDPNVALTFLEKTREKVKSSDEAVILCKTAIGALKLNIGDLQVTKETIEDVEEMLNNLPGVTSVHSRFYDLSSKYYQTIGNHASYYKDALRFLGCVDIKDLPVSEQQERAFTLGLAGLLGEGVFNFGELLMHPVLESLRNTDRQWLIDTLYAFNSGNVERFQTLKTAWGQQPDLAANEAQLLRKIQLLCLMEMTFTRPANHRQLTFEEIAKSAKITVNEVELLVMKALSVGLVKGSIDEVDKRVHMTWVQPRVLDLQQIKGMKDRLEFWCTDVKSMEMLVEHQAHDILT

SEQ ID NO: 3113 - DNA, 905 bp, Homo sapiens
caacacaggggcagtctccaggacctccacaccattaacaagatgagccttgtgctcccttgggctctagagaggaagcccctctgagccctcagcccctctttcctccctctcctaaagtaatttgatcctcaggaatttgttctgccctcatctggccctggccagctctgcatttgacaaatgccaggaagaggaaactgttgagaaaacggaactactggggaaagggagggctcactgagaaccatcccggtaacccgaccgccgctggtcaccatgaaccacattgtgcaaaccttctctcctgtcaacagcggccagcctcccaactacgagatgctcaaggaggagcaggaagtggctatgctgggggggccccacaaccctgctcccccgacgtccaccgtgatccacatccgcagcgagacctccgtgcctgaccatgtcgtctggtccctgttcaacaccctcttcatgaacacctgctgcctgggcttcatagcattcgcctactccgtgaagtctagggacaggaagatggttggcgacgtgaccggggcccaggcctatgcctccaccgccaagtgcctgaacatctgggccctgattttgggcatcttcatgaccattctgctcgtcatcatcccagtgttggtcgtccaggcccagcgatagatcaggaggcatcattgaggccaggagctctgcccgtgacctgtatcccacgtactctatcttccattcctcgccctgcccccagaggccaggagctctgcccttgacctgtattccacttactccaccttccattcctcgccctgtccccacagccgagtcctgcatcagccctttatcctcacacgcttttctacaatggcattcaataaagtgtatatgtttct

SEQ ID NO: 3114 - protein, 132 aa, Homo sapiens
MNHIVQTFSPVNSGQPPNYEMLKEEQEVAMLGGPHNPAPPTSTVIHIRSETSVPDHVVWSLFNTLFMNTCCLGFIAFAYSVKSRDRKMVGDVTGAQAYASTAKCLNIWALILGIFMTILLVIIPVLVVQAQR

SEQ ID NO: 3115 - DNA, 1631 bp, Homo sapiens
tttaacacccatagtaggcctaaaagcagccaccaattaagaaagccacagcacgtacacccactccagggatctgccagcaccctgtggggcccagactacaggctgatggcggaggcttcgagtgacccgggtgctgaggagcgggaagagttgctggggcccactgctcagtggagcgtggaggacgaggaggaggccgtccacgagcaatgccagcatgagagagacaggcagcttcaggcccaggacgaggagggaggcggccatgtccccgagcggccgaagcaggagatgctcctcagcctgaagccctcggaggcccctgaactggatgaggacgagggctttggcgactggtcccagaggccagagcagcggcagcagcacgagggggcgcagggcgccttggacagcggagagcccccccagtgcaggagtcctgagggggagcaagaggacaggcccggcctgcatgcctacgaaaaggaggacagtgatgaagtccacctggaggagttgagtctgagcaaggaggggccaggcccagaggacactgtccaggacaacctgggggccgcaggggctgaggaggaacaggaggagcaccagaaatgtcagcagcccaggacacccagccccttggtcttggaggggaccatcgaacagagctcgcctcccctgagccctaccaccaaactcatcgacaggaccgagtccctaaaccgctccatagagaagagtaacagtgtgaagaaatcccagccagacttgcccatctccaagattgatcagtggctggaacaatacacccaggccatcgagaccgctggccggacccccaagctagcccgccaggcctccatagagctgcccagcatggctgtggccagtaccaagagtcggtgggagacgggtgaggtacaggctcagtctgcggccaagactccgtcctgcaaggatattgtggctggagacatgagcaagaaaagcctctgggagcagaagggaggctccaagacctcatcaacaattaagagcaccccatctgggaagaggtataagtttgtggccaccgggcatgggaagtatgagaaggtgcttgtggaagggggcccggctccctaggcgtcccatctcgcttcctgggtctgcaggtccagccggctggcaccctccatgtacccaggggagattccagccagacacccgccccccggccctggctaagaagttgcttcctgttgccagcatgacctaccctcgcctctttgatgccatccgctgccacctccttttgctcctggaccctttagcctctctgcccttccactctctgaccaccgcccccgccctccccacccagctccgcttcttgttacttgggggaggaaagaaactcctgatcattggccaaagggacttacccctggagaggccaagtgccttctaggaagttaggaggttgaggcacagcctgtgcagagagggtgggtcacccccccagatccaaggggaaactgcaggtcaagggctgataacggccatgcaggatgcttgatgctgcgtcccccgctgcttgccgccccccaccccgccattttgtataataaagctccctgtgtattctc

SEQ ID NO: 3116 - protein, 339 aa, Homo sapiens
MAEASSDPGAEEREELLGPTAQWSVEDEEEAVHEQCQHERDRQLQAQDEEGGGHVPERPKQEMLLSLKPSEAPELDEDEGFGDWSQRPEQRQQHEGAQGALDSGEPPQCRSPEGEQEDRPGLHAYEKEDSDEVHLEELSLSKEGPGPEDTVQDNLGAAGAEEEQEEHQKCQQPRTPSPLVLEGTIEQSSPPLSPTTKLIDRTESLNRSIEKSNSVKKSQPDLPISKIDQWLEQYTQAIETAGRTPKLARQASIELPSMAVASTKSRWETGEVQAQSAAKTPSCKDIVAGDMSKKSLWEQKGGSKTSSTIKSTPSGKRYKFVATGHGKYEKVLVEGGPAP

SEQ ID NO: 3117 - DNA, 1317 bp, Homo sapiens
ttgctgtaacagtgtttattgatgatgagtccagggctcctgctgaagccctggtggggaggggcacagagcgagatggggcgtaatggaatgcttgaaggctgctccgtgatgtcggtcggagcttccagactaggcgagggcagggtgaggcctcgggcacacagccggcgcccagtcacccggcccagatggagggcggccgggccctgcacaggcacttgccaaggtggctcacactcacgcacactcgtactgagactcaaggccgtctccacaactccaaccagtgcaaatgacttagtgcaaattaaattcagaagggacgggggaaacagagtcgtggaggctttgaatctctcagaaaaaaggaaagacaggaaagctcagaaacaaagagacagaaggatgaaaaagaagaagagggaggtggtggggacggcgtcatcccgctggaggagctcagctctgggatgatgtggtggctggtggtcaaccgtccgccgcagggggtggccatgaagatggagtcgccggtgcggggtgggtgctgcgggcgctgctgttccgatggtgtctttgatgttgggctgatgaggtctggttcctctagcttccagagccgattcctgagtcaggtagtgcagtggttgtaaagtgcagcatattcatttccaagctagagggttttgtgtccggattcaaaggcccaggcttgagctgggtagcaccatttctttcatgttgtgggttctgggagcccagagggcagccatagtgtgccgactccgtggaggaagtaaagaaacagacccgcttcttgccgcagccccaccagcctaaggtgttcaggaaggccggacgcgcctcctctgtcctcgccgtcacaccggaccatgtcatgtcctgcttgtcacgtccaccggacctggcgtcttggccttcggcagctggtgggcacgtccaccccagctggagacctggcctcgtctccagcccgaacgctgaggcaccgatcccggctccgtcgccgcccgcgaggcccgccttggccacgggctctggaggccagtgcctcccgctcgccgcccgctgcgctcctcacccctgcctgcaccatcctccctcctgagagctcattcactccgccccgcccgcctcgcctagtctggtctcgccccatgcccttgactcccctggatgctgtactgtctgccaagccagccccaggggctgagcggtgagggcatacagcgtcaccaagtccactgtgggccctctccgcaccagaccctgggccgcagtgcctcgtgggac

SEQ ID NO: 3118 - protein, 151 aa, Homo sapiens
MMSPGLLLKPWWGGAQSEMGRNGMLEGCSVMSVGASRLGEGRVRPRAHSRRPVTRPRWRAAGPCTGTCQGGSHSRTLVLRLKAVSTTPTSANDLVQIKFRRDGGNRVVEALNLSEKRKDRKAQKQRDRRMKKKKREVVGTASSRWRSSALG

SEQ ID NO: 3119 - DNA, 595 bp, Homo sapiens
ggggccagacgccaagaggggcgcggggagcacagagaagcggagggaagggcgccacgtcgaggggccgggggaggcggtgactggggggcggagtggaggctgcacccggaccgcgggcgcccagctcggtttgggccgacggagccctctgccgtcgcgagcccgggcctcgggagggggacaggcggtggcggcaccggggccgctccgggacgcagcgcggaaaggggagcggcccgaggctgcgcgccggggggagggctggagggggagcgctttggggggttacaacgccggcggcctgcgagccggactgcctgcggggggaaccgcctcctcgggcgaagcggggatggggggagttgaggtagatgaagaggaggcggcggggaatccgcaggcccggcggagcgcgaccccgcggacggcgcccgggacgggagtcagcagcgaggcagcgggcggcgtcgacgcggggccgccttgcccgatggaggcgctggtgggcagagcgcgggcaggcgtgggccaggaggcgggggcggccggaaggggggggccggggccggccgggcctcacgcagctccgccg

SEQ ID NO: 3120 - DNA, 1356 bp, Homo sapiens
ttctcccgcaaccttcccttcgctccctcccgtcccccccagctcctagcctccgactccctccccccctcacgcccgccctctcgccttcgccgaaccaaagtggattaattacacgctttctgtttctctccgtgctgttctctcccgctgtgcgcctgcccgcctctcgctgtcctctctccccctcgccctctcttcggcccccccctttcacgttcactctgtctctcccactatctctgcccccctctatccttgatacaacagctgacctcatttcccgataccttttcccccccgaaaagtacaacatctggcccgccccagcccgaagacagcccgtcctccctggacaatcagacgaattctccccccccccccaaaaaaaaaagccatccccccgctctgccccgtcgcacattcggcccccgcgactcggccagagcggcgctggcagaggagtgtccggcaggagggccaacgcccgctgttcggtttgcgacacgcagcagggaggtgggcggcagcgtcgccggcttccagacaccaatgggaatcccaatggggaagtcgatgctggtgcttctcaccttcttggccttcgcctcgtgctgcattgctgcttaccgccccagtgagaccctgtgcggcggggagctggtggacaccctccagttcgtctgtggggaccgcggcttctacttcagcaggcccgcaagccgtgtgagccgtcgcagccgtggcatcgttgaggagtgctgtttccgcagctgtgacctggccctcctggagacgtactgtgctacccccgccaagtccgagagggacgtgtcgacccctccgaccgtgcttccggacaacttccccagataccccgtgggcaagttcttccaatatgacacctggaagcagtccacccagcgcctgcgcaggggcctgcctgccctcctgcgtgcccgccggggtcacgtgctcgccaaggagctcgaggcgttcagggaggccaaacgtcaccgtcccctgattgctctacccacccaagaccccgcccacgggggcgcccccccagagatggccagcaatcggaagtgagcaaaactgccgcaagtctgcagcccggcgccaccatcctgcagcctcctcctgaccacggacgtttccatcaggttccatcccgaaaatctctcggttccacgtccccctggggcttctcctgacccagtccccgtgccccgcctccccgaaacaggctactctcctcggccccctccatcgggctgaggaagcacagcagcatcttcaaacatgtacaaaatcgattggctttaaacacccttcacataccctcccccc

SEQ ID NO: 3121 - protein, 180 aa, Homo sapiens
MGIPMGKSMLVLLTFLAFASCCIAAYRPSETLCGGELVDTLQFVCGDRGFYFSRPASRVSRRSRGIVEECCFRSCDLALLETYCATPAKSERDVSTPPTVLPDNFPRYPVGKFFQYDTWKQSTQRLRRGLPALLRARRGHVLAKELEAFREAKRHRPLIALPTQDPAHGGAPPEMASNRK

SEQ ID NO: 3122 - DNA, 491 bp, Homo sapiens
catacatgaacacagctcacagcacacaaacacgcagcccgactagcagtctagaggcctgaggcttctgggtcctggtgacggggctggcatgaccccgggggtcgtccatgccagtccgcctcagtcgcagagggtccctcggcaagcgccctgtgagtgggccattcggaacattggacagaagcccaaagagccaaattgtcacaattgtggaacccacattggcctgagatccaaaacgcttcgaggcaccccaaattacctgcccattcgtcaggacacccacccacccagtgttatattctgcctcgccggagtgggtgttcccgggggcacttgccgaccagccccttgcgtccccaggtttgcagctctcccctgggccactaaccatcctggcccgggctgcctgtctgacctccgtgcctagtcgtggctctccatcttgtctcctccccgtgtccccaatgtcttcagtggggggcccc

SEQ ID NO: 3123 - protein, 113 aa, Homo sapiens
MTPGVVHASPPQSQRVPRQAPCEWAIRNIGQKPKEPNCHNCGTHIGLRSKTLRGTPNYLPIRQDTHPPSVIFCLAGVGVPGGTCRPAPCVPRFAALPWATNHPGPGCLSDLRA

SEQ ID NO: 3124 - DNA, 1060 bp, Homo sapiens
ccaaattaaaccccccccccatgtaacaggggggcagtgacaaaagcaagaacgcacgaagccagcctggagaccaccacgtcctgccccccgccatttatcgccctgattggattttgtttttcatctgtccctgttgcttgggttgagttgagggtggagcctcctggggggcactggccactgagcccccttggagaagtcagaggggagtggagaaggccactgtccggcctggcttctggggacagtggctggtccccagaagtcctgagggcggaggggggggttgggcagggtctcctcaggtgtcaggagggtgctcggaggccacaggagggggctcctggctggcctgaggctggccggaggggaaggggctagcaggtgtgtaaacagagggttccatcaggctggggcagggtggccgccttccgcacacttgaggaacggcgggtctgagcccacagagcaggagagctgccaggtctgcccatcgaccaggttgcttgggccccggagcccacgggtctggtgatgccatagcagccaccaccgcggcgcctagggctgcggcagggactcggcctctgggaggtttacctcgcccccacttgtgcccccagctcagcccccctgcacgcagcccgactagcagtctagaggcctgaggcttctgggtcctggtgacggggctggcatgaccccgggggtcgtccatgccagtccgcctcagtcgcagagggtccctcggcaagcgccctgtgagtgggccattcggaacattggacagaagcccaaagagccaaattgtcacaattgtggaacccacattggcctgagcccacccagtgttatattctgcctcgccggagtgggtgttcccgggggcacttgccgaccagccccttgcgtccccaggtttgcagctctcccctgggccactaaccatcctggcccgggctgcctgtctgacctccgtgcctagtcgtggctctccatcttgtctcctccccgtgtccccaatgtcttcagtggggggccccctcttgggtcccct

SEQ ID NO: 3125 - DNA, 712 bp, Homo sapiens
caggagggtgctcggaggccacaggagggggctcctggctggcctgaggctggccggaggggaaggggctagcaggtgtgtaaacagagggttccatcgaccaggttgcttgggccccggagcccacgggtctggtgatgccatagcagccaccaccgcggcgcctagggctgcggcagggactcggcctctgggaggtttacctcgcccccacttgtgcccccagctcagcccccctgcacgcagcccgactagcagtctagaggcctgaggcttctgggtcctggtgacggggctggcatgaccccgggggtcgtccatgccagtccgcctcagtcgcagagggtccctcggcaagcgccctgtgagtgggccattcggaacattggacagaagcccaaagagccaaattgtcacaattgtggaacccacattggcctgagatccaaaacgcttcgaggcaccccaaattacctgcccattcgtcaggacacccacccacccagtgttatattctgcctcgccggagtgggtgttcccgggggcacttgccgaccagccccttgcgtccccaggtttgcagctctcccctgggccactaaccatcctggcccgggctgcctgtctgacctccgtgcctagtcgtggctctccatcttgtctcctccccgtgtccccaatgtcttcagtggggggccccctcttgggtccc

SEQ ID NO: 3126 - protein, 113 aa, Homo sapiens; identical to SEQ ID NO: 3123

SEQ ID NO: 3127 - DNA, 1921 bp, Homo sapiens
agtgccttagattccagcgagctacgcaagcaatcctggcccagccgagcttgcttccccaaatcccgtaatccttgaccttattcccccaaagaagcggcctcccgggaaggagcgccctggcggagaagactcgaacggctcccacagccgggcgttgggggaaaggcatgaagaactcttgactgacagaaacggagggtgtgtccaaagttttgaggacggccgagcggcgctccaaaacccgtcctcacagcctcgccccgttcgcctcagctacaacaaatcatcgtcaacctgttccaccttctccagtctggtagcaaaaaggggtgtctcaggccactcttcacctccaccatgagcctggacatccagagcctggacatccagtgtgaggagctgagcgacgctagatgggccgagctcctccctctgctccagcagtgccaagtggtcaggctggacgactgtggcctcacggaagcacggtgcaaggacatcagctctgcacttcgagtcaaccctgcactggcagagctcaacctgcgcagcaacgagctgggcgatgtcggcgtgcattgcgtgctccagggcctgcagaccccctcctgcaagatccagaagctgagcctccagaactgctgcctgacgggggccggctgcggggtcctgtccagcacactacgcaccctgcccaccctgcaggagctgcacctcagcgacaacctcttgggggatgcgggcctgcagctgctctgcgaaggactcctggacccccagtgccgcctggaaaagctgcagctggagtattgcagcctctcggctgccagctgcgagcccctggcctccgtgctcagggccaagccggacttcaaggagctcacggttagcaacaacgacatcaatgaggctggcgtccgtgtgctgtgccagggcctgaaggactccccctgccagctggaggcgctcaagctggagagctgcggtgtgacatcagacaactgccgggacctgtgcggcattgtggcctccaaggcctcgctgcgggagctggccctgggcagcaacaagctgggtgatgtgggcatggcggagctgtgcccagggctgctccaccccagctccaggctcaggaccctgtggatctgggagtgtggcatcactgccaagggctgcggggatctgtgccgtgtcctcagggccaaggagagcctgaaggagctcagcctggccggcaacgagctgggggatgagggtgcccgactgctgtgtgagaccctgctggaacctggctgccagctggagtcgctgtgggtgaagtcctgcagcttcacagccgcctgctgctcccacttcagctcagtgctggcccagaacaggtttctcctggagctacagataagcaacaacaggctggaggatgcgggcgtgcgggagctgtgccagggcctgggccagcctggctctgtgctgcgggtgctctggttggccgactgcgatgtgagtgacagcagctgcagcagcctcgccgcaaccctgttggccaaccacagcctgcgtgagctggacctcagcaacaactgcctgggggacgccggcatcctgcagctggtggagagcgtccggcagccgggctgcctcctggagcagctggtcctgtacgacatttactggtctgaggagatggaggaccggctgcaggccctggagaaggacaagccatccctgagggtcatctcctgaggctcttcctgctgctgctctccctggacgaccggcctcgaggcaaccctggggcccaccagcccctgccatgctctcaccctgcatatcctaggtttgaagagaaacgctcagatccgcttatttctgccagtatattttggacactttataatcattaaagcactttcttggc

SEQ ID NO: 3128 - protein, 461 aa, Homo sapiens [sequence omitted]

SEQ ID NO: 3129 - DNA, 2337 bp, Homo sapiens
caccccacccacccctccccgcattgtggcatcagtgctgctgcttccagggagccttcctggccatccaagcctcctctccaggttcctgccctgctgtagtccccaggccagtgcttggcaggtgctcagggaatgtatccaccaaccaaggtttggggtggctgtctctgcctgaccactttccccaggcccctggcgggtacctgagctgtgctctcagggcctcaggaacctccttccatattcagggcctgtgcctggggaggcttcagggtgtagcagctgtgcccatcccaggctgacccacccagcttgcctggtagcccagcctctgggctagtgtgccgtggggcaggggatgtgctgtagcctggtgcagagtccccaaccccagaagggggccatggaagctgacaccccaagtggccgcccccctgctctgtcttgcttcggacactgtggccgggtccaggatcctggcatcctgggaggtctctggctttgtgggcagcctgcctggcccgcacagtctgcctgtcctgagggtgagacacaggtcaagcccacagacccccttgctcccctgctggggcctccaggctcacagaccaccccaccctaccctgtccttgcccaagcaaatgagaggcaggggcttcccgggctgctgctgtcccgccctctgtggggcaggaggaggtgcccacagaggctgggtggtgatagccaggagatgggctggcatctgcattacccaagctctgctgcccatggtggcctttctgggggtgggtgatggtccctgccccctgccccacccgtgatgtctgctccagagacaaaggtggggagggtgctgaagaggaagtgtttgcccagggagaggctgcggctcctcctgaaacatcagccctgtgggtcctgtttgcagaatctccggcctgtgaaactgtgaggggattcggccaagacgtcctcttccctctgcctcccacccaggccactcttcacctccaccatgagcctggacatccagagcctggacatccagtgtgaggagctgagcgacgctagatgggccgagctcctccctctgctccagcagtgccaagtggtcaggtacgcttgctctcggggtggccttggggtgctggtggggcaggctggcgggtggcggctccctctgaagggtgcattgctctggaacgccttgtttgtggacatgaagtatgaattctgtgcagctaccacgtgcatgagatgtgattcttgtgtttctttttgacaatttaggaatgtaaaacccattccaggctcatgcagcatgggctgaggtgggcgggccgaggtgggcggccactggccagtgggtctctggctccggtgtctcagctcctctccctcccttggagacacgagggcaggacacagcttgggtcccctccgtgagcctccatggggcgctgcttgtccctgccaagctgggggctgggagtcctcggccctcgaggtcctcacaaacccagcagcttcacaagcaggacacgagtgcctgggtgggccgcatcttttctctttttacctggtgatttcaagtagtgtcaggtttgcggaggagttacgaggaccggacggggctccctggtgaggtggtcctgtgtacctgcggacgctagctctggcccagcacctccaggcagggtctgcttttccgccctgcccttttcgtcttcctcactggtccaggattgcgtggccctcagccctctgtctccttagccctctcccgtctgtgactgtcccctcgtctctctgggttcttggtggtctgagggtctggccaggctcctgcaggacgtcctctgttggggcttgtctggtggtttcttgtggttgaagtcctacagttttggcaggaatgcagggagatgccgtggggcctgccaggagcgtcctgtcacaggcgccgtctgccaccctctccactgtgacgccactgcctttcctcctgtgactgatcagtgccttcgagagatactttaaattctttttatttttagagacagggcattgctctgtcacccaggctggagtggctccctcatggcttatgcggcctcaacctcctgggctcaagtgatcctcctgcctcagcctcccgagtagctgggattatgggcatgcgccaccacgcccggctacttttgtatttttagtaaagacggggtttctccatgttggtcaggttggtcttgaactcccgacctcaggtgatctgcctgcctcggcctcccaaagtgctgggattacaggcgtgagccaccgcgcctggcc

SEQ ID NO: 3130 - protein, 263 aa, Homo sapiens
MSLDIQSLHIQCDDLTDARWAELLLLLHNCQVDRLDDCGLTEARCKDISSALRVNPALAELNLRSNELGDVGVHCVLQGLQTPSCKIQKLSLQNCCLTGAGCGVLSSTLRTLPTLQELHLSDNLLGDAGLQLLCEGLLDPQCRLEKLQLEYCSLSAASCEPLASVLRAKPDFKELTVSNNDINEAGVRVLCQGLKDSPCQLEALKLESCGVTSDNCRDLCGIVASKASLRELALGSNKLACTTFTGLRRWRTGCRPWRRTSHP

SEQ ID NO: 3131 - DNA, 4243 bp, Homo sapiens
agagtgaagccaccactcgctctcgaatcgcgcggacgctgggcctgcgcaggcctgttcacagcagctgcatcccgtcagtgttgaagccagtggagccctctttggggctgctgagagcggatattggagctgcctctctgtctctgtttggagatccttatgagctggatcccttcgacagcagtgaagagctttctgcaaaccctctttcccctctgagtgccaagagacgggctctgtcccggtcagccctgcagtcccaccagcccgtggccaggcccgtctccgtggggctttccaggaggcgcctccctgccgcggtgccagagccagacttggaggaggagccagtgcctgacctgctgggcagcatcctgtcgggccagagcctcctgatgctgggcagcagtgatgtcatcatccaccgcgacggctccctcagcgccaagagggcggctccagtttcttttcagcgaaactcaggcagtctgtccagaggggaagaaggattcaagggctgcctgcagccccgagcactgccctccgggagcccggcccaaggcccgtcaggaaacaggccacagagcacagggctcagctgtcaaggcaggtcccgcacccccgcccgcaccgcgggggcgcctgtgaggctggacttgccagcagcccctggggcggttcaggctcggaacttgtcaaatgggagtgtgcctggcttcagacagagccacagcccctggttcaacggcaccaacaagcacaccttgccccttgcctctgccgcgtctaagatctcaagcagagattctaagcccccatgtcgcagtgtggtgccggggcctcccctgaagccagcgcccagaagaacagacatctctgagctacccaggataccaaagatcaggagagatgacggtggtggcagacgggatgcggccccggcccacgggcagagcattgagatccccagtgcctgcatcagccgactgactggcagggagggcaccgggcagccagggcgaggcacacgggcagagagcgaggccagcagcagggtgccccgggagcccggggtgcacacgggcagctcccggcccccagcccccagctcccatggcagtttggccccactgggaccatcaagagggaaaggggtcgggtcgacctttgagagcttccggatcaatattcctggaaacatggcacattccagccagctctccagccctggcttctgtaacacgttccggcctgtggacgataaggagcagaggaaggagaacccctcacccctcttctccatcaagaagacgaagcagctgcggagcgaggtctacgacccatccgaccccaccggctccgactccagcgcccctggcagcagccccgagaggtctggccccggcctcctgccctctgagatcacacgaaccatctccatcaacagcccgaaggcccagacggtgcaggctgtgcgctgcgtcacctcctacacggtggagagcatctttggtacagagcccgaaccccctctcggaccgtcctccgccatgtccaagctccggggtgcagtggctgccgagggggcctctgacacggagcgagaggagcccacagagagccagggcctggctgcccggctgcggaggccatcccccccagagccctgggatgaggaggatggggcgtcttgcagcaccttctttggctctgaggagcggacggtgacctgtgtgactgtcgtggagccggaagccccacccagcccggacgtgctgcaggctgccacccacagagtcgtggagctcaggcccccttcccggtcccgctccacatccagctcccgcagcaggaagaaggccaagaggaagagggtgtccagggagcacggacggacgcgctctgggacgcgctctgaatccagggacaggagctcgaggtcagcgtcaccatcagtgggtgaggagcgccccaggaggcagcggtccaaggccaagagccggcggtcctccagtgaccgctccagcagccgagagcgagctaagaggaagaaagccaaggacaagagcagggagcacaggcggggcccctggggccacagccggaggacgtcccggtcgcggtcggggagccctggcagctcttcctatgagcactatgagagtaggaagaagaagaaaaggagatcagcgtccagacctcggggaagggagtgctcccccaccagcagcctggagaggctctgcaggcacaagcatcagcgggaacgcagccacgagcggccagacaggaaggagagtgtggcgtggccccgagaccggaggaagcggaggtcccggtccccaagctcggagcacagggcacgggagcacaggcggcctcggtcccgtgagaagtggccgcagacccggtcccattccccagagaggaagggggctgtgagggaggcttccccagcgccccttgcacagggggagccagggcgggaagacctccccaccaggttgccagccttgggggaagcacatgtctcgccggaggtggctacggccgacaaggcccccctgcaggctccccctgtcctggaggtggcagctgagtgtgagccggacgacctggacctggattatggcgactccgtggaggccggacacgtctttgatgatttctcaagcgacgccgttttcatccagctcgatgacatgagctcgccaccttctcccgaaagcacagactcttccccggagcgagacttcccactgaagcctgcgttgcccccagccagcctggccgtggccgccatccagagggaggtgtcattgatgcacgatgaagacccttcgcagcccccacccctgccagagggcacccaggagccacatttgctcaggccggacgcggctgagaaggctgaggcacccagttccccggatgtggcgcctgcggggaaggaagacagcccctctgcgagtgggagggtacaggaggcagcccggcctgaggaggtggtttcgcagacccccctgctgcggtccagagccctggtgaagcgggtcacctggaacctgcaggagtcggagagcagcgcccccgccgaggacagagccccccgggcaccacttcacaggccacagaagccccgagaaggagcctgggacatggaggatgtggcccccacaggggtcaggcaggtgttctccgagctgccctttcccagtcacgtgcttccggaacccgggttcccagacacagacccctctcaggtttacagccccggcctgccgcctgccccggcccagccctcaagcatcccaccctgcgcactggtcagccagcccacggtccagttcatccttcaggggagcctgccgctagtgggctgtggggcagcacagaccctggccccagtgcccgctgccctgaccccagcctcagagccagccagtcaagccactgcagccagcaactcggaggagaagaccccggcccccaggctagctgcggagaaaaccaagaaggaggagtacatgaagaagctgcacatgcaggagcgtgctgtggaggaggtgaagctggccatcaagcccttctaccagaagagggaggtgaccaaggaggagtacaaggacatcctgcgcaaggccgtgcagaagatctgccacagcaagagtggagagatcaaccccgtgaaggtggccaacctggtgaaggcgtacgtggacaagtacaggcacatgcgcaggcacaagaaaccagaggccggggaggagccgcccacgcagggggccgagggctgaggccaggcaatcacgggctatgcccggggagctgtcgggagtggcgggaatcggggccatgcccggggagctgtcgggagtggcgggaatcggggccatgcccggggagctgtcgggagtggcgggaaatggggggcatcaccatgcctgccgtcgggttcctgcgctgacacctggtctgtgcacctgtgttgctcacagttgaaaactggacacttttgtatgtatattatagagacactgtttccattctaatttatcaaaaatggattatctttagaaacctcttgattgacttactacttggaagataaagcacttggtgatcaagaggggctcctggtggggtggcgcgtccttgataaatctctaggtggcctcccgccaacagctgctgtgtacctttggctctgaattaggaatatctttactttctcttttcc

SEQ ID NO: 3132 - protein, 1650 aa, Homo sapiens
MDDDSLDELVARSPGPDGHPQVGPADPAGDFEESSVGSSGDSGDDSDSEHGDGTDGEDEGASEEEDLEDRSGSEDSEDDGETLLEVAGTQGKLEAAGSFNSDDDAESCPICLNAFRDQAVGTPENCAHYFCLDCIVEWSKNANSCPVDRTLFKCICIRAQFGGKILRKIPVENTKASEEEEDPTFCEVCGRSDREDRLLLCDGCDAGYHMECLDPPLQEVPVDEWFCPECAAPGVVLAADAGPVSEEEVSLLLADVVPTTSRLRPRAGRTRAIARTRQSERVRATVNRNRISTARRVQHTPGRLGSSLLDEAIEAVATGLSTAVYQRPLTPRTPARRKRKTRRRKKVPGRKKTPSGPSAKSKSSATRSKKRQHRVKKRRGKKVKSEATTRSRIARTLGLRRPVHSSCIPSVLKPVEPSLGLLRADIGAASLSLFGDPYELDPFDSSEELSANPLSPLSAKRRALSRSALQSHQPVARPVSVGLSRRRLPAAVPEPDLEEEPVPDLLGSILSGQSLLMLGSSDVIIHRDGSLSAKRAAPVSFQRNSGSLSRGEEGFKGCLQPRALPSGSPAQGPSGNRPQSTGLSCQGRSRTPARTAGAPVRLDLPAAPGAVQARNLSNGSVPGFRQSHSPWFNGTNKHTLPLASAASKISSRDSKPPCRSVVPGPPLKPAPRRTDISELPRIPKIRRDDGGGRRDAAPAHGQSIEIPSACISRLTGREGTGQPGRGTRAESEASSRVPREPGVHTGSSRPPAPSSHGSLAPLGPSRGKGVGSTFESFRINIPGNMAHSSQLSSPGFCNTFRPVDDKEQRKENPSPLFSIKKTKQLRSEVYDPSDPTGSDSSAPGSSPERSGPGLLPSEITRTISIKQPEGPDGAGCALRHAPTLVESIFGTEPEPPLGPSSAMSKLRGAVAAEGASDTEREEPTESQGLAARLRRPSPPEPWDEEDGASCSTFFGSEERTVTCVTVVEPEAPPSPDVLQAATHRVVELRPPSRSRSTSSSRSRKKAKRKRVSREHGRTRSGTRSESRDRSSRSASPSVGEERPRRQRSKAKSRRSSSDRSSSRERAKRKKAKDKSREHRRGPWGHSRRTSRSRSGSPGSSSYEHYESRKKKKRRSASRPRGRECSPTSSLERLCRHKHQRERSHERPDRKESVAWPRDRRKRRSRSPSSEHRAREHRRPRSREKWPQTRSHSPERKGAVREASPAPLAQGEPGREDLPTRLPALGEAHVSPEVATADKAPLQAPPVLEVAAECEPDDLDLDYGDSVEAGHVFDDFSSDAVFIQLDDMSSPPSPESTDSSPERDFPLKPALPPASLAVAAIQREVSLMHDEDPSQPPPLPEGTQEPHLLRPDAAEKAEAPSSPDVAPAGKEDSPSASGRVQEAARPEEVVSQTPLLRSRALVKRVTWNLQESESSAPAEDRAPRAPLHRPQKPREGAWDMEDVAPTGVRQAFSELPFPSHVLPEPGFPDTDPSQVYSPGLPPAPAQPSSIPPCALVSQPTVQFILQGSLPLVGCGAAQTLAPVPAALTPASEPASQATAASNSEEKTPAPRLAAEKTKKEEYMKKLHMQERAVEEVKLAIKPFYQKREVTKEEYKDILRKAVQKICHSKSGEINPVKVANLVKAYVNKYRHMRRHKKPEAGEEPPTQGAEG

SEQ ID NO: 3133 - DNA, 2126 bp, Homo sapiens
ggcacgaggaagcgcacggcctcggcgaccctctccgacccggccgccgccgccatgcagccctccagccttctgccgctcgccctctgcctgctggctgcacccgcctccgcgctcgtcaggatcccgctgcacaagttcacgtccatccgccggaccatgtcggaggttgggggctctgtggaggacctgattgccaaaggccccgtctcaaagtactcccaggcggtgccagccgtgaccgaggggcccattcccgaggtgctcaagaactacatggacgcccagtactacggggagattggcatcgggacgcccccccagtgcttcacagtcgtcttcgacacgggctcctccaacctgtgggtcccctccatccactgcaaactgctggacatcgcttgctggatccaccacaagtacaacagcgacaagtccagcacctacgtgaagaatggtacctcgtttgacatccactatggctcgggcagcctctccgggtacctgagccaggacactgtgtcggtgccctgccagtcagcgtcgtcagcctctgccctgggcggtgtcaaagtggagaggcaggtctttggggaggccaccaagcagccaggcatcaccttcatcgcagccaagttcgatggcatcctgggcatggcctacccccgcatctccgtcaacaacgtgctgcccgtcttcgacaacctgatgcagcagaagctggtggaccagaacatcttctccttctacctgagcagggacccagatgcgcagcctgggggtgagctgatgctgggtggcacagactccaagtattacaagggttctctgtcctacctgaatgtcacccgcaaggcctactggcaggtccacctggaccaggtggaggtggccagcgggctgaccctgtgcaaggagggctgtgaggccattgtggacacaggcacttccctcatggtgggcccggtggatgaggtgcgcgagctgcagaaggccatcggggccgtgccgctgattcagggcgagtacatgatcccctgtgagaaggtgtccaccctgcccgcgatcacactgaagctgggaggcaaaggctacaagctgtccccagaggactacacgctcaaggtgtcgcaggccgggaagaccctctgcctgagcggcttcatgggcatggacatcccgccacccagcgggccactctggatcctgggcgacgtcttcatcggccgctactacactgtgtttgaccgtgacaacaacagggtgggcttcgccgaggctgcccgcctctagttcccaaggcgtccgcgcgccagcacagaaacagaggagagtcccagagcaggaggcccctggcccagcggcccctcccacacacacccacacactcgcccgcccactgtcctgggcgccctggaagccggcggcccaagcccgacttgctgttttgttctgtggttttcccctccctgggttcagaaatgctgcctgcctgtctgtctctccatctgtttggtgggggtagagctgatccagagcacagatctgtttcgtgcattggaagaccccacccaagcttggcagccgagctcgtgtatcctggggctcccttcatctccagggagtcccctccccggccctaccagcgcccgctgggctgagcccctaccccacaccaggccgtcctcccgggccctcccttggaaacctgccctgcctgagggcccctctgcccagcttgggcccagctgggctctgccaccctacctgttcagtgtcccgggcccgttgaggatgaggccgctagaggcctgaggatgagctggaaggagtgagaggggacaaaacccaccttgttggagcctgcagggtggtgctgggactgagccagtcccaggggcatgtattggcctggaggtggggttgggattgggggctggtgccagccttcctctgcagctgacctctgttgtcctccccttgggcggctgagagccccagctgacatggaaatacagttgttggcctccggcctcccctcaaaaaaaaaaaaaaaaaaaaaaaaaaaaaaaaaaaaaaaaaaaaaaaaaaaaaaaaaaaaaaaaaaaaaaaaaaaaaaaaaaaaa

SEQ ID NO: 3134 - protein, 412 aa, Homo sapiens
MQPSSLLPLALCLLAAPASALVRIPLHKFTSIRRTMSEVGGSVEDLIAKGPVSKYSQAVPAVTEGPIPEVLKNYMDAQYYGEIGIGTPPQCFTVVFDTGSSNLWVPSIHCKLLDIACWIHHKYNSDKSSTYVKNGTSFDIHYGSGSLSGYLSQDTVSVPCQSASSASALGGVKVERQVFGEATKQPGITFIAAKFDGILGMAYPRISVNNVLPVFDNLMQQKLVDQNIFSFYLSRDPDAQPGGELMLGGTDSKYYKGSLSYLNVTRKAYWQVHLDQVEVASGLTLCKEGCEAIVDTGTSLMVGPVDEVRELQKAIGAVPLIQGEYMIPCEKVSTLPAITLKLGGKGYKLSPEDYTLKVSQAGKTLCLSGFMGMDIPPPSGPLWILGDVFIGRYYTVFDRDNNRVGFAEAARL

SEQ ID NO: 3135 - DNA, 1470 bp, Homo sapiens
gcgcgcaacggcggcgacggcggcgaccccaccgcacatcctgccaggcctccggcgcccagggcgcacggcgcgcccccgtgccggcggcccctgcgcccatttcttggcgcccccgcccggtcggcccgccaggcccctttgccggccaccagccaggccccgcgccggcccgcccgccgcccaggaccggcccgcgccccgcaggccgcccgccgcccgcgccgccatgggagtggagggctgcaccaagtgcatcaagtacctgctcttcgtcttcaatttcgtcttctggctggctggaggcgtgatcctgggtgtggccctgtggctccgccatgacccgcagaccaccaacctcctgtatctggagctgggagacaagcccgcgcccaacaccttctatgtaggcatctacatcctcatcgctgtgggcgctgtcatgatgttcgttggcttcctgggctgctacggggccatccaggaatcccagtgcctgctggggacgttcttcacctgcctggtcatcctgtttgcctgtgaggtggccgccggcatctggggctttgtcaacaaggaccagatcgccaaggatgtgaagcagttctatgaccaggccctacagcaggccgtggtggatgatgacgccaacaacgccaaggctgtggtgaagaccttccacgagacgcttgactgctgtggctccagcacactgactgctttgaccacctcagtgctcaagaacaatttgtgtccctcgggcagcaacatcatcagcaacctcttcaaggaggactgccaccagaagatcgatgacctcttctccgggaagctgtacctcatcggcattgctgccatcgtggtcgctgtgatcatgatcttcgagatgatcctgagcatggtgctgtgctgtggcatccggaacagctccgtgtactgaggccccgcagctctggccacagggacctctgcagtgccccctaagtgacccggacacttccgagggggccatcaccgcctgtgtatataacgtttccggtattactctgctacacgtagcctttttacttttggggttttgtttttgttctgaactttcctgttaccttttcagggctgacgtcacatgtaggtggcgtgtatgagtggagacgggcctgggtcttggggactggagggcaggggtccttctgccctggggtcccagggtgctctgcctgctcagccaggcctctcctgggagccactcgcccagagactcagcttggccaacttggggggctgtgtccacccagcccgcccgtcctgtgggctgcacagctcaccttgttccctcctgccccggttcgagagccgagtctgtgggcactctctgccttcatgcacctgtcctttctaacacgtcgccttcaactgtaatcacaacatcctgactccgtcatttaataaagaaggaacatcaggcatgct

SEQ ID NO: 3136 - DNA, 2510 bp, Homo sapiens
cttgctcgcggagagaggagctaggagcctcggccaatgggagccggcgttgttggaggccacggcggcgcagccccaaagcgagcgaagctagggtcgccgccactgccgcaggaggcgtgaggggataaaaacattcagatggcagatcacagtttttcagatggggttccttcagattccgtggaagctgctaaaaatgcaagtaacacagaaaagctcacagatcaggtgatgcagaatcctcgagttctggcagctttacaggagcgacttgacaatgtccctcacaccccttccagctacatcgaaactttacctaaagcagtaaaaagaagaattaatgcattgaaacaacttcaggtgagatgtgctcacatagaagccaagttctatgaagaggtacatgacttggaaagaaagtatgcagcgctataccagcctctctttgacaagagaagagaatttatcaccggcgatgttgaaccaacagatgcggaatcggaatggcacagtgaaaatgaagaggaagagaaattggctggagacatgaaaagtaaagtagtcgtcacagaaaaagcagcggcaacggctgaagagccagatcccaaaggaattccagagttctggtttaccatcttcagaaatgtggacatgctgagtgaattagtccaggaatatgatgaaccaatcttgaaacacctgcaggatattaaagtgaaattttctgaccctggacagcctatgtcttttgtgttagagttccactttgaacccaacgactactttaccaactcagtcctgacaaaaacctacaagatgaaatcagaaccagataaggctgatcccttttcctttgaaggtcctgagattgtggactgtgacgggtgtactattgactggaagaaaggaaagaatgttactgtcaaaaccatcaagaaaaagcagaagcataagggtcgaggcactgttagaacaattacgaaacaagtacccaatgagtcctttttcaacttcttcaatccattgaaagcatccggggatggagaatcactggatgaagattctgaattcacattagcctctgattttgaaattggacactttttccgtgagcggatagtcccgcgggctgtgctgtacttcactggggaggccatagaagatgatgacaattttgaagaaggtgaagaaggagaagaggaggaattagaaggtgacgaggagggagaagacgaggatgatgcggaaattaaccccaaggtgtaatttttgtctgttaatcattcatacgtttctagaaggaacccagccagccggcggaatgcaagcagcagtaggaagcggaggcgggtgcctggcagaccggctgtcgggactccaggcctgtgggcggggcctcggtccttgccgcagcacaatcccgtggacagagcttactccatctaactcgttttcaagtgcatgattttcactttcacttttcctttttccttattattttgcttaacttgtacagtggcaactgaaatgcatttcagaaataggaggtttcgtccagcaccctctgcagccttggtgcctgtagctctggacttccctgggcctttccctgtgggagggccctgtagaccacatcagggtggggtgggggtcacttggcaaaaagggccgaggtctggtgatgtggttcccaggatctggaacctctcccacccctcctgcagttggactgaattcttccctttcatccgaagaaacccacttgctgtttccagccgctgaatctgctgagtgtgcagcctgcatcacctgctgtatgccgatcatctcagaaagggctgtgtagagtagggccctgttctccttaggatgttgcttcttcatttttttttttttttaggggtgggtcagggttgtgacacaccagcccaggtgagagctgctgcgggtcacctcatatttatttatcccttcttgcctgtgaggactgcggcttttcgctgtggctcgtccttaacgtttctgaaccaccttggtgccctgagcaggaagatgtgccacttcctagcaggcgcaaggcctgtgcggaagaaacgccgctccctgccaccagggctgaagatgcgagcccgtcctcatgacgcaggcgccaccctgctgccggagccgggcttcggcagtcttctccactgagggactgggctgggaagtcctgcgtttcagtggagcgtatgagcgtcaagtcctgctttctcagtagccccattgcggggccccaccattcatcctgtctgaaggtcctgggtttggtgtgaccgcttggcggctggtgggtggggttttcaagtgggtgacggcgctctccggcagccggggatggccgtgtccgcactgaccaggcctgtggagagtgctcggcctaaccttagaacacatttgtaactgaatacagtgttttcaatttgtacagaatagttagaatattctattaaagtggtgaaacattg

SEQ ID NO: 3137 - DNA, 2524 bp, Homo sapiens
ccggggcggcggttgcatcagattctaggaagtgtctgtagccgcagctgcgggtccgggattcccagccatggcagattcctccgggcagcagggcaaaggccggcgtgtgcagccccagtggtcccctcctgctgggacccagccatgcagactccacctttacaacagcctcaccaggaacaaggaagtgttcatacctcaagatgggaaaaaggtgacgtggtattgctgtgggccaaccgtctatgacgcatctcacatggggcacgccaggtcctacatctcttttgatatcttgagaagagtgttgaaggattacttcaaatttgatgtcttttattgcatgaacattacggatattgatgacaagatcatcaagagggcccggcagaaccacctgttcgagcagtatcgggagaagaggcctgaagcggcacagctcttggaggatgttcaggccgccctgaagccattttcagtaaaattaaatgagaccacggatcccgataaaaagcagatgctcgaacggattcagcacgcagtgcagcttgccacagagccacttgagaaagctgtgcagtccagactcacgggagaggaagtcaacagctgtgtggaggtgttgctggaagaagccaaggatttgctctctgactggctggattctacacttggctgtgatgtcactgacaattccatcttctccaagctgcccaagttctgggagggggacttccacagagacatggaagctctgaatgttctccctccagatgtcttaacccgggttagtgagtatgtgccagaaattgtgaactttgtccagaagattgtggacaacggttacggctatgtctccaatgggtctgtctactttgatacagcgaagtttgcttctagcgagaagcactcctatgggaagctggtgcctgaggccgttggagatcagaaagcccttcaagaaggggaaggtgacctgagcatctctgcagaccgcctgagtgagaagcgctctcccaacgactttgccttatggaaggcctctaagcccggagaaccgtcctggccgtgcccttggggaaagggtcgtccgggctggcatatcgagtgctcggccatggcaggcaccctcctaggggcttcgatggacattcacggaggtgggttcgacctccggttcccccaccatgacaatgagctggcacagtcggaggcctactttgaaaacgactgctgggtcaggtacttcctgcacacaggccacctgaccattgcaggctgcaaaatgtcaaagtcactaaaaaacttcatcaccattaaagatgccttgaaaaagcactcagcacggcagttgcggctggccttcctcatgcactcgtggaaggacaccctggactactccagcaacaccatggagtcagcgcttcaatatgagaagttcttgaatgagtttttcttaaatgtgaaagatatccttcgcgctcctgttgacatcactggtcagtttgagaagtggggagaagaagaagcagaactgaataagaacttttatgacaagaagacagcaattcacaaagccctctgtgacaatgttgacacccgcaccgtcatggaagagatgcgggccttggtcagtcagtgcaacctctatatggcagcccggaaagccgtgaggaagaggcccaaccaggctctgctggagaacatcgccctgtacctcacccatatgctgaagatctttggggccgtagaagaggacagctccctgggattcccggtcggagggcctggaaccagcctcagtctcgaggccacagtcatgccctaccttcaggtgttatcagaattccgagaaggagtgcggaagattgcccgagagcaaaaagtccctgagattctgcagctcagcgatgccctgcgggacaacatcctgcctgagcttggggtgcggtttgaagaccacgaaggactgcccacagtggtgaaactggtagacagaaacaccttattaaaagagagagaagaaaagagacgggttgaagaggagaagaggaagaagaaagaggaggcggcccggaggaaacaggaacaagaagcagcaaagctggccaagatgaagattccccccagtgagatgttcttgtcagaaaccgacaaatactccaagtttgatgaaaatggtctgcccacacatgacatggagggcaaagagctcagcaaagggcaagccaagaagctgaagaagctcttcgaggctcaggagaagctctacaaggaatatctgcagatggcccagaatggaagcttccagtgagggggcacaggactgactttttaaaccattgtggactagtggctgctgtctgcctcagtgacaatgtcccagcgctcctatcatgtttacagtcacccttgggtcctaaattaagagttgtgttcatgtaggttcgtgtcgtcgttggctctgagacattgataataaatttttctcaacagtgaaaaaaaaaaaaaaaaaaaaaaa

SEQ ID NO: 3138 - protein, 748 aa, Homo sapiens
MADSSGQQGKGRRVQPQWSPPAGTQPCRLHLYNSLTRNKEVFIPQDGKKVTWYCCGPTVYDASHMGHARSYISFDILRRVLKDYFKFDVFYCMNITDIDDKIIKRARQNHLFEQYREKRPEAAQLLEDVQAALKPFSVKLNETTDPDKKQMLERIQHAVQLATEPLEKAVQSRLTGEEVNSCVEVLLEEAKDLLSDWLDSTLGCDVTDNSIFSKLPKFWEGDFHRDMEALNVLPPDVLTRVSEYVPEIVNFVQKIVDNGYGYVSNGSVYFDTAKFASSEKHSYGKLVPEAVGDQKALQEGEGDLSISADRLSEKRSPNDFALWKASKPGEPSWPCPWGKGRPGWHIECSAMAGTLLGASMDIHGGGFDLRFPHHDNELAQSEAYFENDCWVRYFLHTGHLTIAGCKMSKSLKNFITIKDALKKHSARQLRLAFLMHSWKDTLDYSSNTMESALQYEKFLNEFFLNVKDILRAPVDITGQFEKWGEEEAELNKNFYDKKTAIHKALCDNVDTRTVMEEMRALVSQCNLYMAARKAVRKRPNQALLENIALYLTHMLKIFGAVEEDSSLGFPVGGPGTSLSLEATVMPYLQVLSEFREGVRKIAREQKVPEILQLSDALRDNILPELGVRFEDHEGLPTVVKLVDRNTLLKEREEKRRVEEEKRKKKEEAARRKQEQEAAKLAKMKIPPSEMFLSETDKYSKFDENGLPTHDMEGKELSKGQAKKLKKLFEAQEKLYKEYLQMAQNGSFQ

SEQ ID NO: 3139 - DNA, 789 bp, Homo sapiens
atgtccatcagggtaacccagaagtcctacgaggtgtccacctctagccccccaggacttcagcagccgctcctacacgagtggacctggtgcctgcatcagctcctcaagcttttccccagtggtaccagcagcttccggggtagcctgggtggaggttatgacaaggtacggttcctggagcagcataacaagatgctggagaccaagtggagcctcctgcagcagcagaagacagctcggagcaacatggacaacatgttcgagagctacatcaacaaccttaggcggcaactggacactctgggccaggagaagctgaagcttggcaacatgcaagggctgatggagaactgcaagaacaagtatgaggatgagatcaataagtgtgcagagctggagaatgaatttgtcctcatcaagaaggatgtggatgaagctaacatgaacaaggtagagctggagtctctcctggaagggctgactgacgagatcaacttcctcaggcagctgtatgaagaggagatcccagagctgcagtcccagatttcggacacatctgtggtgctgtccatggacagcagccgctccctggacatggacaacactatcgctgaggtcaaggcgcagtacaaggtgatctccaaccgcagccgggcggaggctgagagcatgcaccagatcaactccttcagccacaccagctccaccagggccgtggttgtgaagaatatcgagacccacgaagggaagctggtgtccgagtcctctgacgtcctgcccaagtga

SEQ ID NO: 3140 - protein, 278 aa, Homo sapiens [sequence omitted]

SEQ ID NO: 3141 - DNA, 3057 bp, Homo sapiens
gggaaggggatttggattgttgcgcctctgctctgaagaaagtgctgtctggctccaactccagttctttcccctgagcagcgcctggaacctaacccttcccactctgtcaccttctcgatcccgccggcgctttagagccgcagtccagtcttggatccttcagagccttagccactagctgcgatgcatgtgatcaagcgagatggccgccaagaacgagtcatgtttgacaaaattacatctcgaatccagaagctttgttatggactcaatatggattttgttgatcctgctcagatcaccatgaaagtaatccaaggcttgtacagtggggtcaccacagtggaactagatactttggctgctgaaacagctgcaaccttgactactaagcaccctgactatgctatcctggcagccaggatcgctgtctctaacttgcacaaagaaacaaagaaagtgttcagtgatgtgatggaagacctctataactacataaatccacataatggcaaacactctcccatggtggccaagtcaacattggatattgttctggccaataaagatcgcctgaattctgctattatctatgaccgagatttctcttacaattacttcggctttaagacgctagagcggtcttatttgttgaagatcaatggaaaagtggctgaaagaccacaacatatgttgatgagagtatctgttgggatccacaaagaagacattgatgcagcaattgaaacatataatcttctttctgagaggtggtttactcatgcttcgcccactctcttcaatgctggtaccaaccgcccacaactttctagctgttttcttctgagtatgaaagatgacagcattgaaggcatttatgacactctaaagcaatgtgcattgatttctaagtctgctggaggaattggtgttgctgtgagttgtattcgggctactggcagctacattgctgggactaatggcaattccaatggccttgtaccgatgctgagagtatataacaacacagctcgatatgtggatcaaggtgggaacaagcgtcctggggcatttgctatttacctggagccttggcatttagacatctttgaattccttgatttaaagaagaacacaggaaaggaagagcagcgtgccagagatcttttctttgctctttggattccggatctcttcatgaaacgagtggagactaatcaggactggtctttgatgtgtccaaatgagtgtcctggtctggatgaggtttggggagaggaatttgagaaactatatgcaagttatgagaaacaaggtcgtgtccgcaaagttgtaaaagctcagcagctttggtatgccatcattgagtctcagacggaaacaggcaccccgtatatgctctacaaagattcctgtaatcgaaagagcaaccagcagaacctgggaaccatcaaatgcagcaacctgtgcacagaaatagtggagtacaccagcaaagatgaggttgctgtttgtaatttggcttccctggccctgaatatgtatgtcacatcagaacacacatacgactttaagaagttggctgaagtcactaaagtcgttgtccgaaacttgaataaaattattgatataaactactatcctgtaccagaggcatgcctatcaaataaacgccatcgccccattggaattggggtacaaggtctggcagatgcttttatcctgatgagatacccttttgagagtgcagaagcccagttactgaataagcagatctttgaaactatttattatggtgctctggaagccagctgtgaccttgccaaggagcagggcccatacgaaacctatgagggctctccagttagcaaaggaattcttcagtatgatatgtggaatgttactcctacagacctatgggactggaaggttctcaaggagaagattgcaaagtatggtataagaaacagtttacttattgccccgatgcctacagcttccactgctcagatcctggggaataatgagtccattgaaccttacaccagcaacatctatactcgcagagtcttgtcaggagaatttcagattgtaaatcctcacttattgaaagatcttaccgagcggggcctatggcatgaagagatgaaaaaccagattattgcatgcaatggctctattcagagcataccagaaattcctgatgacctgaagcaactttataaaactgtgtgggaaatctctcagaaaactgttctcaagatggcagctgagagaggtgctttcattgatcaaagccaatctttgaacatccacattgctgagcctaactatggcaaactcactagtatgcacttctacggctggaagcagggtttgaagactgggatgtattatttaaggacaagaccagcggctaatccaatccagttcactctaaataaggagaagctaaaagataaagaaaaggtatcaaaagaggaagaagagaaggagaggaacacagcagccatggtgtgctctttggagaatagagatgaatgtctgatgtgtggatcctgaggaaagacttggaagagaccagcatgtcttcagtagccaaactacttcttgagcatagataggtatagtgggtttgcttgaggtggtaaggctttgctggaccctgttgcaggcaaaaggagtaattgatttaaagtactgttaatgatgataatgattttttttttaaactcatatattgggattttcaccaaaataatgcttttgaaaaaaagaaaaaaaaaacggatatattgagaatcaaagtagaagttttaggaatgcaaaataagtcatcttgcatacagggagtggttaagtaaggtttcatcacccctttagcactgcttttctgaagacttcagttttgttaaggagatttagttttactgctttgactggtgggtctctagaagcaaaactgagtgataactcatgagaagtactgataggacctttatctggatatggtcctataggttattctgaaataaagataaacatttctaagtg

SEQ ID NO: 3142 - DNA, 584 bp, Homo sapiens
acactcgcttctggaacgtctgagattatcaataagctcctagtccagacgccatgggtcatttcacagaggaggacaaggctactatcacaagcctgtggggcaaggtgaatgtggaagatgctggaggagaaaccctgggaaggctcctggttgtctacccatggacccagaggttctttgacagctttggcaacctgtcctctgcctctgccatcatgggcaaccccaaagtcaaggcacatggcaagaaggtgctgacttccttgggagatgccataaagcacctggatgatctcaagggcacctttgcccagctgagtgaactgcactgtgacaagctgcatgtggatcctgagaacttcaagctcctgggaaatgtgctggtgaccgttttggcaatccatttcggcaaagaattcacccctgaggtgcaggcttcctggcagaagatggtgactgcagtggccagtgccctgtcctccagataccactgagcctcttgcccatgattcagagctttcaaggataggctttattctgcaagcaatacaaataataaatctattctgctgagagatcac

SEQ ID NO: 3143 - protein, 147 aa, Homo sapiens
MGHFTEEDKATITSLWGKVNVEDAGGETLGRLLVVYPWTQRFFDSFGNLSSASAIMGNPKVKAHGKKVLTSLGDAIKHLDDLKGTFAQLSELHCDKLHVDPENFKLLGNVLVTVLAIHFGKEFTPEVQASWQKMVTAVASALSSRYH

SEQ ID NO: 3144 - DNA, 584 bp, Homo sapiens
acactcgcttctggaacgtctgaggttatcaataagctcctagtccagacgccatgggtcatttcacagaggaggacaaggctactatcacaagcctgtggggcaaggtgaatgtggaagatgctggaggagaaaccctgggaaggctcctggttgtctacccatggacccagaggttctttgacagctttggcaacctgtcctctgcctctgccatcatgggcaaccccaaagtcaaggcacatggcaagaaggtgctgacttccttgggagatgccataaagcacctggatgatctcaagggcacctttgcccagctgagtgaactgcactgtgacaagctgcatgtggatcctgagaacttcaagctcctgggaaatgtgctggtgaccgttttggcaatccatttcggcaaagaattcacccctgaggtgcaggcttcctggcagaagatggtgactggagtggccagtgccctgtcctccagataccactgagctcactgcccatgatgcagagctttcaaggataggctttattctgcaagcaatacaaataataaatctattctgctaagagatcac

SEQ ID NO: 3145 - protein, 147 aa, Homo sapiens
MGHFTEEDKATITSLWGKVNVEDAGGETLGRLLVVYPWTQRFFDSFGNLSSASAIMGNPKVKAHGKKVLTSLGDAIKHLDDLKGTFAQLSELHCDKLHVDPENFKLLGNVLVTVLAIHFGKEFTPEVQASWQKMVTGVASALSSRYH

SEQ ID NO: 3146 - DNA, 815 bp, Homo sapiens
caacaaaaaagagcctcaggatccagcacacattatcacaaacttagtgtccatccatcactgctgaccctctccggacctgactccacccctgaggacacaggtcagccttgaccaatgacttttaagtaccatggagaacagggggccagaacttcggcagtaaagaataaaaggccagacagagaggcagcagcacatatctgcttccgacacagctgcaatcactagcaagctctcaggcctggcatcatggtgcattttactgctgaggagaaggctgccgtcactagcctgtggagcaagatgaatgtggaagaggctggaggtgaagccttgggcagactcctcgttgtttacccctggacccagagattttttgacagctttggaaacctgtcgtctccctctgccatcctgggcaaccccaaggtcaaggcccatggcaagaaggtgctgacttcctttggagatgctattaaaaacatggacaacctcaagcccgcctttgctaagctgagtgagctgcactgtgacaagctgcatgtggatcctgagaacttcaagctcctgggtaacgtgatggtgattattctggctactcactttggcaaggagttcacccctgaagtgcaggctgcctggcagaagctggtgtctgctgtcgccattgccctggcccataagtaccactgagttctcttccagtttgcaggtcttcctgtgaccctgacaccctccttctgcacatggggactgggcttggccttgagagaaagccttctgtttaataaagtacattttcttcagtaatc

SEQ ID NO: 3147 - protein, 147 aa, Homo sapiens
MVHFTAEEKAAVTSLWSKMNVEEAGGEALGRLLVVYPWTQRFFDSFGNLSSPSAILGNPKVKAHGKKVLTSFGDAIKNMDNLKPAFAKLSELHCDKLHVDPENFKLLGNVMVIILATHFGKEFTPEVQAAWQKLVSAVAIALAHKYH

SEQ ID NO: 3148 - DNA, 2807 bp, Homo sapiens
ctcttctcccctgattcaagactcctctgctttggactgaagcactgcaggagtttgtgaccaagaacttcaagagtcaagacagaaggaagccaagggagcagtgcaatggatttctcagtaaaggtagacatagagaaggaggtgacctgccccatctgcctggagctcctgacagaacctctgagcctagattgtggccacagcttctgccaagcctgcatcactgcaaagatcaaggagtcagtgatcatctcaagaggggaaagcagctgtcctgtgtgtcagaccagattccagcctgggaacctccgacctaatcggcatctggccaacatagttgagagagtcaaagaggtcaagatgagcccacaggaggggcagaagagagatgtctgtgagcaccacggaaaaaaactccagatcttctgtaaggaggatggaaaagtcatttgctgggtttgtgaactgtctcaggaacaccaaggtcaccaaacattccgcataaacgaggtggtcaaggaatgtcaggaaaagctgcaggtagccctgcagaggctgataaaggagaatcaagaggctgagaagctggaagatgacatcagacaagagagaaccgcctggaagatcgagagacagaagattctgaaagggttcaatgaaatgagagtcatcttggacaatgaggagcagagagagctgcaaaagctggaggaaggtgaggtgaatgtgctggataacctggcagcagctacagaccagctggtccagcagaggcaggatgccagcacgctcatctcagatctccagcggaggttgacgggatcgtcagtagagatgctgcaggatgtgattgacgtcatgaaaaggagtgaaagctggacattgaagaagccaaaatctgtttccaagaaactaaagagtgtattccgagtaccagatctgagtgggatgctgcaagttcttaaagagctgacagatgtccagtactactgggtggacgtgatgctgaatccaggcagtgccacttcgaatgttgctatttctgtggatcagagacaagtgaaaactgtacgcacctgcacatttaagaattcaaatccatgtgatttttctgcttttggtgtcttcggctgccaatatttctcttcggggaaatattactgggaagtagatgtgtctggaaagattgcctggatcctgggcgtacacagtaaaataagtagtctgaataaaaggaagagctctgggtttgcttttgatccaagtgtaaattattcaaaagtttactccagatatagacctcaatatggctactgggttataggattacagaatacatgtgaatataatgcttttgaggactcctcctcttctgatcccaaggttttgactctctttatggctgtgctccctgtcgtattggggttttcctagactatgaggcaggcattgtctcatttttcaatgtcacaaaccacggagcactcatctacaagttctctggatgtcgcttttctcgacctgcttatccgtatttcaatccttggaactgcctagtccccatgactgtgtgcccaccgagctcctgagtgttctcattcctttacccacttctgcatagtagcccttgtgctgagactcagattctgcacctgagttcatctctactgagaccatctcttcctttctttccccttcttttacttagaatgtctttgtattcatttgctagggcttccatagcaaagcatcatagattgctgatttaaactgtaattgtattgccgtactgtgggctggaaatcccaaatctagattccagcagagttggttctttctgaggtctgcaaggaagggctctgttccatgcctctctccttggcttgtagaaggcatcttgtccctatgactcttcacattgtctttatgtacatctctgtgcccaagttttccctttttattaagacaccagtcatactggctcagggcccaccgctaatgccttaatgaaatcattttaacattatattctctacaaagaccttatttccaaataagataatatttggaggtattgggaataaaaactccaacatataaatttgaggaaggcacgatttcactcataacaatcttaccctttcttgcaagagatgcttgtacataattttcctaataccttggtttcactagtagtaaacattattattttttttatatttgcaaaggaaacatatctaatccttcctatagaaagaacagtattgctgtaatgtccttttcttttcttcctcatttcctctgccccttaaaagattgaagaaagagaaacttgtcaactcatatccacgttatctagcaaagtacataagaatctatcactaagtaatgtatccttcagaatgtgttggtttaccagtgacaccccatattcatcacaaaattaaagcaagaagtccatagtaatttatttgctaatagtggatttttaatgctcagagtttctgaggtcaaattttatcttttcacttacaagctctatgatcttaaataatttacttaatgtattttggtgtattttcctcaaattaatattggtgttcaagactatatctaattcctctgatcactttgagaaacaaacttttattaaatgtaaggcacttttctatgaattttaaatataaaaataaatattgttctgattattactgaaaagatgtcagccatttcaatgtcttgggaaacaattttttgtttttgttctgttttctttttgcttcaataaaacaatagctggctct

SEQ ID NO: 3149 - DNA, 1708 bp, Homo sapiens
ggcacgaggctgagcgctccgacttccagaggagcgctgtgcacgtggagaagagcggggactcggcgaccctgccctcccgaccctcatgttcgaagagcctgagtgggccgaggcggccccagtagccgcgggccttgggcccgtaatctcacgacctccgcctgcggcctcctcgcaaaacaagggctccaagcgccgccagctcttggccacattacgggccctagaggcagcatctctttcccagcatccccccagcctatgtataagtgactctgaggaggaggaggaggaaaggaagaagaaatgccccaaaaaggcatcatttgccagtgcctctgctgaagtagggaagaaagggaagaagaaatgtcaaaaacagggcccaccttgcagtgactctgaggaagaagtagaaaggaagaagaaatgccacaaacaggctcttgttggcagtgactctgctgaagatgagaaaagaaagaggaaatgccagaaacatgcccctataaattcagcccagcacctggacaatgttgaccaaacaggtcccaaagcctggaagggtagtactacaaatgatccaccaaagcaaagccctgggtccacttcccctaaaccccctcatacattaagccgcaagcagtggcggaaccggcaaaagaataagagaagatgtaagaacaagtttcagccacctcaggtgccagaccaggccccagctgaggcccccacagagaagacagaggtgtctcctgttcccaggacagacagccatgaggctcgggcaggggctttgcgagcccgcatggcacagcggctggatggggcccgatttcgctacctcaatgaacagttgtactcagggcccagcagtgctgcacagcgtctcttccaggaagaccctgaggcttttcttctctaccaccgcggcttccagagccaagtgaagaagtggccactgcagccagtggaccgcatcgccagggatcttcgccagcggcctgcatccctagtggtggctgacttcggctgtggggattgccgcttggcttcaagtatccggaaccctgtgcattgctttgacttggcttctctggaccctagggtcactgtgtgtgacatggcccaggttcctctggaggatgagtctgtggatgtggctgtgttttgcctttcactgatgggaaccaacatcagggacttcctagaggaggcaaatagagtactgaagccagggggtctcctgaaagtggctgaggtcagcagccgctttgaggatgttcgaacctttctgcgggctgtgaccaagctaggcttcaagattgtctccaaggacctgaccaacagccatttcttcttgtttgatttccaaaagactgggccccctctggtagggcccaaggctcagctttcaggcctgcagcttcagccatgtctctacaagcgcaggtgacctctggatcttccttgaaaggggaggcagatctcaaactccaggctcagaactgtgaagactgtttccagcctggctgtgagccaagacctggttcctggtggaccctgaggacaaagtgtgataaaacctctggctcagacttgctctactgaaggcttcttggttataagatgcataaagtcactggggctagctaaacaataaagagtttattgtgagaaaaaaaaaaaaaaaaaaaaaaaaaaa

SEQ ID NO: 3150 - protein, 456 aa, Homo sapiens
MFEEPEWAEAAPVAAGLGPVISRPPPAASSQNKGSKRRQLLATLRALEAASLSQHPPSLCISDSEEEEEERKKKCPKKASFASASAEVGKKGKKKCQKQGPPCSDSEEEVERKKKCHKQALVGSDSAEDEKRKRKCQKHAPINSAQHLDNVDQTGPKAWKGSTTNDPPKQSPGSTSPKPPHTLSRKQWRNRQKNKRRCKNKFQPPQVPDQAPAEAPTEKTEVSPVPRTDSHEARAGALRARMAQRLDGARFRYLNEQLYSGPSSAAQRLFQEDPEAFLLYHRGFQSQVKKWPLQPVDRIARDLRQRPASLVVADFGCGDCRLASSIRNPVHCFDLASLDPRVTVCDMAQVPLEDESVDVAVFCLSLMGTNIRDFLEEANRVLKPGGLLKVAEVSSRFEDVRTFLRAVTKLGFKIVSKDLTNSHFFLFDFQKTGPPLVGPKAQLSGLQLQPCLYKRR

SEQ ID NO: 3151 - DNA, 1747 bp, Homo sapiens
acgggagttccccggagaaggatcctgcagcccgagtcccgaggataaagcttggggttcatcctccttccctggatcactccacagtcctcaggcttccccaatccaggggactcggcgccgggacgctgctatggacgacattttcactcagtgccgggagggcaacgcagtcgccgttcgcctgtggctggacaacacggagaacgacctcaaccagggggacgatcatggcttctcccccttgcactgggcctgccgagagggccgctctgctgtggttgagatgttgatcatgcggggggcacggatcaatgtaatgaaccgtggggatgacacccccctgcatctggcagccagtcatggacaccgtgatattgtacagaagctattgcagtacaaggcagacatcaatgcagtgaatgaacatgggaatgtgcccctgcactatgcctgtttttggggccaagatcaagtggcagaggacctggtggcaaatggggcccttgtcagcatctgtaacaagtatggagagatgcctgtggacaaagccaaggcacccctgagagagcttctccgagagcgggcagagaagatgggccagaatctcaaccgtattccatacaaggacacattctggaaggggaccacccgcactcggccccgaaatggaaccctgaacaaacactctggcattgacttcaaacagcttaacttcctgacgaagctcaacgagaatcactctggagagctatggaagggccgctggcagggcaatgacattgtcgtgaaggtgctgaaggttcgagactggagtacaaggaagagcagggacttcaatgaagagtgtccccggctcaggattttctcgcatccaaatgtgctcccagtgctaggtgcctgccagtctccacctgctcctcatcctactctcatcacacactggatgccatatggatccctctacaatgtactacatgaaggcaccaatttcgtcgtggaccagagccaggctgtgaagtttgctttggacatggcaaggggcatggccttcctacacacactagagcccctcatcccacgacatgcactcaatagccgtagtgtaatgattgatgaggacatgactgcccgaattagcatggctgatgtcaagttctctttccaatgtcctggtcgcatgtatgcacctgcctgggtagcccccgaagctctgcagaagaagcctgaagacacaaacagacgctcagcagacatgtggagttttgcagtgcttctgtgggaactggtgacacgggaggtaccctttgctgacctctccaatatggagattggaatgaaggtggcattggaaggccttcggcctaccatcccaccaggtatttcccctcatgtgtgtaagctcatgaagatctgcatgaatgaagaccctgcaaagcgacccaaatttgacatgattgtgcctatccttgagaagatgcaggacaagtaggactggaaggtccttgcctgaactccagaggtgtcgggacatggttgggggaatgcacctccccaaagcagcaggcctctggttgcctcccccgcctccagtcatggtactaccccagccatggggtccatccccttcccccatccctaccactgtggccccaagaggggcgggctcagagctttgtcacttgccacatggtgtctcccaacatgggagggatcagccccgcctgtcacaataaagtttattatg

SEQ ID NO: 3152 - DNA, 3498 bp, Homo sapiens
acatgacagcagatccgcggaagggcagaatgggactccaagcctgcctcctagggctctttgccctcatcctctctggcaaatgcagttacagcccggagcccgaccagcggaggacgctgcccccaggctgggtgtccctgggccgtgcggaccctgaggaagagctgagtctcacctttgccctgagacagcagaatgtggaaagactcttggagctggtgcaggctgtgtcggatcccagctctcctcaatacggaaaatacctgaccctagagaatgtggctgatctggtgaggccatccccactgaccctccacacggtgcaaaaatggctcttggcagccggagcccagaagtgccattctgtgatcacacaggactttctgacttgctggctgagcatccgacaagcagagctgctgctccctggggctgagtttcatcactatgtgggaggacctacggagacccatgttgtaaggtccccacatccctaccagcttccacaggccttggccccccatgtggactttgtggggggactgcaccgttttcccccaacatcatccctgaggcaacgtcctgagccgcaggtgacagggactgtaggcctgcatctgggggtaaccccctctgtgatccgtaagcgatacaacttgacctcacaagacgtgggctctggcaccagcaataacagccaagcctgtgcccagttcctggagcagtatttccatgactcagacctggctcagttcatgcgcctcttcggtggcaactttgcacatcaggcatcagtagcccgtgtggttggacaacagggccggggccgggccgggattgaggccagtctagatgtgcagtacctgatgagtgctggtgccaacatctccacctgggtctacagtagccctggccggcatgagggacaggagcccttcctgcagtggctcatgctgctcagtaatgagtcagccctgccacatgtgcatactgtgagctatggagatgatgaggactccctcagcagcgcctacatccagcgggtcaacactgagctcatgaaggctgccgctcggggtctcaccctgctcttcgcctcaggtgacagtggggccgggtgttggtctgtctctggaagacaccagttccgccctaccttccctgcctccagcccctatgtcaccacagtgggaggcacatccttccaggaacctttcctcatcacaaatgaaattgttgactatatcagtggtggtggcttcagcaatgtgttcccacggccttcataccaggaggaagctgtaacgaagttcctgagctctagcccccacctgccaccatccagttacttcaatgccagtggccgtgcctacccagatgtggctgcactttctgatggctactgggtggtcagcaacagagtgcccattccatgggtgtccggaacctcggcctctactccagtgtttggggggatcctatccttgatcaatgagcacaggatccttagtggccgcccccctcttggctttctcaacccaaggctctaccagcagcatggggcaggactctttgatgtaacccgtggctgccatgagtcctgtctggatgaagaggtagagggccagggtttctgctctggtcctggctgggatcctgtaacaggctggggaacacccaacttcccagctttgctgaagactctactcaacccctgaccctttcctatcaggagagatggcttgtcccctgccctgaagctggcagttcagtcccttattctgccctgttggaagccctgctgaaccctcaactattgactgctgcagacagcttatctccctaaccctgaaatgctgtgagcttgacttgactcccaaccctaccatgctccatcatactcaggtctccctactcctgccttagattcctcaataagatgctgtaactagcattttttgaatgcctctccctccgcatctcatctttctcttttcaatcaggcttttccaaagggttgtatacagactctgtgcactatttcacttgatattcattccccaattcactgcaaggagacctctactgtcaccgtttactctttcctaccctgacatccagaaacaatggcctccagtgcatacttctcaatctttgctttatggcctttccatcatagttgcccactccctctccttacttagcttccaggtcttaacttctctgactactcttgtcttcctctctcatcaatttctgcttcttcatggaatgctgaccttcattgctccatttgtagatttttgctcttctcagtttactcattgtcccctggaacaaatcactgacatctacaaccattaccatctcactaaataagactttctatccaataatgattgatacctcaaatgtaagatgcgtgatactcaacatttcatcgtccaccttcccaaccccaaacaattccatctcgtttcttcttggtaaatgatgctatgctttttccaaccaagccagaaacctgtgtcatcttttcaccccaccttcaatcaacaagtcctcaatcaacaagtcctactgactgcacatcttaaatatatctttatcagtccacaagtccttccaattatatttcccaagtatatctagaacttatccacttatatccccactgctactaccttagtttagggctatattctcttgaaaaaaagtgtccttacttcctgccaatccccaagtcatcttccagagtaaaatgcaaatcccatcaggccacttggatgaaaacccttcaaggattactggatagaattcaggctttcccctccaccccccaatcatagctcacaaaccttccttgctatttgttcttaagtaaaaaatcatttttcctcctccctccccaaaccccaaggaactctcactcttgctcaagctgttccgtccccttaccacccctgatacaactgccaggttaatttccagaattcttgcaagactcagttcagaagtcaccttctttcgtgaatgttttgattccctgaggctactttattttggtatggctgaaaaatcctagattttctaaacaaaacctgtttgaatcttggttctgatatggactaggagagagactgggtcaagtaagcttatctccctgaggctgtttcctcgtctgttaagtgtgaatatcaatacctgcctttcataatcaccagggaataaagtggaataatgttgataacagtgcttggcacctggaagtaggtggcagatgttaacgcccttcctcccttgcactgcgccccctgtgcctacctctagcattgtaacgaccacatagtattgaaatggccagtttacttgtctgccttcctttccaagaccgttggtgcctagaggactagaatcgtgtcctatttaactttgtgttcccaggtcctagctcaggagttggcaaataagaattaaatgtctgctacaccgaaa

SEQ ID NO: 3153 - DNA, 10685 bp, Homo sapiens
gctgtgcaggaggcggcgcccgggcgtcagcggacggaccgatcgccggccaagggcgcgcggtccgacggcggctgcccggaggggatcgcgggcctcggagacagcgactgcggacgatgcgcggcttcaggccccgcgcgagcgggcgctgcccggggggctgaccgcggccggacggcgccccagcaccgggcgagggagcccgcgtcgcgcggaggtcagggagcctgagctggagccagggccccagtgggacctgacccaaagtctgaggtcaagctgggcccagagcctggcctggagctggagcccaaggcacagctggactacccttgtcatgcagaaggagctgggcattgtgccttcctgccctggcatgaagagccccaggccccacctcctgctaccattgctgctgctgctgctgctgctgctgggggctggggtgccaggtgcctggggtcaggctgggagcctggacttgcagattgatgaggagcagccagcgggtacactgattggcgacatcagtgcggggcttccggcaggcacggcagctcctctcatgtacttcatctctgcccaagagggcagcggcgtgggcacagacctggccattgacgaacacagtggggtcgtccgtacagcccgtgtcttggaccgtgagcagcgggaccgctaccgcttcactgcagtcactcctgatggtgccaccgtagaagttacagtgcgagtggctgacatcaacgaccatgctccagccttcccacaggctcgggctgccctgcaggtacctgagcatacagcttttggcacccgctacccactggagcctgctcgtgatgcagatgctgggcgtctgggaacccagggctatgcgctatctggtgatggggctggagagaccttccggctggagacacgccccggtccagatgggactccagtacctgagctggtagttactggggaactggaccgagagaaccgctcacactatatgctacagctggaggcctatgatggtggttcacccccccggagggcccaggccctgctggacgtgacactgctggacatcaatgaccatgccccggctttcaatcagagccgctaccatgctgtggtgtctgagagcctggcccctggcagtcctgtcttgcaggtgttcgcatctgatgccgatgctggtgtcaatggggctgtgacttacgagatcaaccggaggcagagcgagggtgatggacccttctccatcgacgcacacacggggctgctgcagttagagcggccactggactttgagcagcggcgggtccatgaactggtggtgcaagcacgagatggtggggctcaccctgagctgggctcggcctttgtgactgtgcatgtgcgagatgccaatgacaatcagccctccatgactgtcatctttctcagtgcagatggctccccccaagtgtctgaggccgccccacctggacagctcgttgctcgcatctctgtgtcagacccagatgatggtgactttgcccatgtcaatgtgtccctggaaggtggagagggccactttgccctaagcacccaagacagcgtcatctatctggtgtgtgtggctcggcggctggatcgagaggagagggatgcctataacttgagggttacagccacagactcaggctcacctccactgcgggctgaggctgcctttgtgctgcacgtcactgatgtcaacgacaatgcacctgcctttgaccgccagctctaccgacctgagcccctgcctgaggttgcgctgcctggcagctttgtagtgcgggtgactgctcgggatcctgaccaaggcaccaatggtcaggtcacttatagcctagcccctggcgcccacacccactggttctccattgaccccacctcaggcattatcactacggctgcctcactggactatgagttggaacctcagccacagctgattgtggtggccacagatggtggcctgccccctctagcctcctctgccacagttagcgtggccctgcaagatgtgaatgataatgagccccaattccagaggactttctacaatgcctcactgcctgagggcacccagcctggaacttgcttcctgcaggtgacagccacagacgcggatagtggcccatttggcctcctctcctattccttgggtgctggacttgggtcctccggatctcccccattccgcattgatgcccacagcggtgatgtgtgcacaacccggaccctggaccgtgaccaggggccctcaagctttgacttcacagtgacagctgtggatgggggaggcctcaagtccatggtatatgtgaaggtgtttctgtcagacgagaatgacaaccctcctcagttttatccacgggagtatgctgccagtataagtgcccagagtccaccaggcacagctgtgctgaggttgcgtgcccatgaccctgaccagggatcccatgggcgactctcctaccatatcctggctggcaacagccccccactttttaccttggatgagcaatcagggctgttgacagtagcctggcccttggccagacgggccaattctgtggtgcagctggagatcggggctgaggacggaggtggcctacaggcagaacccagtgcccgagtggacatcagcattgtgcctggaacccccacaccacccatatttgagcaactacagtatgttttttctgtgccagaggatgtggcaccaggcaccagtgtgggcatagtccaggcacacaacccaccaggtcgcttggcacctgtgaccctttccctatcaggtggggatccccgaggactcttctccctagatgcggtatcaggactgttgcaaacacttcgccctctggaccgggagctactgggaccagtgttggagctggaggtgcgagcaggcagtggagtgcccccagctttcgctgtagctcgggtgcgtgtgctgctggatgatgtgaatgacaactcccctgcctttcctgcacctgaagacacggtattgctaccaccaaacactgccccagggactcccatctatacactgcgggctcttgaccccgactcaggtgttaacagtcgagtcacctttaccctgcttgctgggggtggtggagccttcaccgtggaccccaccacaggccatgtacggcttatgaggcctctggggccctcaggagggccagcccatgagctggagctggaggcccgggatgggggctccccaccacgcaccagccactttcgactacgggtggtggtacaggatgtgggaacccgtgggctggctccccgattcaacagccctacctaccgtgtggacctgccctcaggcaccactgctggaactcaggtcctgcaagtgcaggcccaagcaccagatgggggccctatcacctatcaccttgcagcagagggagcaagtagcccctttggcctggagccacagagtgggtggctatgggtgcgggcagcactagaccgtgaggcccaggaattgtacatactgaaggtaatggcagtgtctgggtccaaagctgagttggggcagcagacaggcacagccaccgtgagggtcagcatcctcaaccagaatgaacacagtccccgcttgtctgaggatcccaccttcctggctgtggctgagaaccagcccccagggaccagcgtgggccgagtctttgccactgaccgagactcaggacccaatggacgtctgacctacagcctgcaacagctgtctgaagacagcaaggccttccgcatccacccccagactggagaagtgaccacactccaaaccctggaccgtgagcagcagagcagctatcagctcctggtgcaggtgcaggatggagggagcccaccccgcagcaccacaggcactgtgcatgttgcagtgcttgacctcaacgacaacagccccacgttcctgcaggcttcaggagctgctggtgggggcctccctatacaggtaccagaccgcgtgcctccaggaacactggtgacgactctgcaggcgaaggatccagatgagggggagaatgggaccatcttgtacacgctaactggtcctggctcagagcttttctctctgcaccctcactcaggggagctgctcactgcagctcccctgatccgagcagagcggccccactatgtgctgacactgagtgctcatgaccaaggcagccctcctcgaagtgccagcctccagctgctggtgcaggtgcttccctcagctcgcttggccgagccgcccccagatctcgcagagcgggacccagcggcaccagtgcctgtcgtgctgacggtgacagcagctgagggactgcggcccggctctctgttgggctcggtggcagcgccagagcccgcgggtgtgggtgcactcacctacacactggtgggcggtgccgatcccgagggcaccttcgcgctggatgcggcctcagggcgcttgtacctggcgcggcccctggacttcgaagctggcccgccgtggcgcgcgctcacggtacgcgctgaggggccgggaggcgcgggcgcgcggctgctgcgagtgcaggtgcaagtgcaggacgagaatgagcatgcgcccgcctttgcgcgcgacccgctggcgctggcgctgccagagaacccggagcccggcgcagcgctgtacactttccgcgcgtcggacgccgacggccccggccccaatagcgacgtgcgctaccgcctgctgcgccaggagccgcccgtgccggcgcttcgcctggacgcgcgcaccggggcgctcagcgctccgcgcggcctggaccgagagaccactcccgcgctgctgctgctggtggaagccaccgaccggcccgccaacgccagccgccgtcgtgcagcgcgcgtttcagcgcgcgtcttcgtcacggatgagaatgacaacgcgcctgtcttcgcctcgccgtcacgcgtgcgcctcccagaggaccagccgcctgggcccgcggccctgcacgtggtagcccgggacccggatctgggcgaggctgcacgcgtgtcctatcggctggcatctggcggggacggccacttccggctgcactcaagcactggagcgctgtccgtggtgcggccgttggaccgcgaacaacgagctgagcacgtactgacagtggtggcctcagaccacggctccccgccgcgctcggccacgcaggtcctgaccgtcagtgtcgctgacgtcaacgacgaggcgcctactttccagcagcaggagtacagcgtcctcttgcgtgagaacaaccctcctggcacatctctgctcaccctgcgagcaaccgaccccgacgtgggggccaacgggcaagtgacttatggaggcgtctctagcgaaagcttttctctggatcctgacactggtgttctcacgactcttcgggccctggatcgagaggaacaggaggagatcaacctgacagtgtatgcccaggacaggggctcacctcctcagttaacgcatgtcactgttcgagtggctgtggaggatgagaatgaccatgcaccaacctttgggagtgcccatctctctctggaggtgcctgagggccaggacccccagacccttaccatgcttcgggcctctgatccagatgtgggagccaatgggcagttgcagtaccgcatcctagatggggacccatcaggagcctttgtcctagaccttgcttctggagagtttggcaccatgcggccactagacagagaagtggagccagctttccagctgaggatagaggcccgggatggaggccagccagctctcagtgccacgctgcttttgacagtgacagtgctggatgccaatgaccatgctccagcctttcctgtgcctgcctactcggtggaggtgccggaggatgtgcctgcagggaccctgctgctgcagctacaggctcatgaccctgatgctggagctaatggccatgtgacctactacctgggcgccggtacagcaggagccttcctgctggagcccagctctggagaactgcgcacagctgcagccttggacagagaacagtgtcccagctacaccttttctgtgagtgcagtggatggtgcagctgctgggcccctaagcaccacagtgtctgtcaccatcacggtgcgcgatgtcaatgaccatgcacccaccttccccaccagtcctctgcgcctacgtctgccccgcccaggccccagcttcagtaccccaaccctggctctggccacactgagagctgaagatcgtgatgctggtgccaatgcttccattctgtaccggctggcaggcacaccacctcctggcactactgtggactcttacactggtgaaatccgcgtggcccgctctcctgtagctctaggcccccgagatcgtgtcctcttcattgtggccactgatcttggccgtccagctcgctctgccactggtgtgatcattgttggactgcagggggaagctgagcgtggaccccgctttccccgggctagcagtgaggctacgattcgtgagaatgcgcccccagggactcctattgtctcccccacggccgtccatgcaggaggcacaaatggacccatcacctacagcattctcagtgggaatgagaaagggacattctccatccagcctagtacaggtgccatcacagttcgctcagcagaggggctagacttcgaggtgagtccacggctgcgactggtgctgcaggcagagagtggaggagcctttgccttcactgtgctgaccctgaccctgcaagatgccaacgacaatgctccccgtttcctgcggccccattatgtggccttccttcctgagtcccggcccttggaggggcccctgctgcaggtggaggcggatgacctggatcaaggctctggaggacagatttcctacagtctggctgcatcccagccggcacgtggattgttccacgtagacccaaccacaggcactatcactaccacagccatcctggaccgtgagatctgggctgaaacacggttggtgctgatggccacagacagagggagcccagccctggtgggctcagctaccttgacggtgatggtcatcgacaccaatgacaatcgccccaccatcccccaaccctgggagctccgagtgtcagaagatgcgttattgggctcagagattgcacaggtaacagggaatgatgtggactcaggacccgtgctgtggtatgtgctaagcccatctgggccccaggatcccttcagtgttggccgctatggaggccgtgtctccctcacggggcccctggactttgagcagtgtgaccgctaccagctgcagctgctggcacatgatgggcctcatgagggctgtgccaacctcacagtgcttgtggaggatgtcaatgacaatgcacctgccttctcacagagcctctaccaggtaatgctgcttgagcacacacccccaggcagtgccattctctccgtctctgccactgatcgggactcaggtgccaacggtcacatttcctaccacctggcttcccctgccgatggcttcagtgttgaccccaacaatgggaccctgttcacaatagtgggaacagtggccttgggccatgacgggtcaggagcagtggatgtggtgctggaagcacgagaccacggggctccaggccgggcagcacgagccacagtgcacgtgcagctgcaggaccagaacgaccacgccccgagcttcacattgtcacactaccgtgtggctgtgactgaagacctgccccctggctccactctgctcaccctggaggctacagatgctgatggaagccgcagccatgccgctgtggactacagcatcatcagtggcaactggggccgagtcttccagctggaacccaggctggctgaggctggggagagtgctggaccaggcccccgggcactgggctgcctggtgttgcttgaacctctagactttgaaagcctgacacagtacaatctaacagtggctgcagctgaccgtgggcagccaccccaaagctcagtcgtgccagtcactgtcactgtactagatgtcaatgacaacccacctgtctttacccgagcatcctaccgtgtgacagtacctgaagacacacctgttggagctgagctgctgcatgtagaggcctctgacgctgaccctggccctcatggcctcgtgcgtttcactgtcagctcaggcgacccatcagggctctttgagctggatgagagctcaggcaccttgcgactggcccatgccctggactgtgagacccaggctcgacatcagcttgtagtacaggctgctgaccctgctggtgcacactttgctttggcaccagtgacaattgaggtccaggatgtgaatgatcatggcccagccttcccactgaacttactcagcaccagcgtggccgagaatcagcctccaggcactctcgtgaccactctgcatgcaatcgacggggatgctggggcttttgggaggctccgttacagcctgttggaggctgggccaggacctgagggccgtgaggcatttgcactgaacagctcaacaggggagttgcgtgcgcgagtgccctttgactatgagcacacagaaagcttccggctgctggtgggtgctgctgatgctgggaatctctcagcctctgtcactgtgtcggtgctagtgactggagaggatgagtatgaccctgtatttctggcaccagctttccacttccaagtgcccgaaggtgcccggcgtggccacagcttgggtcacgtgcaggccacagatgaggatgggggtgccgatggcctggttctgtattcccttgccacctcttccccctattttggtattaaccagactacaggagccctgtacctgcgggtggacagtcgggcaccaggcagcggaacagccacctctgggggtgggggccggacccggcgggaagcaccacgggagctgaggctggaggtgatagcacgggggcctctgcctggttcccggagtgccacagtgcctgtgaccgtggatatcacccacaccgcactgggcctggcacctgacctcaacctgctattagtaggggccgtggcagcctccttgggagttgtggtggtgcttgcactggcagccctggtcctaggacttgttcgggcccgtagccgcaaggctgaggcagcccctggcccaatgtcacaggcagcacccctagccagtgactcactgcagaaactgggccgggagccacctagtccaccaccctctgagcacctctatcaccagactcttcccagctatggtgggccaggagctggaggaccctacccccgtggtggctccttggacccttcacattcaagtggccgaggatcagcagaggctgcagaggatgatgagatccgcatgatcaatgagttcccccgtgtggccagtgtggcctcctctctggctgcccgtggccctgactcaggcatccagcaggatgcagatggtctgagtgacacatcctgcgaaccacctgcccctgacacctggtataagggccgaaaggcagggctgctgctgccaggtgcaggagccactctctacagagaggaggggcccccagccactgccacagccttcctggggggctgtggcctgagccctgcacccactggggactatggcttcccagcagatggcaagccatgtgtggcaggtgcgctgacagccattgtggccggcgaggaggagctccgtggcagctataactgggactacctgctgagctggtgccctcagttccaaccactggccagtgtcttcacagagatcgctcggctcaaggatgaagctcggccatgtcccccagctccccgtatcgacccaccacccctcatcactgccgtggcccacccaggagccaagtctgtgccccccaagccagcaaacacagctgcagcccgggccatcttcccaccagcttctcaccgctcccccatcagccatgaaggctccctgtcctcagctgccatgtcccccagcttctcaccctctctgtctcctctggctgctcgctcacccgttgtctcaccatttggggtggcccagggtccctcagcctcagcactcagcgcagagtctggcctggagccacctgatgacacggagctgcacatctagctgtggcccaggctgggccccgacctgggatgcgcacagtgtccccaacgcaggccccactctgagcctgccctgggcagcctcggactatgactggctacggggaggccaccaccaggccccagctctccaccctgaactccccagccccctcagagtactaggaccacagaagccctgttgctcactgacctgtgaccaggtccaatgtggggagaaatatgaaggaggtagcagccctgggttctcctcagtgagggatccctgccctgcaccagcaccctgagatggagctgagactttatttattgggggtagggggatggaggaggtccctccaacatgtttggacccagctcctttgggttccactgacacccctgcccctgcccctgcccagaaccaagtgccatttctcactctggagccttaataaactgcaatttgt

SEQ ID NO: 3154 - protein, 153 aa, Homo sapiens
MKAPCPQLPCPPASHPLCLLWLLAHPLSHHLGWPRVPQPQHSAQSLAWSHLMTRSCTSSCGPGWAPTWDAHSVPNAGPTLSLPWAASDYDWLRGGHHQAPALHPELPSPLRVLGPQKPCCSLTCDQVQCGEKYEGGSSPGFSSVRDPCPAPAP

SEQ ID NO: 3155 - DNA, 514 bp, Mus musculus
ctttttcgtctgggctgccaacatgccatccagactgaggaagacccggaaacttaggggccacgtgagccacggccacggccgcataggcaagcaccggaagcaccccggcggccgcggtaatgctggtggtctgcatcaccaccggatcaacttcgacaaataccacccaggctactttgggaaagttggtatgaagcattaccacttaaagaggaaccagagcttctgcccaactgtcaaccttgacaaattgtggactttggtcagtgaacagacacgggtgaatgctgctaaaaacaagactggggctgctcccatcattgatgtggtgcgatcgggctactacaaagttctgggaaagggaaagctcccaaagcagcctgtcatcgtgaaggccaaattcttcagcagaagagctgaggagaagattaagagtgttgggggggcctgtgtcctggtggcttgaagccacatggagggagtttcattaaatgctaactacttttaaaaa

SEQ ID NO: 3156 - protein, 148 aa, Mus musculus [sequence omitted]

SEQ ID NO: 3157 - DNA, 4913 bp, Homo sapiens
aaggcatccaggatgcggtgcggggcggcccggtgcccccccgccccgtcacggcagccgcggcggccgaggggaccgggccagggccgggggcggcggcccgagccgcggtagcggcggcggcgggaggggcggcctgagggcggacgggcgggcgcccgggttgcgggggctcggtgccgctccgcactgcccggccggtctcggccccggcgccatgagtggcggcggcggcggagggggctcggcgcccagtcgcttcgccgactactttgtcatctgcggactggacacggagaccgggctggagccggacgagctgtcggcattatgccagtacatacaggcttctaaagccagggatggtgccagccctttcatttcaagtacgactgaaggagaaaattttgagcagacaccattgagaagaacattcaaatctaaggtccttgcacgatatcctgagaacgtagaatggaatccctttgaccaagatgcagtaggaatgctatgtatgccgaaagggctggcattcaagacccaggctgatcccagggagccccaattccatgcctttattatcacaagggaggatggctctcggacatttgggtttgccctcacattttatgaagaggtgactagcaagcagatctgcagtgcaatgcagaccctctaccacatgcacaatgctgagtatgatgtcctacatgctccccctgctgatgacagagaccagagcagcatggaggatggtgaagacactcctgtgaccaaactgcagcgcttcaactcctatgacattagccgggacactctctacgtctctaagtgcatctgcctcatcacacccatgtctttcatgaaggcatgtcggagcgtgctggagcaactccaccaggcagtcacttcacctcagccccctccactgccccttgagagctacatatacaacgtactctacgaggtgccgctcccacctcctggccggtccttgaagttttctggggtctatgggccaataatctgccagagaccaagtaccaatgagcttcccctatttgactttcctgtcaaagaggtttttgaactgctcggggtggagaatgtgtttcagctttttacttgtgcccttctggagtttcaaatcctgctctactcacagcattaccagagactgatgactgtggcggagacgattacagctctcatgtttcctttccagtggcagcatgtctatgtccctattctcccagcttctctcctgcatttcttagatgctcctgttccatacctgatgggtttgcattccaatggcctggatgaccggtcaaagctggagctgcctcaagaggctaacctctgctttgtggacattgacaaccacttcattgagttgccagaggacttgccacagttccccaacaaattggagtttgtccaggaagtctctgagattctcatggcatttggaattccccctgaagggaatcttcattgcagtgagagtgcctccaagctgaagaggctgcgggcctctgagcttgtctcggacaagaggaatgggaacattgctggctcccctttgcattcctacgagcttcttaaggagaatgaaactattgcccggctgcaagccttggtcaagagaactggggtgagcctggaaaagttggaagtgcgtgaagaccccagcagcaataaggatctcaaagttcagtgtgatgaagaagaactcaggatttaccagctaaacattcagatccgggaagtttttgcaaatcgtttcactcagatgtttgcagattatgaggtgtttgtcatccaacccagccaggataaggaatcctggtttaccaacagggagcaaatgcaaaactttgataaagcatcttttctgtcagatcagcctgagccctacctgcccttcctctcaagattcctggagacccagatgtttgcatctttcattgacaacaaaataatgtgtcatgatgatgatgataaagaccctgtactccgggtatttgattcccgagttgacaagatcaggctgttgaatgttcggacacctactctccgtacatccatgtaccagaagtgtaccactgtggatgaagcagagaaagcaattgagctgcgtctggcaaaaattgaccatactgcaattcacccacatttacttgacatgaagattggacaagggaaatatgagccgggcttcttccctaagctgcagtctgatgtactttccactgggccagccagcaacaagtggacgaaaaggaatgcccctgcccagtggaggcggaaagatcggcagaagcagcacacagaacacctgcgtttagataatgaccagagggagaagtacatccaggaagccaggactatgggcagcactatccgccagcccaaactgtccaacctctctccatcagtgattgcccagaccaattggaagtttgtagagggcctgctgaaggaatgccgcaataagaccaagaggatgctggtggaaaagatgggccgagaagctgtggagctagggcatggggaggtgaacatcacaggggtggaagagaacaccctgattgccagcctttgtgatctcctggaaaggatctggagtcatggactacaagtgaaacaggggaaatcagccttatggtcccacctgttacattatcaggacaaccggcagagaaaactcacatcaggaagcctcagtacctcaggaatacttcttgattcagaacgtaggaagtctgatgccagctcactcatgcctcccctgaggatctccctgattcaggatatgaggcacatccagaacatcggggagatcaagactgatgtgggataggcagagcatgggtgcgacatgtcatggaaaaaagttactttcagacacctgagcagctctctcagacatgagctcacaaaaagttatataagcgctatgccttcctgcgctgtgatgacgagaaggagcagttcctctatcacctcctgtctttcaatgccgtcgattacttttgcttcaccaatgtcttcacaactatcctgatcccgtaccacattctgatcgtaccaagcaagaagctggggggctccatgttcactgccaacccatggatctgtatatcaggagaattgggtgagacacagatcatgcagattcccaggaatgtgctagagatgaccttcgagtgccagaacttggggaagcttactactgtccagattggccatgataactctgggctgtaatgcaaatggctggtggagtatgtgatggtcaggaatgagatcacaggacatacctacaagttcccgtgtggccggtggttagggaagggcatggatgatggaagcctggagcggatcctagttggggagctgctcacatcccagcctgaggtggatgagaggccatgccggaccccgccgctgcagcagtcccccagtgtcatccggaggcttgttaccatctcacccaacaacaagcccaagctgaacactgggcagatccaggagtccatcggggaggcagtcaatggcattgtgaagcacttccataagcctgagaaagagcgaggcagtctgacgctgttgctctgtggagagtgtggccttgtctcggccttggaacaggctttccagcatggatttaaatcgccccggctcttcaaaaatgtcttcatttgggatttcctggaaaaagcacaaacctattatgagacattagagaagaatgaagtagtccctgaggaaaactggcatacaagagcccggaacttctgccgatttgtcactgcaatcaacaatactccccggaacatcggcaaggatggcaagtttcagatgctggtgtgcttgggagccagagatcacctcctacaccactggattgccctgctggctgactgccccatcactgcacacatgtatgaggatgtggcactgatcaaagaccatacacttgtcaattccttgattcgtgtgctgcagacattgcaggagttcaacatcacgctggagacgtcccttgtcaagggcatcgacatctgacctcccagcaccagccagcagcaggactgagaaagactcaccctgcagctctgaccttttttcccaaagggacttaagcgattgtgcaggagtaggagacaaaatgtacactcactgtaaaaagaaaactagaggatttttggaataaataatctattttagagtttatttgctgatttgctttttacacactttcatgtgaaagagtgatagggagagggagcgaggctggtgccgcttattttgaagctggtgccctccctcgccgtggccacatgctggaacctgaggcctccctggactgagcctgtgcactgcgtgcgggacagttatgtttccttgccccgtcgcattaatgaggcccttccacatcatttttaaactaatgtttttctatattaacattattatggatatttggctttcataggccacacacaggtgtgctgcgcgggaagccccatgctccaatcaaagggatttttagtagtgcctctaagcaagcaccgatgagtcagtcccacgtattttcttttttgtcagtattgtttgggaaggagacatgccgggatgtgtcatcgtgccaaataccacatttcctgttggcacagtttcacagaagtaaacataagcatgttttaacaggtttttcttttcttttttcttttttaaaatgttttatttatttaacccgccattgtgtgtttttaagtattttctttttttaaggaaaggaaaagcttgtcacaatctaactggctatgttattattattaaatttatgttttgcaacttagaaaccagctacagtatggcccacttaataaaacacctgaaac

SEQ ID NO: 3158 - protein, 882 aa, Homo sapiens
MSGGGGGGGSAPSRFADYFVICGLDTETGLEPDELSALCQYIQASKARDGASPFISSTTEGENFEQTPLRRTFKSKVLARYPENVEWNPFDQDAVGMLCMPKGLAFKTQADPREPQFHAFIITREDGSRTFGFALTFYEEVTSKQICSAMQTLYHMHNAEYDVLHAPPADDRDQSSMEDGEDTPVTKLQRFNSYDISRDTLYVSKCICLITPMSFMKACRSVLEQLHQAVTSPQPPPLPLESYIYNVLYEVPLPPPGRSLKFSGVYGPIICQRPSTNELPLFDFPVKEVFELLGVENVFQLFTCALLEFQILLYSQHYQRLMTVAETITALMFPFQWQHVYVPILPASLLHFLDAPVPYLMGLHSNGLDDRSKLELPQEANLCFVDIDNHFIELPEDLPQFPNKLEFVQEVSEILMAFGIPPEGNLHCSESASKLKRLRASELVSDKRNGNIAGSPLHSYELLKENETIARLQALVKRTGVSLEKLEVREDPSSNKDLKVQCDEEELRIYQLNIQIREVFANRFTQMFADYEVFVIQPSQDKESWFTNREQMQNFDKASFLSDQPEPYLPFLSRFLETQMFASFIDNKIMCHDDDDKDPVLRVFDSRVDKIRLLNVRTPTLRTSMYQKCTTVDEAEKAIELRLAKIDHTAIHPHLLDMKIGQGKYEPGFFPKLQSDVLSTGPASNKWTKRNAPAQWRRKDRQKQHTEHLRLDNDQREKYIQEARTMGSTIRQPKLSNLSPSVIAQTNWKFVEGLLKECRNKTKRMLVEKMGREAVELGHGEVNITGVEENTLIASLCDLLERIWSHGLQVKQGKSALWSHLLHYQDNRQRKLTSGSLSTSGILLDSERRKSDASSLMPPLRISLIQDMRHIQNIGEIKTDVG

SEQ ID NO: 3159 - DNA, 602 bp, Homo sapiens
cgccatcttccagtaattcgccaaaatgacgaacacaaagggaaagaggagaggcacccgatatatgttctctaggccttttagaaaacatggagttgttcctttggccacatatatgcgaatctataagaaagctgatattgtagacatcaagggaatgggtactgctcaaaaaggaatgccccacaagtgttaccatggcaaaactggaagagtctacaatgttacccagcatgctgttggcattgttgtaaacaaacaagttaagggcaagattcttgccaagagaattaaggtgcgtattgagcacattaagcactctaagagccgagatagcttcctgaaacacgtgaaggaaaatgatcagaaaaagaaagacgccaaagagaaaggtacctgggttcaactaaagcgccagcctgctccacccagagaagcacactttgtgagaaccaacgggaagcagcctgagctgctggaacctatttcctatgaattcatggcataataggtgttaaaaaaaaaaataaaggacctctgggctgtaaaaaaaaaaaaaaaaattaaaaaaagaaaaaaaaaaaaaagaaaagaaaaaaaaa

SEQ ID NO: 3160 - protein, 160 aa, Homo sapiens
MTNTKGKRRGTRYMFSRPFRKHGVVPLATYMRIYKKADIVDIKGMGTAQKGMPHKCYHGKTGRVYNVTQHAVGIVVNKQVKGKILAKRIKVRIEHIKHSKSRDSFLKHVKENDQKKKDAKEKGTWVQLKRQPAPPREAHFVRTNGKQPELLEPISYEFMA

SEQ ID NO: 3161 - DNA, 4823 bp, Homo sapiens
gcggaggttgaggggcgtccgaggcgcggaggggctggctgggcaggaggggttggcggggcagcagggccgcggccatggggagcttgaaggaggagctgctcaaagccatctggcacgccttcaccgcactcgaccaggaccacagcggcaaggtctccaagtcccagctcaaggtcctttcccataacctgtgcacggtgctgaaggttcctcatgacccagttgcccttgaagagcacttcagggatgatgatgagggtccagtgtccaaccagggctacatgccttatttaaacaggttcattttggaaaaggtccaagacaactttgacaagattgaattcaataggatgtgttggaccctctgtgtcaaaaaaaacctcacaaagaatcccctgctcattacagaagaagatgcatttaaaatatgggttattttcaactttttatctgaggacaagtatccattaattattgtgtcagaagagattgaatacctgcttaagaagcttacagaagctatgggaggaggttggcagcaagaacaatttgaacattataaaatcaactttgatgacagtaaaaatggcctttctgcatgggaacttattgagcttattggaaatggacagtttagcaaaggcatggaccggcagactgtgtctatggcaattaatgaagtctttaatgaacttatattagatgtgttaaagcagggttacatgatgaaaaagggccacagacggaaaaactggactgaaagatggtttgtactaaaacccaacataatttcttactatgtgagtgaggatctgaaggataagaaaggagacattctcttggatgaaaattgctgtgtagagtccttgcctgacaaagatggaaagaaatgcctttttctcgtaaaatgttttgataagacttttgaaatcagtgcttcagataagaagaagaaacaggagtggattcaagccattcattctactattcatctgttgaagctgggcagccctccaccacacaaagaagcccgccagcgtcggaaagaactccggaagaagcagctggctgaacaagaggaactggagcgacaaatgaaggaactccaggccgccaacgaaagcaagcagcaggagctggaggccgtgcggaagaaactggaggaagcagcatctcgtgcagcagaagaggaaaagaaacgccttcagactcaagtggaacttcaggccaggttcagcacagagctggaaagagagaagcttatcagacagcagatggaagaacaggttgctcaaaagtcctctgaactggaacagtatttacagcgagtacgggagctggaagacatgtacctaaagctgcaggaggctcttgaagatgagagacaggcccggcaagatgaagagacagtgcggaagcttcaggccaggttgttggaggaagagtcttccaagagggctgaactagaaaagtggcacttggagcagcagcaggccattcagacaaccgaggcggagaagcaggagttggagaatcagcgtgtcctgaaggaacaggccctgcaggaggccatggagcagctggagcagcttgagttagaacggaagcaagcacttgagcagtacgaggaagttaaaaagaagctggagatggcaactaataagaccaagagctggaaggacaaagtggcccatcatgaaggattaattcgactgatagaaccaggttcaaagaaccctcacctgatcactaactggggacctgcagctttcactgaggcagaacttgaagagagagagaagaactggaaagagaaaaagaccacggagtgactgagcttgctggcagtcacgtcagttatgtagatactgcatggcaggagagctttacgctaaagacaaaagaaacagctttgggggccgggcgtggtggctcacgcctgtaatcccagcactttgggaggccgaggcgggtggatcacctgaggtcaggagttcaagagcagcctggccaacctggtgaaaccctgtctctactaaaaatacaaaaaaaattagctgagcgtggtggcgggcgcctgtaatcccagctacttgggaggctgaggcaggagaatcacttgaacgtgggaggcggaggttgcagcgagctgagatcatgccgttgtactccagcttgggcaacagagtgagactccatctcaaaacaaaacaaaacaaaacaaaacaaaaaaacccggctttgctgcttttaactcttcttccttctgtgcctctctaagtgggtcagtatcctaaggaagccttcttatttatcttcctgcaaacaagggttacctgaaaagaaaaaaaaagtcaacattgtcaagctgtttgtttactctttctttgaaaacatcaccttctgaaatttgtcttttagctctctcagattcttccccaaatgaggcagggtgcagacagcacagtcagctctgcagagtttggaggggctcactgccactgggtactcagaacctctgtggactggatgtcagctctttcctttggcagcgtgtttccttttccgagtatgtgctgttaaactagattggccggttcgctttccatttcctgacacttgacatggaatgcctttgaccattggtgctctgacagagaagtcatggagtcattgccatttcctggttgcccttttggaatgtgatcctgttagtagaggttttctagcttctactaagatatttctttccctaaccatcatacacttggcatgtttcattcccatctcctttcccctcaccttaaaggagactacccctttgccccatattgtcaacctaattttctctcgtactctctctagtgaatgatgtgctaccaagtatatgccaggctgtgagaggattatactgagtagtagaaagaagctaatttgaaataaaaattatttgtataattaagaaagcagattagatgcacatggtcaacaggaagttgactgtatgtctgctagttagattcaaaacatcataaagatgatagcatgtcaatatattagcctagccattatgttagcctttgttaggtgggcagcttttctgctttttcccttcctctgtggtgacaacggaggaaatatccaacagaaatacgtctaacagggaaattgggatcatagtttatatgcatctgatttgaaaggagtattgaggaaggttttcatatatgatctatctttggattaaaaagaacatttatgaaatcaagccttctaacactagttataattgagaagcaacagtaactccgtggacagcaatcaagcttaaaattgtaaataaatatggggataattcagttgttgcaaaaaaagggcagaattcagtagaataaagtccttttctcttacaggtattaaatgaggacagagaacctcaggtgttcttatgctagtgcttgctgagtgcatactaagaaagcaattccaaatagatgtatacatctagagagagtggtattagagattcagtgtatgtatttatttacatgagaggaaactggaatataatcccataaattatcaccttttatgactggaaaatatttgccaatgaagaaatggtctgtaggtatttgtcttaagatttttggctgtttaataaaaatgtaactttaacggtttcttatagttgcctttataaagtgtattgtctaaaatatttttgtatcatgtgcctttgaaatttgacagctgatttgggtgttggatttctgcccagccatttatcagtattatcattttattcagtagctggcaggtgtattagaccaacgagacttaggtaaggaatggaacctttcctgtggtttgactgcacattacaccagaagactccagtatccctcattccagaatgaggaaaaagtattctacaaagaacctaatcacctctgtgaaatctatgggatggaaacagtgtggccttaggagtcaaatagtctctgcatggtggggaggatcatgatggaatatgtgaatttctacttctagaagttgtgaaataggtcctgcacttttgcagaatgtccttctttaaacctggcttattccacagctgtagctgataacatgacctggggcttagctgctctagccctgggttcttggagacctcacactgcctggcccctggccatccacctaaggactgcctgctttctggtcacatgtggaccttgatacgactaagcggttacatatgtggttgtgcaaaagctttctgtttaatgcatagtgttaccgatttacatcttggttttcagtggcactatgtctaggaggcaatatccttttaaacagtgctttggctaagatagatacttgtgaatcaaagatagcacagaaatgaactaagtatatcccatttggaattatattttgatactatttaaaatggtttcacctgttaaagggccaacagaactcttggttttacttttgtaattactgtacagaaaatttcaagagtgtttgagtgcttgtcatcaggtgttttccttaataagtagggatatgatcatttacaggaattatatatgaaaaaagtttttgaaatgtatttttgtgatgtgctatgttgaggggaaaccaaatatttatgattttaaaacattcgtatgaaaacattgtacaatgtaatatgctcaactttctcaattttttgctaatttttctaagatacattaaaaatgttttatatttttttttaagtaaaatggacccagtaagaaaattaaaaataccagaacatacacttt

SEQ ID NO: 3162 - protein, 585 aa, Homo sapiens
MGSLKEELLKAIWHAFTALDQDHSGKVSKSQLKVLSHNLCTVLKVPHDPVALEEHFRDDDEGPVSNQGYMPYLNRFILEKVQDNFDKIEFNRMCWTLCVKKNLTKNPLLITEEDAFKIWVIFNFLSEDKYPLIIVSEEIEYLLKKLTEAMGGGWQQEQFEHYKINFDDSKNGLSAWELIELIGNGQFSKGMDRQTVSMAINEVFNELILDVLKQGYMMKKGHRRKNWTERWFVLKPNIISYYVSEDLKDKKGDILLDENCCVESLPDKDGKKCLFLVKCFDKTFEISASDKKKKQEWIQAIHSTIHLLKLGSPPPHKEARQRRKELRKKQLAEQEELERQMKELQAANESKQQELEAVRKKLEEAASRAAEEEKKRLQTQVELQARFSTELEREKLIRQQMEEQVAQKSSELEQYLQRVRELEDMYLKLQEALEDERQARQDEETVRKLQARLLEEESSKRAELEKWHLEQQQAIQTTEAEKQELENQRVLKEQALQEAMEQLEQLELERKQALEQYEEVKKKLEMATNKTKSWKDKVAHHEGLIRLIEPGSKNPHLITNWGPAAFTEAELEEREKNWKEKKTTE

SEQ ID NO: 3163 - DNA, 3820 bp, Homo sapiens
cagcagtgagtcggagctctatggaggtggcagcgggtaccgagtggcggctgcagcagcgactcctctgagctgagtttgaggccgtccccgactccttcctcccccttccctcccccttttttttgttttccgttcccctttcccctcccttccctatccccgacgaccggatcctgaggaggcagctgcggtggcagctgctgagttctcggtgaaggtatttcatttctcctgtcccctcccctccccaccccatctattaatattattcttttgaagattcttcgttgtcaagccgccaaagtggagagtgcgattgcagaagggggtgcttctcgtttcagtgcttcttcgggcggaggaggaagtaggggtgcacctcagcactatcccaagactgctggcaacagcgagttcctggggaaaaccccagggcaaaacgctcagaaatggattcctgcacgaagcactagacgagatgacaactccgcagcaaacaactccgcaaacgaaaaagaacgacatgatgcaatcttcaggaaagtaagaggcatactaaataagcttactcctgaaaagtttgacaagctatgccttgagctcctcaatgtgggtgtagagtctaaactcatccttaaaggggtcatactgctgattgtggacaaagccctagaagagccaaagtatagctcactgtatgctcagctatgtctgcgattggcagaagatgcaccaaactttgatggcccagcagcagagggtcaaccaggacagaagcaaagcaccacattcagacgcctcctaatttccaaattacaagatgaatttgaaaaccgaactagaaatgttgatgtctatgataagcgtgaaaatcccctcctccccgaggaggaggaacagagagccattgctaagatcaagatgttgggaaacatcaaattcattggagagcttggcaagcttgatcttattcacgaatctatccttcataagtgcatcaaaacacttttggaaaagaagaagagagtccaactcaaagatatgggagaggatttggagtgcctctgtcagataatgaggacagtgggacctagattagaccatgaacgagccaagtccttaatggatcagtactttgcccgaatgtgctccttgatgttaagtaaggaattgccagcaaggattcgtttcctgctgcaggataccgtagagttgcgagaacaccattgggttcctcgcaaggcttttcttgacaatggaccaaagacgatcaatcaaattcgtcaagatgcagtaaaagatctaggggtgtttattcctgctcctatggctcaagggatgagaagtgacttctttctggagggaccgttcatgccacccaggatgaaaatggatagggacccacttggaggacttgctgatatgtttggacaaatgccaggtagcggaattggtactggtccaggagttatccaggatagattttcacccaccatgggacgtcatcgttcaaatcaactcttcaatggccatgggggacacatcatgcctcccacacaatcgcagtttggagagatgggaggcaagtttatgaaaagccaggggctaagccagctctaccataaccagagtcagggactcttatcccagctgcaaggacagtcgaaggatatgccacctcggttttctaagaaaggacagcttaatgcagatgagattagcctgaggcctgctcagtcgttcctaatgaataaaaatcaagtgccaaagcttcagccccagataactatgattcctcctagtgcacaaccaccacgcactcaaacaccacctctgggacagacacctcagcttggtctcaaaactaatccaccacttatccaggaaaagcctgccaagaccagcaaaaagccaccaccgtcaaaggaagaactccttaaactaactgaaactgttgtgactgaatatctaaatagtggaaatgcaaatgaggctgtcaatggtgtaagagaaatgagggctcctaaacactttcttcctgagatgttaagcaaagtaatcatcctgtcactagatagaagcgatgaagataaagaaaaagcaagttctttgatcagtttactcaaacaggaagggatagccacaagtgacaacttcatgcaggctttcctgaatgtattggaccagtgtcccaaactggaggttgacatccctttggtgaaatcctatttagcacagtttgcagctcgtgccatcatttcagagctggtgagcatttcagaactagctcaaccactagaaagtggcacccattttcctctcttcctactttgtcttcagcagttagctaaattacaagatcgagaatggttaacagaactttttcaacaaagcaaggtcaatatgcagaaaatgctcccagaaattgatcagaataaggaccgcatgttggagattttggaaggaaagggactgagtttcttattcccactcctcaaattggagaaggaactgttgaagcaaataaagttggatccatcccctcaaaccatatataaatggattaaagataacatctctcccaaacttcatgtagataaaggatttgtgaacatcttaatgactagcttcttacagtacatttctagtgaagtaaacccccccagcgatgaaacagattcatcctctgctccttccaaagaacagttagagcaggaaaaacaactactactatctttcaagccagtaatgcagaaatttcttcatgatcacgttgatctacaagtcagtgccctgtatgctctccaggtgcactgctataacagcaacttcccaaaaggcatgttacttcgcttttttgtgcacttctatgacatggaaattattgaagaagaagctttcttggcttggaaagaagatataacccaagagtttccgggaaaaggcaaggctttgttccaggtgaatcagtggctaacctggttagaaactgctgaagaagaagaatcagaggaagaagctgactaaagaaccagccaaagccttaaattgtgcaaaacatactgttgctatgatgtaactgcatttgacctaaccactgcgaaaattcattccgctgtaatgttttcacaatatttaaagcagaagcacgtcagttaggatttccttctgcataaggtttttttgtagtgtaatgtcttaatcatagtctaccatcaaatattttaggagtatctttaatgtttagatagtatattagcagcatgcaataattacatcataagttctcaagcagaggcagtctattgcaaggaccttctttgctgccagttatcataggctgttttaagttagaaaactgaatagcaacactgaatactgtagaaatgcactttgctcagtaatacttgagttgttgcaatatttgattatccatttggttgttacagaaaaattcttaactgtaattgatggttgttgccgtaatagtatattgcctgtatttctacctctagtaatgggctttatgtgctagattttaatatccttgagcctgggcaagtgcacaagtctttttaaaagaaacatggtttacttgcacaaaactgatcagttttgagagatcgttaatgcccttgaagtggtttttgtgggtgtgaaacaaatggtgagaatttgaattggtccctcctattatagtattgaaattaagtctacttaatttatcaagtcatgttcatgccctgattttatatacttgtatctatcaataaacattgtgatacttgaaaaaaaaaaaaaaaaaaaaaaaaaaaaa

SEQ ID NO: 3164 - protein, 907 aa, Homo sapiens
VESAIAEGGASRFSASSGGGGSRGAPQHYPKTAGNSEFLGKTPGQNAQKWIPARSTRRDDNSAANNSANEKERHDAIFRKVRGILNKLTPEKFDKLCLELLNVGVESKLILKGVILLIVDKALEEPKYSSLYAQLCLRLAEDAPNFDGPAAEGQPGQKQSTTFRRLLISKLQDEFENRTRNVDVYDKRENPLLPEEEEQRAIAKIKMLGNIKFIGELGKLDLIHESILHKCIKTLLEKKKRVQLKDMGEDLECLCQIMRTVGPRLDHERAKSLMDQYFARMCSLMLSKELPARIRFLLQDTVELREHHWVPRKAFLDNGPKTINQIRQDAVKDLGVFIPAPMAQGMRSDFFLEGPFMPPRMKMDRDPLGGLADMFGQMPGSGIGTGPGVIQDRFSPTMGRHRSNQLFNGHGGHIMPPTQSQFGEMGGKFMKSQGLSQLYHNQSQGLLSQLQGQSKDMPPRFSKKGQLNADEISLRPAQSFLMNKNQVPKLQPQITMIPPSAQPPRTQTPPLGQTPQLGLKTNPPLIQEKPAKTSKKPPPSKEELLKLTETVVTEYLNSGNANEAVNGVREMRAPKHFLPEMLSKVIILSLDRSDEDKEKASSLISLLKQEGIATSDNFMQAFLNVLDQCPKLEVDIPLVKSYLAQFAARAIISELVSISELAQPLESGTHFPLFLLCLQQLAKLQDREWLTELFQQSKVNMQKMLPEIDQNKDRMLEILEGKGLSFLFPLLKLEKELLKQIKLDPSPQTIYKWIKDNISPKLHVDKGFVNILMTSFLQYISSEVNPPSDETDSSSAPSKEQLEQEKQLLLSFKPVMQKFLHDHVDLQVSALYALQVHCYNSNFPKGMLLRFFVHFYDMEIIEEEAFLAWKEDITQEFPGKGKALFQVNQWLTWLETAEEEESEEEAD

SEQ ID NO: 3165 - DNA, 2137 bp, Homo sapiens
agctctttgttctccaagcaggaaggcggcctcctgcccacccgccgcctccaagcgggccccctcctgcaccataaatccccccgggactgacaaccgcctcgccacggcctcctctgctgacaaaaggggcagaaatcatcactctctctttcctccccgacgaagggcagcccctgccgactccaggtcctacacacctccccgccgggaggccaggctccgggacgcctgcggttccctggtcccgcgccaacggcctggccttccctgccggcccgcgtgcctcccgccacggcgctagcggtccgagccacgctccctcgccgtccgagcacagccgtgcctcggtccgccacggcctcgtccctgcaggcgtcggccatccggccatgaccgcacggcggcctggccaacactgacgttttccttctactccgtcagcaacaggaagagagaacaaaagccaagactttccaggtatctgaagcgcagaggaaatgctaaaaaagggtcgccccacccggctccgcctgcggccgccattttgtaccactcgagaagaagcgaccagggacggcggccattttagagcgctccactcggcggcggcagcggctcaactcaccttcaccgagaactcagcagctgccaccgcagctgcctcctcaggatccggtcgtcggggatagggaagggaggggaaaggggaacggaaaacaaaaaaaagggggagggaagggggaggaaggagtcggggacggcctcaaactcagctcagaggagtcgctgctgcagccgccactcggtacccgctgccacctccatagagctccgactcactgctggcgctaaggcgtgtctgaagccgaacttatcactcttggggcagccgaacccaccagagtctccccgaatggctccttcgccgcccaatcagcggcccggttgccgtctgccaccaatccgcgcagggcagcgaggaggagccacagggctgagctcggttgcggcgcagccccgccgcagtgcgcaaagccatattcgcgaagtctctgaggctgagccagtggcgtaaggggcgccgagcgctgtcgagatgagggttgcgtgcgtaaagccggagagcccttttgagtctgcgttggcgtggctgctgcttcttgctccagtccctttgttcactgagtccatatgccatgctccagttgtatcatccccttttccctcgacctcgttttctcaccgggaatatgggaagaaaacgcacccttacctcccccgaaccctgtgcgtggcgagtgagcattgcttttcttggcgccccttggagctgtggctgccctcgcgtgcctggcctctcccggggctgagcccttcgggttgaggcctggagcccccgggcgcagcgccgggacactacccggctccaggtcctcggcttcggcagccttagggaacccagaaagtagtggggaggaggcgagacgtgcgcccggatgccaaaggggagcttcattcagctccttattggcccaccccctgcagagtgaatgagaaagtgatgaaaggaaggggttgattttcttcgaaccgcacagaagaagctgcttttcccataggaatgtccggctggcggtcaccgaggaaaacaccctgtgtgtcagacttccgcgggtgtttggaggatttcgaattgctagctcctgtttttttttgttttttgtttgtttaagtgcacgttaaacattgtcagttgtgtattttcattttatttaaggttcaccataagaaataggattaagcttttcaaagccggcaagttgaactatttatacttaccaggtaatgtattgatgagtaccttattccatcgtttgcgacattgtagctatactaaaatggagtcatacttccataaacttaaacaacaaaaatgtccccatctccattttaacatgtagtacttttacagtgtatagtcaaaggcaagaatgtgtgtgttttaacatgaatgacttttaaagtgttcagtaagaggcaggattttcaaagacccaaacttaacctttgatgtgtcaaaacagctcttggtattagagcacctggtccttaatacaattttccggaaaattgc

SEQ ID NO: 3166 - protein, 95 aa, Homo sapiens
MRVACVKPESPFESALAWLLLLAPVPLFTESICHAPVVSSPFPSTSFSHREYGKKTHPYLPRTLCVASEHCFSWRPLELWLPSRAWPLPGLSPSG

SEQ ID NO: 3167 - DNA, 1264 bp, Homo sapiens
cgcgagccgggaccacgccgacccagcgtgcccaggccgaggaaagcgcggcggcggcagtccgaagacccaccgggactgaaagagaaggacgaggtcatcttcggacgggaggggcaagccagccatcctgggaccccaggcgtgcaggttctctttgagggtattccaccctgcaaaaagcatgtattcatggtcagctctcagcaaggccagtagcagagtggtaaaggccttggccctccaaggctgggaaaagacaatgacaagtcaaatccagacctatgttgtatgttggtctactaggtgactgtctcctggaaatgttatgcagctcagcaaggtgaagtttcgaaatcagtatgacaatgatgtcactgtttggagcccccagggcaggattcatcaaattgaatatgcaatggaagctgttaaacaaggttcagccacagttggtctgaaatcaaaaactcatgcagttttggttgcattgaaaagggcgcaatcagagcttgcagctcatcagaaaaaaattctccatgttgacaaccatattggtatctcaattgcggggcttactgctgatgctagactgttatgtaattttatgcgtcaggagtgtttggattccagatttgtattcgatagaccactgcctgtgtctcgtcttgtatctctaattggaagcaagacccagataccaacacaacgatatggccggagaccatatggtgttggtctccttattgctggttatgatgatatgggccctcacattttccaaacctgtccatctgctaactattttgactgcagagccatgtccattggagcccgttcccaatcagctcgtacttacttggagagacatatgtctgaatttatggagtgtaatttaaatgaactagttaaacatggtctgcgtgccttaagagagacgcttcctgcagaacaggacctgactacaaagaatgtttccattggaattgttggtaaagacttggagtttacaatctatgatgatgatgatgtgtctccattcctggaaggtcttgaagaaagaccacagagaaaggcacagcctgctcaacctgctgatgaacctgcagaaaaggctgatgaaccaatggaacattaagtgataagccagtctatatatgtattatcaaatatgtaagaatacaggcaccacatactgatgacaataatctatactttgaaccaaaagttgcagagtggtggaatgctatgttttaggaatcag

SEQ ID NO: 3168 - protein, 263 aa, Homo sapiens
MFRNQYDNDVTVWSPQGRIHQIEYAMEAVKQGSATVGLKSKTHAVLVALKRAQSELAAHQKKILHVDNHIGISIAGLTADARLLCNFMRQECLDSRFVFDRPLPVSRLVSLIGSKTQIPTQRYGRRPYGVGLLIAGYDDMGPHIFQTCPSANYFDCRAMSIGARSQSARTYLERHMSEFMECNLNELVKHGLRALRETLPAEQDLTTKNVSIGIVGKDLEFTIYDDDDVSPFLEGLEERPQRKAQPAQPADEPAEKADEPMEH

SEQ ID NO: 3169 - DNA, 346 bp, Homo sapiens; identical to SEQ ID NO: 243

SEQ ID NO: 3170 - DNA, 534 bp, Homo sapiens; identical to SEQ ID NO: 244

SEQ ID NO: 3171 - DNA, 529 bp, Rattus norvegicus
cgctctcctttcgttgcctgatcgccgccatcatgggtcgcatgcatgctcccgggaagggcctgtcccagtcggctttaccctatcgacgcagcgtccccacttggttgaagttgacatctgacgacgtgaaggagcagatttacaaactggccaagaagggccttactccttcacagatcggtgtaatcctgagagattcacatggtgttgcacaagtacgttttgtgacaggcaataaaattttaagaattcttaagtctaagggacttgctcctgatcttcctgaagatctctaccatttaattaagaaagcagttgctgttcgaaagcatcttgagaggaacagaaaggataaggatgctaaattccgtctgattctaatagagagccggattcaccgtttggctcgatattataagaccaagcgagtcctccctcccaattggaaatatgaatcatctacagcctctgccctggtcgcataaatttgtctgtgtactcaagcaataaaatgattgtttaacta

SEQ ID NO: 3172 - protein, 151 aa, Rattus norvegicus [sequence omitted]

SEQ ID NO: 3173 - DNA, 1504 bp, Homo sapiens
ggggagagaaggcccggaggggctctgcgttctgtagtggcgctgcttgggcccgtggcggattgtaagctgctggttttgcggctgggaagagcggcgagagggttcggcatttttcgtcgggatccccgcaaggatgagtgctgccagagagtctcacccgcatggggtgaagcgttcagcctccccagacgacgatctgggatctagcaattgggaggcagcagacttgggtaatgaagagagaaaacaaaagttcttgagacttatgggtgcaggaaagaaagaacatactggtcgtcttgttataggagatcacaaatcaacatctcacttccgaaccggggaagaagacaagaaaattaatgaagaactggagtctcaatatcagcaaagtatggacagtaaattatcaggaagatatcggcgacattgtggacttggcttcagtgaggtagaagaccatgatggagaaggtgatgtggctggagatgatgatgatgacgatgatgattcacctgatcctgaaagtccagatgattctgaaagcgattcagagtcagagaaagaagaatctgctgaagaactccaagctgctgagcaccctgatgaagtggaggatcccaaaaacaaaaaagatgcaaaaagcaattataaaatgatgtttgttaaatccagtggttcataactcccaaacgcttagtctttgtattaaaagtaagccttattgttacaatgcacagtggaggactgcttatagagcacagacctttgtattataatttttaaaaaggcccttttaaataattacaaagagtgtttgctttcaaatgccatgggttacacttttatgggcatgactataaccatttttgtaaagagtaagagttgtataaaataagaaataaatacagtactcaacttcctttcatattagcatcatcaaccctctaattcaccttatgggggaaatgcttctttttgtttgtgatagctattttatcatttccttcatatttttctcttataaaaatgtatttgatactgtgatatgttcacgaaaagtattctttaattattctttgttatagtagagctgttcattatggatatttctgctgccagtcacaatctaaattaattttggcaaaagattgggtacttagttgcctgttactgagttagctctactcttttggaccaaagcaacatgagagcaagtacttttcacacttgttaagatggagttataactgtcatacatttggaatattatgatcccaagtagtctttttataatttggattgtatcgtatgttagatttttgataaaatttggccaatttttacagaagaaattctctgatcatttagttctatctatttagaaatatgtaaaactggatttttttttaagtaatatgtgaccaaagttaattttgtcccaaaggtctaaataaagagcagtttcccacaaaaaaaaaaaaaaaaaaaaaaaaaaaaa

SEQ ID NO: 3174 - protein, 183 aa, Homo sapiens
MSAARESHPHGVKRSASPDDDLGSSNWEAADLGNEERKQKFLRLMGAGKKEHTGRLVIGDHKSTSHFRTGEEDKKINEELESQYQQSMDSKLSGRYRRHCGLGFSEVEDHDGEGDVAGDDDDDDDDSPDPESPDDSESDSESEKEESAEELQAAEHPDEVEDPKNKKDAKSNYKMMFVKSSGS

SEQ ID NO: 3175 - DNA, 1661 bp, Homo sapiens
tgctgcagccgctgccgccgattccggatctcattgccacgcgcccccgacgaccgcccgacgtgcattcccgattccttttggttccaagtccaatatggcaactctaaaggatcagctgatttataatcttctaaaggaagaacagaccccccagaataagattacagttgttggggttggtgctgttggcatggcctgtgccatcagtatcttaatgaaggacttggcagatgaacttgctcttgttgatgtcatcgaagacaaattgaagggagagatgatggatctccaacatggcagccttttccttagaacaccaaagattgtctctggcaaagactataatgtaactgcaaactccaagctggtcattatcacggctggggcacgtcagcaagagggagaaagccgtcttaatttggtccagcgtaacgtgaacatatttaaattcatcattcctaatgttgtaaaatacagcccgaactgcaagttgcttattgtttcaaatccagtggatatcttgacctacgtggcttggaagataagtggttttcccaaaaaccgtgttattggaagtggttgcaatctggattcagcccgattccgttacctgatgggggaaaggctgggagttcacccattaagctgtcatgggtgggtccttggggaacatggagattccagtgtgcctgtatggagtggaatgaatgttgctggtgtctctctgaagactctgcacccagatttagggactgataaagataaggaacagtggaaagaggttcacaagcaggtggttgagagtgcttatgaggtgatcaaactcaaaggctacacatcctgggctattggactctctgtagcagatttggcagagagtataatgaagaatcttaggcgggtgcacccagtttccaccatgattaagggtctttacggaataaaggatgatgtcttccttagtgttccttgcattttgggacagaatggaatctcagaccttgtgaaggtgactctgacttctgaggaagaggcccgtttgaagaagagtgcagatacactttgggggatccaaaaggagctgcaattttaaagtcttctgatgtcatatcatttcactgtctaggctacaacaggattctaggtggaggttgtgcatgttgtcctttttatctgatctgtgattaaagcagtaatattttaagatggactgggaaaaacatcaactcctgaagttagaaataagaatggtttgtaaaatccacagctatatcctgatgctggatggtattaatcttgtgtagtcttcaactggttagtgtgaaatagttctgccacctctgacgcaccactgccaatgctgtacgtactgcatttgccccttgagccaggtggatgtttaccgtgtgttatataacttcctggctccttcactgaacatgcctagtccaacattttttcccagtgagtcacatcctgggatccagtgtataaatccaatatcatgtcttgtgcataattcttccaaaggatcttattttgtgaactatatcagtagtgtacattaccatataatgtaaaaagatctacatacaaacaatgcaaccaactatccaagtgttataccaactaaaacccccaataaaccttgaacagtg

SEQ ID NO: 3176 - protein, 332 aa, Homo sapiens
MATLKDQLIYNLLKEEQTPQNKITVVGVGAVGMACAISILMKDLADELALVDVIEDKLKGEMMDLQHGSLFLRTPKIVSGKDYNVTANSKLVIITAGARQQEGESRLNLVQRNVNIFKFIIPNVVKYSPNCKLLIVSNPVDILTYVAWKISGFPKNRVIGSGCNLDSARFRYLMGERLGVHPLSCHGWVLGEHGDSSVPVWSGMNVAGVSLKTLHPDLGTDKDKEQWKEVHKQVVESAYEVIKLKGYTSWAIGLSVADLAESIMKNLRRVHPVSTMIKGLYGIKDDVFLSVPCILGQNGISDLVKVTLTSEEEARLKKSADTLWGIQKELQF

SEQ ID NO: 3177 - DNA, 522 bp, Homo sapiens
atgcccagtgccattagcaccaagtgttgcctgtccatcctgtggcctaccatctggtattactgcagccatgcaggatccctgtcaatgatcatgtgtgctcttctctgggccctatccctgctgctgaaattcctggagggcaatcttggaaacaatggcaacaagaccgaattggaacgggcttttggctactatggaccactccaaagtgtgtgggttgctagaaacccatctggctttgcttttgttgaatttgaagatccccgagatgcggctgatgcagttccatccccgagagctaaatggaagaacactatgtggctgctgtatgattatcgtaggagtagtcctccacctcgtcgcagatctccaagaaggagaagcttctctcacagctggagcaggtccctttctagagatgggagaagagagaggtcgctgtctcgggagagaaatcacaagccgtcccgatccttctctaggtctcgtagccgatctaggtcaaatgaaaggaaatag

SEQ ID NO: 3178 - DNA, 1757 bp, Homo sapiens
accacaaatcaggccggacaggagagggaggggtgggggacagtgggtgggcattcagactgccagcactttgctatctacagccggggctcccgagcggcagaaagttccggccactctctgccgcttgggttgggcgaagccaggaccgtgccgcgccaccgccaggatatggagctactgtcgccaccgctccgcgacgtagacctgacggcccccgacggctctctctgctcctttgccacaacggacgacttctatgacgacccgtgtttcgactccccggacctgcgcttcttcgaagacctggacccgcgcctgatgcacgtgggcgcgctcctgaaacccgaagagcactcgcacttccccgcggcggtgcacccggccccgggcgcacgtgaggacgagcatgtgcgcgcgcccagcgggcaccaccaggcgggccgctgcctactgtgggcctgcaaggcgtgcaagcgcaagaccaccaacgccgaccgccgcaaggccgccaccatgcgcgagcggcgccgcctgagcaaagtaaatgaggcctttgagacactcaagcgctgcacgtcgagcaatccaaaccagcggttgcccaaggtggagatcctgcgcaacgccatccgctatatcgagggcctgcaggctctgctgcgcgaccaggacgccgcgccccctggcgccgcagccgccttctatgcgccgggcccgctgcccccgggccgcggcggcgagcactacagcggcgactccgacgcgtccagcccgcgctccaactgctccgacggcatgatggactacagcggccccccgagcggcgcccggcggcggaactgctacgaaggcgcctactacaacgaggcgcccagcgaacccaggcccgggaagagtgcggcggtgtcgagcctagactgcctgtccagcatcgtggagcgcatctccaccgagagccctgcggcgcccgccctcctgctggcggacgtgccttctgagtcgcctccgcgcaggcaagaggctgccgcccccagcgagggagagagcagcggcgaccccacccagtcaccggacgccgccccgcagtgccctgcgggtgcgaaccccaacccgatataccaggtgctctgaggggatggtggccgcccacccgcccgagggatggtgcccctagggtccctcgcgcccaaaagattgaacttaaatgcccccctcccaacagcgctttaaaagcgacctctcttgaggtaggagaggcgggagaactgaagtttccgcccccgccccacagggcaaggacacagcgcggttttttccacgcagcacccttctcggagacccattgcgatggccgctccgtgttcctcggtgggccagagctgaaccttgaggggctaggttcagctttctcgcgccctcccccatgggggtgagaccctcgcagacctaagccctgccccgggatgcaccggttatttgggggggcgtgagacccagtgcactccggtcccaaatgtagcaggtgtaaccgtaacccacccccaacccgtttcccggttcaggaccactttttgtaatacttttgtaatctattcctgtaaataagagttgctttgccagagcaggagcccctggggctgtatttatctctgaggcatggtgtgtggtgctacagggaatttgtacgtttataccgcaggcgggcgagccgcgggcgctcgctcaggtgatcaaaataaaggcgctaatttata

SEQ ID NO: 3179 - protein, 320 aa, Homo sapiens
MELLSPPLRDVDLTAPDGSLCSFATTDDFYDDPCFDSPDLRFFEDLDPRLMHVGALLKPEEHSHFPAAVHPAPGAREDEHVRAPSGHHQAGRCLLWACKACKRKTTNADRRKAATMRERRRLSKVNEAFETLKRCTSSNPNQRLPKVEILRNAIRYIEGLQALLRDQDAAPPGAAAAFYAPGPLPPGRGGEHYSGDSDASSPRSNCSDGMMDYSGPPSGARRRNCYEGAYYNEAPSEPRPGKSAAVSSLDCLSSIVERISTESPAAPALLLADVPSESPPRRQEAAAPSEGESSGDPTQSPDAAPQCPAGANPNPIYQVL

SEQ ID NO: 3180 - DNA, 2915 bp, Homo sapiens
agttgcttcagcatcctggtgttgctgtgccgtgggtcctgtgcggtcacttagccaagatgcctgaggaaacccagacccaagaccaaccgatggaggaggaggaggttgagacattcgcctttcaggcagaaattgcccagttgatgtcattgatcatcaatactttctactcgaacaaagagatctttctgagagagctcatttcaaattcatcagatgcattggacaaaatctggtatgaaagcttgacagatcccagtaaattagactctgggaaagagctgcatattaaccttataccaaacaaacaagatcaaactctcactattgtggatactggaattggaatgaccaaggctgacttgatcaataaccttggtactatcgccaagtctgggaccaaagcgttcatggaagctttgcaggctggtgcagatatctctatgattggccagttcggtgttagtttttattctgcttatttggttgctgagaaagtaactgtgatcaccaaacataatgatgatgagcagtacgcctgggagtcctcagcagggggatcattcacagtgaggacagacacaggtgaacgtatgggtcgtggaacaaaggttatcctacacctgaaagaagaccaaactgagtacttggaggaacaaagaataaaggagattgtgaagaaacattctcagcttattggatatcccattactctttttgtggagaaggaatgtgataaagaagtcagcgacgatgagactgaagaaaaggaagacaaagaagaagaaaaagaaaaagaagagaaagagtccaaagacaaacctgaaattgaagatgttggttctgatgaggaagaagaaaagaaggatggtgacaagaagaagaagaagactaaggaaaagtacatcgaccaagaagaactcaacaaaacaaagcccatctggaccagaaatcccgacgatattactaatgaggagtacggagaattctgcaagaacttgaccaatgactgggaagatcacttggcagtgaagcatttttcagttgaaggacagttggaattcagagcccttctatttgtcccatgacgtgctccttttgacctgtttgaaaacagaaagaaaaagaacaacatcaaattgtatgtacgcagagatttcatcatggataactgtgaggagctaatccctgaatatctgaacttcattagaggggtggtagactcggaggatctccctctaaacatttcccgtgagatgttgcaacaaagtaaaattttgaaagttatcaggaaaaatttggtcaaaaaatgcttagaactctttacagaactggcggaagataaagagaactgcaagaaattctatgagcagttctctaaaaacataaagcttggaatacaagaagactctcaaaatcggaagaagctttcagagctgttaaggtactacacgtctgcctctggtgatgagatggtttctctcaaggactactgcaccagaatgaaggaaaaacagaaacatatctattatatcacaggtgagaccaaggaccaggtagctaactcagcctttgtggaacgtcttgggaaacatggcttagaagtgatctatatgattgagcccattgatgagtactgtgtccaacagctgaaggaatttgaggggaagactttagtgccagtcaccaaagaaggcctggaacttccagaggatgaagaaaagaaaaagaaataggaagagaaaaaacaatgtttgagaacctctgcaaaaccatgaaagacatattggagaaaaaagttgaaaaggtggttgtgtcaaaccgattggtgacgtctccatgctgtattgtcacaagcacatatggctggacagaaaacatggagagaatcatgaaagctcaagccctaagagacaactcaacaatgggttatatggcagccaagaaacacctggagataaatcctgatgattccattattgagaccttaaggcaaaaggcagaggctgataagaatgacaagtctgtgaaggatctgctcatcttgctttacgaaactgcactcctgtcttctggcttcagtctggaagatccccagacacatgctaacaggacctacaggatgatcaaacttggtctgggtattgatgaagatgatcctgctgctgatgataccagtgctgctgtaactgaagaaatgccgcccctcgaaggagatgacgacacatcatgcatggaagaagtagactaacctctggctaagggatgacttaactgttcaatactctacaattcctccgataatatatattcaaggatgtttttctttatttttgttaatattaaaaagtctgtacggcatgacaacaactactttaaggggaagataagatttctgtctactaagtgatgctgtgataccttaggcactaaagcagagctagtaatgctttttgagtttcacgtcggtttattttcacagattggggtaacgtgcgttgtaagatgtatgtaacatgatgttaactttgtggtctaaagtgtttagctgtcaagccggattcctaagtagaccaaatcttgttatcgaagtgttcctgagctataccttgatgtttagaaaagtatttgttacatcttgtaggatctactttttgaacttttcatcccctatagttgacaattctgcatgtactagtcctctagaaataggttaaactgaagcaacttgatggaaggatctctccacagggcttgttttccaaagaaaagtattgtttggaggagcaaagttataagcctacctaagcatatcataaagctgtttaaaaataactcagacccggtcttgtggatggaaatgtagtgctcgagtcacattcttcttatagttgtaacaaatacagatgagt

SEQ ID NO: 3181 - protein, 343 aa, Homo sapiens
MPEETQTQDQPMEEEEVETFAFQAEIAQLMSLIINTFYSNKEIFLRELISNSSDALDKIWYESLTDPSKLDSGKELHINLIPNKQDQTLTIVDTGIGMTKADLINNLGTIAKSGTKAFMEALQAGADISMIGQFGVSFYSAYLVAEKVTVITKHNDDEQYAWESSAGGSFTVRTDTGERMGRGTKVILHLKEDQTEYLEEQRIKEIVKKHSQLIGYPITLFVEKECDKEVSDDETEEKEDKEEEKEKEEKESKDKPEIEDVGSDEEEEKKDGDKKKKKTKEKYIDQEELNKTKPIWTRNPDDITNEEYGEFYKNLTNDWEDHLAVKHFSVEGQLEFRALLFVP

SEQ ID NO: 3182 - DNA, 572 bp, Homo sapiens
ggtgttgctgtgccgtgggtcctgtgcggtcacttagccaagatgcctgaggaaacccagacccaagaccaaccgatggaggaggaggaggttgagacattcgcctttcaggcagaaattgcccagttgatgtcattgatcatcaatactttctactcgaacaaagagatctttctgagagagctcatttcaaattcatcagatgcattggacctgcatattaaccttataccaaacaaacaagatcaaactctcactattgtggatactggaattggaatgaccaaggctgacttgatcaataaccttggtactatcgccaagtctgggaccaaagcgttcatggaagctttgcaggctggtgcagatatctctatgattggccagttcggtgttagtttttattctgcttatttggttgctgagaaagtaactgtgatcaccaaacataatgatgatgagataccagtgctgctgtaactgaagaaatgccgcccctcgaaggagatgacgacacatcatgcatggaagaagtagactaacctctggctaagggatgacttaactgttca

SEQ ID NO: 3183 - DNA, 911 bp, Homo sapiens
accaatgactgggaagatcacttggcagtgaagcatttttcagttgaaggacagttggaattcagagcccttctatttgtcccatgacgtgctccttttgacctgtttgaaaacagaaagaaaaagaacaacatcaaattgtatgtacgcagagatttcatcatggataactgtgaggagctaatccctgaatatctgaacttcattagaggggtggtagactcggaggatctccctctaaacatttcccgtgagatgttgcaacaaagtaaaattttgaaagttatcaggaaaaatttggtcaaaaaatgcttagaactctttacagaactggcggaagataaagagaactgcaagaaattctatgagcagttctctaaaaacataaagcttggaatacaagaagactctcaaaatcggaagaagctttcagagctgttaaggtactacacgtctgcctctggtgatgagatggtttctctcaaggactactgcaccagaatgaaggaaaaacagaaacatatctattatatcacaggtgagaccaaggaccaggtagctgaggggaagactttagtgccagtcaccaaagaaggcctggaacttccagaggatgaagaaaagaaaaagaaataggaagagaaaaaacaatgtttgagaacctctgcaaaatcatgaaagctcaagccctaagagacaactcaacaatgggttatatggcagccaagaaacacctggagataaatcctgatgattccattattgagaccttaaggcaaaaggcagaggctgataagaatgacaagtctgtgaaggatctgctcatcttgctttacgaaactgcactcctgtcttctggcttcagtctggaagatccccagacacatgctaacaggacctacaggatgatc

SEQ ID NO: 3184 - DNA, 944 bp, Homo sapiens
ggaatgtgataaagaagtcagcgacgatgagactgaagaaaaggaagacaaagaagaagaaaaagaaaaagaagagaaagagtccaaagacaaacctgaaattgaagatgttggttctgatgaggaagaagaaaagaaggatggtgacaagaagaagaagaagactaaggaaaagtacatcgaccaagaagaactcaacaaaacaaagcccatctggaccagaaatcccgacgatattactaatgaggagtacggagaattctgcaagaacttgaccaatgactgggaagatcacttggcagtgaagcatgaaaaatttggtcaaaaaatgcttagaactctttacagaactggcggaagataaagagaactgcaagaaattctatgagcagttctctaaaaacataaagcttggaatacaagaagactctcaaaatcggaagaagctttcagagctgttaaggtactacacgtctgcctctggtgatgagatggtttctctcaaggactactgcaccagaatgaaggaaaaacagaaacatatctattatatcacaggtgagaccaaggaccaggtagctaactcagcctttgtggaacgtcttgggaaacatggcttagaagtgatctatatgattgagcccattgatgagtactgtgtccaacagctgaaggaatttgaggggaagactttagtgccagtcaccaaagaaggcctggaacttccagaggatgaagaaaagaaaaagaaataggaagagaaaaaacaatgtttgagaacctctgcaaaaccatgaaagacatattggagaaaaaacaagcacatatggctggacagaaaacatggagagaatcatgaaagctcaagccctaagagacaactcaacaatgggttatatggcagccaagaaacacctggagataaatcctgatgattccattat

SEQ ID NO: 3185 - DNA, 1248 bp, Homo sapiens
ggtcggcgtggtcttgcgagtggagtgtccgctgtgcccgggcctgcaccatgagcgtcccggccttcatcgacatcagtgaagaagatcaggctgctgagcttcgtgcttatctgaaatctaaaggagctgagatttcagaagagaactcggaaggtggacttcatgttgatttagctcaaattattgaagcctgtgatgtgtgtctgaaggaggatgataaagatgttgaaagtgtgatgaacagtgtggtatccctactcttgatcctggaaccagacaagcaagaagctttgattgaaagcctatgtgaaaagctggtcaaatttcgcgaaggtgaacgcccgtctctgagactgcagttgttaagcaaccttttccacgggatggataagaatactcctgtaagatacacagtgtattgcagccttattaaagtggcagcatcttgtggggccatccagtacatcccaactgagctggatcaagttagaaaatggatttctgactggaatctcaccactgaaaaaaagcacacccttttaagactactttatgaggcacttgtggattgtaagaagagtgatgctgcttcaaaagtcatggtggaattgctcggaagttacacagaggacaatgcttcccaggctcgagttgatgcccacaggtgtattgtacgagcattgaaagatccaaatgcatttctttttgaccaccttcttactttaaaaccagtcaagtttttggaaggcgagcttattcatgatcttttaaccatttttgtgagtgctaaattggcatcatatgtcaagttttatcagaataataaagacttcattgattcacttggcctgttacatgaacagaatatggcaaaaatgagactacttacttttatgggaatggcagtagaaaataaggaaatttcttttgacacaatgcagcaagaacttcagattggagctgatgatgttgaagcatttgttattgacgccgtaagaactaaaatggtctactgcaaaattgatcagacccagagaaaagtagttgtcagtcatagcacacatcggacatttggaaaacagcagtggcaacaactgtatgacacacttaatgcctggaaacaaaatctgaacaaagtgaaaaacagccttttgagtctttctgatacctgagtttttatgcttataatttttgttctttgaaaaaaaagccctaaatcatagtaaaacattataaactaaaaaa

SEQ ID NO: 3186 - protein, 374 aa, Homo sapiens
MSVPAFIDISEEDQAAELRAYLKSKGAEISEENSEGGLHVDLAQIIEACDVCLKEDDKDVESVMNSVVSLLLILEPDKQEALIESLCEKLVKFREGERPSLRLQLLSNLFHGMDKNTPVRYTVYCSLIKVAASCGAIQYIPTELDQVRKWISDWNLTTEKKHTLLRLLYEALVDCKKSDAASKVMVELLGSYTEDNASQARVDAHRCIVRALKDPNAFLFDHLLTLKPVKFLEGELIHDLLTIFVSAKLASYVKFYQNNKDFIDSLGLLHEQNMAKMRLLTFMGMAVENKEISFDTMQQELQIGADDVEAFVIDAVRTKMVYCKIDQTQRKVVVSHSTHRTFGKQQWQQLYDTLNAWKQNLNKVKNSLLSLSDT

SEQ ID NO: 3187 - DNA, 3083 bp, Homo sapiens
aaaaactgcagccaacttccgaggcagcctcattgcccagcggaccccagcctctgccaggttcggtccgccatcctcgtcccgtcctccgccggcccctgccccgcgcccagggatcctccagctcctttcgcccgcgccctccgttcgctccggacaccatggacaagttttggtggcacgcagcctggggactctgcctcgtgccgctgagcctggcgcagatcgatttgaatataacctgccgctttgcaggtgtattccacgtggagaaaaatggtcgctacagcatctctcggacggaggccgctgacctctgcaaggctttcaatagcaccttgcccacaatggcccagatggagaaagctctgagcatcggatttgagacctgcaggtatgggttcatagaagggcacgtggtgattccccggatccaccccaactccatctgtgcagcaaacaacacaggggtgtacatcctcacatccaacacctcccagtatgacacatattgcttcaatgcttcagctccacctgaagaagattgtacatcagtcacagacctgcccaatgcctttgatggaccaattaccataactattgttaaccgtgatggcacccgctatgtccagaaaggagaatacagaacgaatcctgaagacatctaccccagcaaccctactgatgatgacgtgagcagcggctcctccagtgaaaggagcagcacttcaggaggttacatcttttacaccttttctactgtacaccccatcccagacgaagacagtccctggatcaccgacagcacagacagaatccctgctaccactttgatgagcactagtgctacagcaactgagacagcaaccaagaggcaagaaacctgggattggttttcatggttgtttctaccatcagagtcaaagaatcatcttcacacaacaacacaaatggctggtacgtcttcaaataccatctcagcaggctgggagccaaatgaagaaaatgaagatgaaagagacagacacctcagtttttctggatcaggcattgatgatgatgaagattttatctccagcaccatttcaaccacaccacgggcttttgaccacacaaaacagaaccaggactggacccagtggaacccaagccattcaaatccggaagtgctacttcagacaaccacaaggatgactgatgtagacagaaatggcaccactgcttatgaaggaaactggaacccagaagcacaccctcccctcattcaccatgagcatcatgaggaagaagagaccccacattctacaagcacaatccaggcaactcctagtagtacaacggaagaaacagctacccagaaggaacagtggtttggcaacagatggcatgagggatatcgccaaacacccaaagaagactcccattcgacaacagggacagctgcagcctcagctcataccagccatccaatgcaaggaaggacaacaccaagcccagaggacagttcctggactgatttcttcaacccaatctcacaccccatgggacgaggtcatcaagcaggaagaaggatggatatggactccagtcatagtataacgcttcagcctactgcaaatccaaacacaggtttggtggaagatttggacaggacaggacctctttcaatgacaacgcagcagagtaattctcagagcttctctacatcacatgaaggcttggaagaagataaagaccatccaacaacttctactctgacatcaagcaataggaatgatgtcacaggtggaagaagagacccaaatcattctgaaggctcaactactttactggaaggttatacctctcattacccacacacgaaggaaagcaggaccttcatcccagtgacctcagctaagactgggtcctttggagttactgcagttactgttggagattccaactctaatgtcaatcgttccttatcaggagaccaagacacattccaccccagtggggggtcccataccactcatggatctgaatcagatggacactcacatgggagtcaagaaggtggagcaaacacaacctctggtcctataaggacaccccaaattccagaatggctgatcatcttggcatccctcttggccttggctttgattcttgcagtttgcattgcagtcaacagtcgaagaaggtgtgggcagaagaaaaagctagtgatcaacagtggcaatggagctgtggaggacagaaagccaagtggactcaacggagaggccagcaagtctcaggaaatggtgcatttggtgaacaaggagtcgtcagaaactccagaccagtttatgacagctgatgagacaaggaacctgcagaatgtggacatgaagattggggtgtaacacctacaccattatcttggaaagaaacaaccgttggaaacataaccattacagggagctgggacacttaacagatgcaatgtgctactgattgtttcattgcgaatcttttttagcataaaattttctactctttttgttttttgtgttttgttctttaaagtcaggtccaatttgtaaaaacagcattgctttctgaaattagggcccaattaataatcagcaagaatttgatcgttccagttcccacttggaggcctttcatccctcgggtgtgctatggatggcttctaacaaaaactacacatatgtattcctgatcgccaacctttcccccaccagctaaggacatttcccagggttaatagggcctggtccctgggaggaaatttgaatgggtccattttgcccttccatagcctaatccctgggcattgctttccactgaggttgggggttggggtgtactagttacacatcttcaacagaccccctctagaaatttttcagatgcttctgggagacacccaaagggtgaagctatttatctgtagtaaactatttatctgtgtttttgaaatattaaaccctggatcagtcctttgatcagtataattttttaaagttactttgtcagaggcacaaaagggtttaaactgattcataataaatatctgtacttcttcgatcttc

SEQ ID NO: 3188 - DNA, 1726 bp, Homo sapiens
acttgagggagtagggggccgggtttgggccctcagttgctaagggctacccgagtgggaagcggttcaagagatggggtgaagggtggttcaccggttcttcaagtcctcagccttctggcccgcggaagttaagcaaccaagaggcgggcctaagaccggaagcaggaaggagggcgcaggaagcagggcgccgcagcctgtcgtacggtccttctgtgggtctgtcggtgccgagggcaggatggagaagctgcggctcctgggcctccgctaccaggagtacgtgactcgtcacccggccgccacggcccagctggagacagcagtgcggggcttcagttacctgctggcaggtcgattcgccgattcgcacgagctgtcagagctggtgtactctgcctctaacctgcttgtgctgctcaatgacgggatcctacggaaggagcttcggaaaaagttgcctgtgtcgctgtcccagcagaagctgctgacatggctgagcgtgctggagtgcgtggaggtgttcatggagatgggagctgccaaggtgtggggtgaagtgggccgctggcttgtcatcgccctcatccagctggccaaggctgtactgcggatgctcctgctgctctggttcaaggctggcctccagacttcaccccctatcgttccactggacagagagacccaggcacagcccccggatggtgaccacagccctggcaaccatgagcagtcctacgtggggaagcggtcaaaccgggtggtgcgaaccctccagaacacgccgtccctgcactccaggcactggggagctccccagcagcgggagggacggcagcagcagcatcacgaggagctgagtgcgacccccacccccctggggctgcaggagaccatcgcagagtttttgtacattgcccggccgctgctgcacttgctcagcctgggcctgtggggtcagaggtcgtggaaaccctggctcttggctggtgttgtggacgtgaccagcctgagcctcctgagtgacagaaagggcctgacccggagggagcggcgggagctgcggcgccggaccatcctgctgctctactacctgctgcgctctcctttctacgaccgcttctccgaggccaggatcctcttcctgctccagttgctggccgaccacgtccctggcgttggcctggtcacaacgtcccagcgtgcggcctctccgtgcctaccggccaggccccacacacagccctggtcgccaccagcgttcctcccaggacacccttgactgcgctctcctgtgacgatgccactgcagcccgcaccttgtcactgctgggccaagaagccttcactaggagtgggatccaggctcctctcccacagaaagcggtgacttcacctcatggagcccgggaagctgcttgcctcggcagccataggagcgaacactgctgctctctcgctggcccctggtgaggacaggaagcctgaacccgggtgatggctgaacgctgcccagcgtgtcttctggctggggccctccgtctgccccttctccgcagggccctgtggctctggcagccccaggccatggcgttgccagcctccctgtgacagagcctggtgaacagtgagcctggctcccacgcaagtggcactttaagccctgcatcctcggttgagagtaaaaggcttttctcccttaaaaaaaaaaaaaaaaaaaaaa

SEQ ID NO: 3189 - protein, 346 aa, Homo sapiens
MEKLRLLGLRYQEYVTRHPAATAQLETAVRGFSYLLAGRFADSHELSELVYSASNLLVLLNDGILRKELRKKLPVSLSQQKLLTWLSVLECVEVFMEMGAAKVWGEVGRWLVIALIQLAKAVLRMLLLLWFKAGLQTSPPIVPLDRETQAQPPDGDHSPGNHEQSYVGKRSNRVVRTLQNTPSLHSRHWGAPQQREGRQQQHHEELSATPTPLGLQETIAEFLYIARPLLHLLSLGLWGQRSWKPWLLAGVVDVTSLSLLSDRKGLTRRERRELRRRTILLLYYLLRSPFYDRFSEARILFLLQLLADHVPGVGLVTTSQRAASPCLPARPHTQPWSPPAFLPGHP

SEQ ID NO: 3190 - DNA, 1361 bp, Homo sapiens
acttgagggagtagggggccgggtttgggccctcagttgctaagggctacccgagtgggaagcggttcaagagatggggtgaagggtggttcaccggttcttcaagtcctcagccttctggcccgcggaagttaagcaaccaagaggcgggcctaagaccggaagcaggaaggagggcgcaggaagcagggcgccgcagcctgtcgtacggtccttctgtgggtctgtcggtgccgagggcaggatggagaagctgcggctcctgggcctccgctaccaggagtacgtgactcgtcacccggccgccacggcccagctggagacagcagtgcggggcttcagttacctgctggcaggtcgattcgccgattcgcacgagctgtcagagctggtgtactctgcctctaacctgcttgtgctgctcaatgacgggatcctacggaaggagcttcggaaaaagttgcctgtgtcgctgtcccagcagaagctgctgacatggctgagcgtgctggagtgcgtggaggtgttcatggagatgggagctgccaaggtgtggggtgaagtgggccgctggcttgtcatcgccctcatccagctggccaaggctgtactgcggatgctcctgctgctctggttcaaggctggcctccagacttcaccccctatcgttccactggacagagagacccaggcacagcccccggatggtgaccacagccctggcaaccatgagcagtcctacgtggggaagcggtcaaaccgggtggtgcgaaccctccagaacacgccgtccctgcactccaggcactggggagctccccagcagcgggagggacggcagcagcagcatcacgaggagctgagtgcgacccccacccccctggggctgcaggagaccatcgcagagtttttgtacattgcccggccgctgctgcacttgctcagcctgggcctgtggggtcagaggtcgtggaaaccctggctcttggctggtgttgtggacgtgaccagcctgagcctcctgagtgacagaaagggcctgacccggagggagcggcgggagctgcggcgccggaccatcctgctgctctactacctgctgcgctctcctttctacgaccgcttctccgaggccaggatcctcttcctgctccagttgctggccgaccacgtccctggcgttggcctggtcacaaggccgctcatggattacttgcccacctggcagaaaatctacttctacagttggggctgacagacctcccggaaggagggtgtggggaggggtggggcagggagcccctcttccctaataaaactgactccggcagcgtcaaaaaaaaaaaaaaaaaaaaaaaaaa

SEQ ID NO: 3191 - protein, 336 aa, Homo sapiens
MEKLRLLGLRYQEYVTRHPAATAQLETAVRGFSYLLAGRFADSHELSELVYSASNLLVLLNDGILRKELRKKLPVSLSQQKLLTWLSVLECVEVFMEMGAAKVWGEVGRWLVIALIQLAKAVLRMLLLLWFKAGLQTSPPIVPLDRETQAQPPDGDHSPGNHEQSYVGKRSNRVVRTLQNTPSLHSRHWGAPQQREGRQQQHHEELSATPTPLGLQETIAEFLYIARPLLHLLSLGLWGQRSWKPWLLAGVVDVTSLSLLSDRKGLTRRERRELRRRTILLLYYLLRSPFYDRFSEARILFLLQLLADHVPGVGLVTRPLMDYLPTWQKIYFYSWG

SEQ ID NO: 3192 - DNA, 2026 bp, Homo sapiens
aagaaaaattcaaagtggagacaagaaccattgctgttgactttgcatcagaagatatttatgataaaattaaaacaggcttggctggtcttgaaatcggcatcttagtgaacaacgtgggaatgtcgtatgagtatcctgaatactttttggatgttcctgacttggacaatgtgatcaagaaaatgataaatattaatattctttctgtttgtaagatgacacaattggtactgcctggcatggtggaaagatccaaaggggctattctgaacatttcatctggcagtggcatgctccctgtcccactcttgaccatctattctgcaaccaagacttttgtagatttcttctctcagtgcctccatgaggagtataggagcaagggcgtctttgtgcagagtgtcctgccatacttcgtagctacaaaactggctaaaatccggaagccaactttggataagccctctccggagacgtttgtgaagtctgcaattaaaacagtcggcctgcaatcccgaaccaatggatacctgatccatgctcttatgggctcgataatctcaaacctgccttcttggatttatttgaaaatagtcatgaatatgaacaagtctacacgggctcactatctgaagaaaaccaagaagaactaagcattgataactgcattgtaacttggccagatgctccagcatatgcacgttcactgcaaagcaccctactggttttgaaaatctgaccttgtcatttcaatagttattaacatgactaaatattatcttaattaagaggaaaatagaagttgcttttaggggtttctgacatatattctggatactatccgaggtaattttgaagtttaatataaatgctcatatcaaatgaatatagaactaatattgtcgggaacacctaatagaaaggaatactattatagcaaatcacagaatgatagactcaagcataaaacttggcagttttatctgcttcaaaatgccattgatcattattcctgtattttctctgaaactgattataaaaaccaatgtccagctactcttttgtttttgacacttgaagaaatggagatcgatttgatttgtttataagcagacacactgcaatttacaaagatctctttacggttttataaaattatcttccagtttgtacatttatatggaattgttctttatcaagggtagctaatgacatgaaaataattgtgaaatatggaattatttctgacacatgaagcccactaaactatgctttcttataatgcatatttcttctcagtttaaatgtatgtaaatatcgaagctatatggtatgatttataaagataaatgggccaaagtgtacattgagactggcagccatctatggtaccactgaaaccctgacccagaaaagtggcttgcttggacacccagctgcctttgtttctgcattaaaccaatattgatcacacatatgacacaggctagtcctataaaagtaatgacttcatagaaatggcattataatttttaagttgatactctacaggtagctattgatataattagttttaataaaacatgctgcaaccatggtatacaacaaaaatacatttctttggtgattgaaattaaggccgtatttacaatgacttaatataagactgacttttatcctgcttcataacttgtatggagaactcaccaagaaagaattcaatactgtgaaatatgcagcaagaagattggtctttacctaggctgtgtttcctaagctctgagttttcagcaccagtagatttgtattaaaagaaaaaaaaatggggccttagcttctggcttttaattttgccagctaaggacataaaacaaaaataaacaaacaaaaacaaatagccatctgctatcagcatcattatgtaaaagaaaatatattttagcccctaaaattaggaagaatgtaatctcagaataaaggttgtcatttaagttgaataaatatatagctttatgaaaaacac

SEQ ID NO: 3193 - DNA, 2212 bp, Homo sapiens
ccccgcccgtttgccagcgctcaggcaggagctctggactgggcgcgccgccgccctggagtgagggaagcccagtggaagggggtcccgggagccggctgcgatggacgccgtcttggaacccttcccggccgacaggctgttccccggatccagcttcctggacttgggggatctgaacgagtcggacttcctcaacaatgcgcactttcctgagcacctggaccactttacggagaacatggaggacttctccaatgacctgttcagcagcttctttgatgaccctgtgctggatgagaagagccctctattggacatggaactggactcccctacgccaggcatccaggcggagcacagctactccctgagcggcgactcagcgccccagagcccccttgtgcccatcaagatggaggacaccacccaagatgcagagcatggagcatgggcgctgggacacaaactgtgctccatcatggtgaagcaggagcagagcccggagctgcccgtggaccctctggctgccccctcgggccatggctgccgcggccgccatggccaccagccccgctgctgggcctcagccccttgtccaggctgcccatcccccaccaggccccgggagagatgactcagctgccagtgatcaaagcagagcctctggaggtgaaccagttcctcaaagtgacaccggaggacctggtgcagatgcctccgacgccccccagcagccatggcagtgacagcgacggctcccagagtccccgctctctgcccccctccagccctgtcaggcccatggcgcgctcctccacggccatctccacctccccactcctcactgcccctcacaaattacaggggacatcagggccactgctcctgacagaggaggagaagcggaccctgattgctgagggctaccccatccccacaaaactccccctcaccaaagccgaggagaaggccttgaagagagtccggaggaaaatcaagaacaagatctcagcccaggagagccgtcgtaagaagaaggagtatgtggagtgtctagaaaagaaggtggagacatttacatctgagaacaatgaactgtggaagaaggtggagaccctggagaatgccaacaggaccctgctccagcagctgcagaaactccagactctggtcaccaacaagatctccagaccttacaagatggccgccacccagactgggacctgcctcatgtgccctcccgaagcctcctattctacgatgacggggcaggcttatgggaagatggccgcagcaccctgctgcccatggagcccccagatggctgggaaatcaaccccggggggccggcagagcagcggccccgggaccacctgcagcatgatcacctggacagcacccacgagaccaccaagtacctgagtgaggcctggcctaaagacggtggaaacggcaccagccccgacttctcccactccaaggagtggttccacgacagggatctgggccccaacaccaccatcaaactctcctaggccatgccaagacccaggacataggacggacccctggtacccagaagaggagttcttgctcactaacccggatccgcctcgtgcccctgcctcctggagcttcccattccaggagaaaaggctccacttcccagcccttccttgcccctgacatttggactcttcccttgggccgaccactctgttctcattctccttcccaccaacatccatccgtccttctcagacaaaccactcactgggtaccccacctcctctctcatatgcccaacacgaccactgcctccctgcccccacacctgcacccaaacagacacatcaacgcaccccactcacagacaccccttaccccacccccactgtacagagaccaagaacagaaattgtttgtaaataatgaaccttattttttattattgccaatcccctaagatattgtattttacaaatctccctcttcccttcgcccctcccttgttttatattttatgaagttagtgcgggctttgctgctccctggcccaggaaagagggactccctgaccctcacctggcacccccctgctgctgcccaagccgctgggcctttttaattgccaaactgctctcttcatcagctcagcacatgctttaagaaagcaaaactaaaaaaaaaaaaaaaaagaggcagcatc

SEQ ID NO: 3194 - DNA, 3176 bp, Homo sapiens
ttttcatttaaatattcttcttttgcttctcttaagcagaagctggtctctgcttttcaccacctggaatcccagtcccaacagctgctcttctaacccttccggcctaattgtggaataatcgtttaaatcattaagagacagaatctgatgttggtagctctgacagacctctctagcttctttcataagccagggctcttgcccagctcctgcacacagcctgccagttctccatcttagcacagttccacttttccatagtagccagaaacatctggctgaagacaaacagttacaaagcagaagccaaggtgatgggatctgttgtcacatatggggctggcagctcaaggaatgtggttctctgctgaggagatgtggtaatccagtcagcccctggctgtcctgccaagggtctcaaggcagctagccagcagctgcatgcttggtgactggagctactactactgccaggctgcctggtgaaccttttttgattctcagtaggtaccatctgccaccaagcactaagaaagggagctgaagtacctagaaagttcccatttgggaagtgttcctgtcacccaagagacaggatcaaggcatctcaacaaggtttaggtcaaccaagtgtccacccagtctgactttaaacccccatgctacagaaaggtttctggttttccaggtcttggttgccccttacgtccaaaggcaccagatcactcagcaaatgtccctgaattcagtgattggtggaagggaagacaccagcttttttggatagctgtgctgtatcaccgtttaaggcaagaagtgaatttttgtctgagaacagggagcaagggtttaatgggacagtacagcatctccctctttgcacaggtaagtataggtgggtgtctccatctctaatgtcaagctctgaccataaaggaatgctttagtgggtaatgggcctgtcctagagctttgctacccagaattccccttctgtctggtgttacctcttggaattcactgtggtaatgttcagagaggcaaatgtgttgggccaacagacattcccaggagaacatcctccagagcattgatttattttaagatggcactaagtgacatctctccccaagagatgatctctgacacaatcccatatgaaaactcttctgaaaatgaattgctaattgctattagccttgatgcacttactctaagcagttcttcagacttctggatcagtgcttctcaaactgtggttcttggacaacttacagtagaactacatgggtccttattaaaatacagatccatttcagacctaaaatcagaataagaatgggagtcagagggacccaggattagtatttttaaaacaagatttcttcattttaggtgtctgccctcagcctcctcagcaaggcagagtcagtctcaggtctacttgccattgtggttttgtgcatggtgctttgattctttgctaattatgttgcaggcacagtggtgtttgtcttctgtttcctaccaaactcagcttttttggctgtctgcgcctcacctcccatcttttctaggctgttgctgctttccaggtttctcccttgaatagctgtatgtgctggagtcttttctttatgttgaatcattttaatttttgtccttatttctaggatctagggtccttttgatctttcccttctctgtttatcgtgctagtcctcccagttttaatgatgggtaagtcaggaaagtaagactgggcacatattttctctctcccttcccactgtccatttgcgattcctccagattggatatgctactctctatgactcagaatcttattttctgtctgattcccttctgcttgagccagagagggctttttgttaatttttgttttgtttttaggttaagcttttagagactgctgagctgaagttttgctgaattctcaaaacactaaactgcctgtgttccctctcggctttcattttctaattggaaccaggcacagtattgtaacagagaactgcaattaattttctaaaatagtggcaacttgcacagtataataactttggttgtaaccaagtgaaagcataataacaaaaatacaaaattactgatgaaaccagaaagagtcatataccacattcttcctttagtttgtatctcagtaagtgctgtgttacttaggaataggggcagaagcctgcaactgggcagggaggttcagggacatgaggacgaagctagggcattttgagctagaaagcaagaataaggattagtgctttcaacactggaattaacatggaccacccccccacctcccaataagtggggattgtaggcacataagtggtttagtaagaagtggaaaaggtttttctgtggagttcgagttccatcggctcccatccgggctatcctgccaccttagcggctgctcctccccaggatgcgggcagggggcctctctcccactccccacacaccgatttctgagtagcgataggggctggaggcttattttatggggtagggggccgctggtaggcgaagattgtccgagggagagggggaggatgaagccagtgcgtggcggagacctgccagatgttgatgcctaagaagaaccggattgccatttatgaactcctttttaaggagggagtcatggtggccaagaaggatgtccacatgcctaagcacccggagctggcagacaagaatgtgcccaaccttcatgtcatgaaggccatgcagtctctcaagtcccgaggctacgtgaaggaacagtttgcctggagacatttctactggtaccttaccaatgagggtatccagtatctccgtgattaccttcatctgcccccagagattgtgcctgccatcctacgccgtagccgtccagagactggcaggcctcggcctaaaggtctggagggtgagcgacctgcgagactcacaagaggggaagctgacagagatacctacagacggagtgctgtgccacctggtgccgacaagaaagccgaggctggggctgggtcagcaaccgaattccagtttagaggcggatttggtcgtggacgtggtcagccacctcagtaaaattggagaggattcttttgcattgaataaacttatagccaaaaaacctt

SEQ ID NO: 3195 - DNA, 556 bp, Homo sapiens
agatgttgatgcctaagaagaaccggattgccatttatgaactcctttttaaggagggagtcatggtggccaagaaggatgtccacatgcctaagcacccggagctggcagacaagaatgtgcccaaccttcatgtcatgaaggccatgcagtctctcaagtcccgaggctacgtgaaggaacagtttgcctggagacatttctactggtaccttaccaatgagggtatccagtatctccgtgattaccttcatctgcccccagagattgtgcctgccatcctacgccgtagccgtccagagactggcaggcctcggcctaaaggtctggagggtgagcgacctgcgagactcacaagaggggaagctgacagagatacctacagacggagtgctgtgccacctggtgccgacaagaaagccgaggctggggctgggtcagcaaccgaattccagtttagaggcggatttggtcgtggacgtggtcagccacctcagtaaaattggagaggattcttttgcattgaataaacttatagccaaaaaaccttaaaaaa

SEQ ID NO: 3196 - DNA, 785 bp, Homo sapiens
gcgaagcagcgcgggcagcgagatgcagcaccgaggcttcctcctcctcaccctcctcgccctgctggcgctcacctccgcggtcgccaaaaagaaagataaggtgaagaagggcggcccggggagcgagtgcgctgagtgggcctgggggccctgcacccccagcagcaaggattgcggcgtgggtttccgcgagggcacctgcggggcccagacccagcgcatccggtgcagggtgccctgcaactggaagaaggagtttggagccgactgcaagtacaagtttaaaaaatggggtgaagtgtgatgggggcacaggcaccaaagtccgccaaggcaccctgaagaaggcgcgctacaatgctcagtgccaggagaccatccgggtcccccagccctgcacccccaagaccaaagcaaaggccaaagccaagaaagggaagggaaaggactagacgccaagcctggatgccaaggagcccctggtgtcacatggggcctggcccacgccctccctctcccaggcccgagatgtgacccaccagtgccttctgtctgctcgttagctttaatcaatcatgccctgccttgtccctctcactccccagccccacccctaagtgcccaaagtggggagggacaagggattctgggaagcttgagcctcccccaaagcaatgtgagtcccagagcccgcttttgttcttccccacaattccattactaagaaacacatcaaataaactgactttttccccccaataaaagctcttcttttttaatat

SEQ ID NO: 3197 - DNA, 3490 bp, Homo sapiens
gcggcgcggagcgggcgtgctgagccccggccgccggcccggcatgggcgtctcccgcgggccctccgccggccggggctagggccggatggagccgcgggacggtagccccgaggcccggagcagcgactccgagtcggcttccgcctcgtccagcggctccgagcgcgacgccggtcccgagccggacaaggcgccgcggcgactcaacaagcggcgcttcccggggctgcggctcttcgggcacaggaaagccatcaccaagtcgggcctccagcacctggccccccctccgcccacccctggggccccgtgcagcgagtcagagcggcagatccggagtacagtggactggagcgagtcagcgacatatggggagcacatctggttcgagaccaacgtgtccggggacttctgctacgttggggagcagtactgtgtagccaggatgctgaagtcagtgtctcgaagaaagtgcgcagcctgcaagattgtggtgcacacgccctgcatcgagcagctggagaagataaatttccgctgtaagccgtccttccgtgaatcaggctccaggaatgtccgcgagccaacctttgtacggcaccactgggtacacagacgacgccaggacggcaagtgtcggcactgtgggaagggattccagcagaagttcaccttccacagcaaggagattgtggccatcagctgctcgtggtgcaagcaggcataccacagcaaggtgtcctgcttcatgctgcagcagatcgaggagccgtgctcgctgggggtccacgcagccgtggtcatcccgcccacctggatcctccgcgcccggaggccccagaatactctgaaagcaagcaagaagaagaagagggcatccttcaagaggaagtccagcaagaaagggcctgaggagggccgctggagacccttcatcatcaggcccaccccctccccgctcatgaagcccctgctggtgtttgtgaaccccaagagtgggggcaaccagggtgcaaagatcatccagtctttcctctggtatctcaatccccgacaagtcttcgacctgagccagggagggcccaaggaggcgctggagatgtaccgcaaagtgcacaacctgcggatcctggcgtgcgggggcgacggcacggtgggctggatcctctccaccctggaccagctacgcctgaagccgccaccccctgttgccatcctgcccctgggtactggcaacgacttggcccgaaccctcaactggggtgggggctacacagatgagcctgtgtccaagatcctctcccacgtggaggaggggaacgtggtacagctggaccgctgggacctccacgctgagcccaaccccgaggcagggcctgaggaccgagatgaaggcgccaccgaccggttgcccctggatgtcttcaacaactacttcagcctgggctttgacgcccacgtcaccctggagttccacgagtctcgagaggccaacccagagaaattcaacagccgctttcggaataagatgttctacgccgggacagctttctctgacttcctgatgggcagctccaaggacctggccaagcacatccgagtggtgtgtgatggaatggacttgactcccaagatccaggacctgaaaccccagtgtgttgttttcctgaacatccccaggtactgtgcgggcaccatgccctggggccaccctggggagcaccacgactttgagccccagcggcatgacgacggctacctcgaggtcattggcttcaccatgacgtcgttggccgcgctgcaggtgggcggacacggcgagcggctgacgcagtgtcgcgaggtggtgctcaccacatccaaggccatcccggtgcaggtggatggcgagccctgcaagcttgcagcctcacgcatccgcatcgccctgcgcaaccaggccaccatggtgcagaaggccaagcggcggagcgccgcccccctgcacagcgaccagcagccggtgccagagcagttgcgcatccaggtgagtcgcgtcagcatgcacgactatgaggccctgcactacgacaaggagcagctcaaggaggcctctgtgccgctgggcactgtggtggtcccaggagacagtgacctagagctctgccgtgcccacattgagagactccagcaggagcccgatggtgctggagccaagtccccgacatgccagaaactgtcccccaagtggtgcttcctggacgccaccactgccagccgcttctacaggatcgaccgagcccaggagcacctcaactatgtgactgagatcgcacaggatgagatttatatcctggaccctgagctgctgggggcatcggcccggcctgacctcccaacccccacttcccctctccccacctcaccctgctcacccacgccccggtcactgcaaggggatgctgcaccccctcaaggtgaagagctgattgaggctgccaagaggaacgacttctgtaagctccaggagctgcaccgagctgggggcgacctcatgcaccgagacgagcagagtcgcacgctcctgcaccacgcagtcagcactggcagcaaggatgtggtccgctacctgctggaccacgcccccccagagatccttgatgcggtggaggaaaacggggagacctgtttgcaccaagcagcggccctgggccagcgcaccatctgccactacatcgtggaggccggggcctcgctcatgaagacagaccagcagggcgacactccccggcagcgggctgagaaggctcaggacaccgagctggccgcctacctggagaaccggcagcactaccagatgatccagcgggaggaccaggagacggctgtgtagcgggccgcccacgggcagcaggagggacaatgcggccaggggacgagcgccttccttgcccacctcactgccacattccagtgggacggccacggggggacctaggccccagggaaagagccccatgccgccccctaaggagccgcccagacctagggctggactcaggagctgggggggcctcacctgttcccctgaggaccccgccggacccggaggctcacagggaacaagacacggctgggttggatatgcctttgccggggttctggggcagggcgctccctggccgcagcagatgccctcccaggagtggaggggctggagagggggaggccttcgggaagaggcttcctgggccccctggtcttcggccgggtccccagcccccgctcctgccccaccccacctcctccgggcttcctcccggaaactcagcgcctgctgcacttgcctgccctgccttgcttggcacccgctccggcgaccctccccgctcccctgtcatttcatcgcggactgtgcggcctgggggtggggggcgggactctcacggtgacatgtttacagctgggtgtgactcagtaaagtggatttttttttctttaaaaaaaa

SEQ ID NO: 3198 - protein, 928 aa, Homo sapiens
MEPRDGSPEARSSDSESASASSSGSERDAGPEPDKAPRRLNKRRFPGLRLFGHRKAITKSGLQHLAPPPPTPGAPCSESERQIRSTVDWSESATYGEHIWFETNVSGDFCYVGEQYCVARMLKSVSRRKCAACKIVVHTPCIEQLEKINFRCKPSFRESGSRNVREPTFVRHHWVHRRRQDGKCRHCGKGFQQKFTFHSKEIVAISCSWCKQAYHSKVSCFMLQQIEEPCSLGVHAAVVIPPTWILRARRPQNTLKASKKKKRASFKRKSSKKGPEEGRWRPFIIRPTPSPLMKPLLVFVNPKSGGNQGAKIIQSFLWYLNPRQVFDLSQGGPKEALEMYRKVHNLRILACGGDGTVGWILSTLDQLRLKPPPPVAILPLGTGNDLARTLNWGGGYTDEPVSKILSHVEEGNVVQLDRWDLHAEPNPEAGPEDRDEGATDRLPLDVFNNYFSLGFDAHVTLEFHESREANPEKFNSRFRNKMFYAGTAFSDFLMGSSKDLAKHIRVVCDGMDLTPKIQDLKPQCVVFLNIPRYCAGTMPWGHPGEHHDFEPQRHDDGYLEVIGFTMTSLAALQVGGHGERLTQCREVVLTTSKAIPVQVDGEPCKLAASRIRIALRNQATMVQKAKRRSAAPLHSDQQPVPEQLRIQVSRVSMHDYEALHYDKEQLKEASVPLGTVVVPGDSDLELCRAHIERLQQEPDGAGAKSPTCQKLSPKWCFLDATTASRFYRIDRAQEHLNYVTEIAQDEIYILDPELLGASARPDLPTPTSPLPTSPCSPTPRSLQGDAAPPQGEELIEAAKRNDFCKLQELHRAGGDLMHRDEQSRTLLHHAVSTGSKDVVRYLLDHAPPEILDAVEENGETCLHQAAALGQRTICHYIVEAGASLMKTDQQGDTPRQRAEKAQDTELAAYLENRQHYQMIQREDQETAV

SEQ ID NO: 3199 - DNA, 899 bp, Homo sapiens
catctgagtaacatggcggcggcggcggtagccaggctgtggtggcgcgggatcttgggggcctcggcgctgaccagggggactgggcgaccctccgttctgttgctgccggtgaggcgggagagcgccggggccgacacgcgccccactgtcagaccacggaatgatgtggcccacaagcagctctcagcttttggagagtatgtggctgaaatcttgcccaagtatgtccaacaagttcaggtgtcctgcttcaatgagttagaggtctgtatccatcctgatggcgtcatcccagtgctgactttcctcagggatcacaccaatgcacagttcaaatctctggttgacttgacagcagtggacgtcccaactcggcaaaaccgttttgagattgtctacaacctgttgtctctgcgcttcaactcacggatccgtgtgaagacctacacagatgagctgacgcccattgagtctgctgtctctgtgttcaaggcagccaactggtatgaaagggagatctgggacatgtttggagtcttctttgctaaccaccctgatctaagaaggatcctgacagattatggcttcgagggacatcctttccggaaagactttcctctatctggctatgttgagttacgttatgatgatgaagtgaagcgggtggtggcagagccggtggagttggcccaagagttccgcaaatttgacctgaacagcccctgggaggctttcccagtctatcgccaacccccggagagtctcaagcttgaagccggagacaagaagcctgatgccaagtagctccagggaacgcatgtggatcctagacagcgccttatctatgattgagtgtccgtgtaaataaattcctacttagacttaaaaaaaaaaaa

SEQ ID NO: 3200 - protein, 264 aa, Homo sapiens
MAAAAVARLWWRGILGASALTRGTGRPSVLLLPVRRESAGADTRPTVRPRNDVAHKQLSAFGEYVAEILPKYVQQVQVSCFNELEVCIHPDGVIPVLTFLRDHTNAQFKSLVDLTAVDVPTRQNRFEIVYNLLSLRFNSRIRVKTYTDELTPIESAVSVFKAANWYEREIWDMFGVFFANHPDLRRILTDYGFEGHPFRKDFPLSGYVELRYDDEVKRVVAEPVELAQEFRKFDLNSPWEAFPVYRQPPESLKLEAGDKKPDAK

SEQ ID NO: 3201 - DNA, 1545 bp, Homo sapiens
gattcgctgctccgcagcacggccggagctggtcgggtcaagagtcgggatttgtggggagaggttttccactggtcaagagaaggctttaagaaagacggtattaatctcccgttgcggctcccgcctggtcccatcttctgcccgctcctccaggaaatgaatctgctgccgaatattgagagtccagtgactcggcaggagaagatggcgaccgtgtgggatgaggccgagcaagatggaattggggaggaggtgctcaagatgtccacggaggagatcatccagcgcacacggctgctggacagtgagatcaagatcatgaagagtgaagtgttgagagtcacccatgagctccaagccatgaaggacaagataaaagagaacagtgagaaaatcaaagtgaacaagaccctgccgtaccttgtctccaacgtcatcgagctcctggatgttgatcctaatgaccaagaggaggatggtgccaatattgacctggactcccagaggaagggcaagtgtgctgtgatcaaaacctctacacgacagacgtacttccttcctgtgattgggttggtggatgctgaaaagctaaagccaggagacctggtgggtgtgaacaaagactcctatctgatcctggagacgctgcccacagagtatgactcgcgggtgaaggccatggaggtagacgagaggcccacggagcaatacagtgacattgggggtttggacaagcagatccaggagctggtggaggccattgtcttgccaatgaaccacaaggagaagtttgagaacttggggatccaacctccaaaaggggtgctgatgtatgggcccccagggacggggaagaccctcctggcccgggcctgtgccgcacagactaaggccaccttcctaaagctggctggcccccagctggtgcagatgttcattggagatggtgccaagctagtccgggatgcctttgccctggccaaggagaaagcgccctctatcatcttcattgatgagttggatgccatcggcaccaagcgctttgacagtgagaaggctggggaccgggaggtgcagaggacaatgctggagcttctgaaccagctggatggcttccagcccaacacccaagttaaggtaattgcagccacaaacagggtggacatcctggaccccgccctcctccgctcgggccgccttgaccgcaagatagagttcccgatgcccaatgaggaggcccgggccagaatcatgcagatccactcccgaaagatgaatgtcagtcctgacgtgaactacgaggagctggcccgctgcacagatgacttcaatggggcccagtgcaaggctgtgtgtgtggaggcgggcatgatcgcactgcgcaggggtgccacggagctcacccacgaggactacatggaaggcatcctggaggtgcaggccaagaagaaagccaacctacaatactacgcctagggcacacaggccagccccagtctcacggctgaagtgcgcaataaaagatggtttagggtccctgcc

SEQ ID NO: 3202 - DNA, 2291 bp, Homo sapiens
ggggccgcccggatcgccgccgccgccgccgcacgtacgtggcatgcctggatgtccctgccctggctgtggcatggcgggcccaaggctcctcttcctcactgcccttgccctggagctcttggaaagggctgggggttcccagccggccctccggagccgggggactgcgacggcctgtcgcctggacaacaaggaaagcgagtcctggggggctctgctgagcggagagcggctggacacctggatctgctccctcctgggttccctcatggtggggctcagtggggtcttcccgttgcttgtcattcccctagagatggggaccatgctgcgctcagaagctggggcctggcgcctgaagcagctgctcagcttcgccctggggggactcttgggcaatgtgtttctgcatctgctgcccgaagcctgggcctacacgtgcagcgccagccctggtggtgaggggcagagcctgcagcagcagcaacagctggggctgtgggtcattgctggcatcctgaccttcctggcgttggagaagatgttcctggacagcaaggaggaggggaccagccaggcccccaacaaagaccccactgctgctgccgccgcgctcaatggaggccactgtctggcccagccggctgcagagcccggcctcggtgccgtggtccggagcatcaaagtcagcggctacctcaacctgctggccaacaccatcgataacttcacccacgggctggctgtggctgccagcttccttgtgagcaagaagatcgggctcctgacaaccatggccatcctcctgcatgagatcccccatgaggtgggcgactttgccatcctgctccgggccggctttgaccgatggagcgcagccaagctgcaactctcaacagcgctggggggcctactgggcgctggcttcgccatctgtacccagtcccccaagggagtagttgggtgttctcccgctgcagaggagacggcagcctgggtcctgcccttcacctctggcggctttctctacatcgccttggtgaacgtgctccctgacctcttggaagaagaggacccgtggcgctccctgcagcagctgcttctgctctgtgcgggcatcgtggtaatggtgctgttctcgctcttcgtggattaactttccctgatgccgacgcccctgccccctgcagcaataagatgctcggattcactctgtgaccgcatatgtgagaggcagagagggcgagtggctgcgagagagaatgagcctcccgccagacaggagggaggtgcgtgtggatgtatgtggtgtgcacatgtggccagaggtgtgtgcgcgagaccgacactgtgatccctgtgctgggtccggggcccagtgtagcgcctgtccccagccatgctgtggttacctctccttgccgccctgtcaccttcacctcccggagtaagcagcgaggaagagcagcactggtcccaagcagaggccttgccctgctgggaccccgggagtgagagcagcccaaggatccagggtgcagggaactccagagctgcccacctcccactgccccctcagcacacacacagtccccaggcggcctaggggccaaggctggggcggctttggtcccttttcctggcccttccttccccacttctaagccaaagaaaggagaggcaggtgctcctgtaccccagccccactcagcactgacagtccccagctcctagtagtgagctgggaggcgcttcctaagaccctttcctcagggctgccctgggagctcattcctggccaacacgccctggcagcaccagcagctcttgccacctccagctgccaaacagcagcctgccgggcagggagcagccccaggccagagaggcctcccggtccagctcagggatgctcctgccagcacaggggccagggactcctggagcaggcacatagtgagcccgggcagccctgcccagctcaggcccctttccttccccattgaggttggggtaggtgggggcggtgagggctccacgttgtcagcgctcaggaatgtgctccggcagagtgctgaagccataatccccaaccatttcccttggctgacgcccaggtactcagctggcccactccacagccaggcctggccctgcccttcaccgtggatgttttcagaagtggccatcgagaggtctggatggttttatagcaactttgctgtgattccgtttgtatctgtaaatatttgttctatagataagatacaaataaatattatccacat

SEQ ID NO: 3203 - protein, 371 aa, Homo sapiens
MPGCPCPGCGMAGPRLLFLTALALELLERAGGSQPALRSRGTATACRLDNKESESWGALLSGERLDTWICSLLGSLMVGLSGVFPLLVIPLEMGTMLRSEAGAWRLKQLLSFALGGLLGNVFLHLLPEAWAYTCSASPGGEGQSLQQQQQLGLWVIAGILTFLALEKMFLDSKEEGTSQAPNKDPTAAAAALNGGHCLAQPAAEPGLGAVVRSIKVSGYLNLLANTIDNFTHGLAVAASFLVSKKIGLLTTMAILLHEIPHEVGDFAILLRAGFDRWSAAKLQLSTALGGLLGAGFAICTQSPKGVVGCSPAAEETAAWVLPFTSGGFLYIALVNVLPDLLEEEDPWRSLQQLLLLCAGIVVMVLFSLFVD

SEQ ID NO: 3204 - DNA, 1528 bp, Homo sapiens
cagtgccttggtaatgaccagggctccagaaagagatgtccttgtggctgggggcccctgtgcctgacattcctcctgactctgcggtggagctgtggaagccaggcgcacaggatgcaagcagccaggcccagggaggcagcagctgcatcctcagagaggaagccaggatgccccactctgctgggggtactgcaggggtggggctggaggctgcagagcccacagccctgctcaccagggcagagcccccttcagaacccacagagatccgtccacaaaagcggaaaaaggggccagcccccaaaatgctggggaacgagctatgcagcgtgtgtggggacaaggcctcgggcttccactacaatgttctgagctgcgagggctgcaagggattcttccgccgcagcgtcatcaagggagcgcactacatctgccacagtggcggccactgccccatggacacctacatgcgtcgcaagtgccaggagtgtcggcttcgcaaatgccgtcaggctggcatgcgggaggagtgtgtcctgtcagaagaacagatccgcctgaagaaactgaagcggcaagaggaggaacaggctcatgccacatccttgccccccaggcgttcctcacccccccaaatcctgccccagctcagcccggaacaactgggcatgatcgagaagctcgtcgctgcccagcaacagtgtaaccggcgctccttttctgaccggcttcgagtcacgccttggcccatggcaccagatccccatagccgggaggcccgtcagcagcgctttgcccacttcactgagctggccatcgtctctgtgcaggagatagttgactttgctaaacagctacccggcttcctgcagctcagccgggaggaccagattgccctgctgaagacctctgcgatcgaggtgatgcttctggagacatctcggaggtacaaccctgggagtgagagtatcaccttcctcaaggatttcagttataaccgggaagactttgccaaagcagggctgcaagtggaattcatcaaccccatcttcgagttctccagggccatgaatgagctgcaactcaatgatgccgagtttgccttgctcattgctatcagcatcttctctgcagaccggcccaacgtgcaggaccagctccaggtggagaggctgcagcacacatatgtggaagccctgcatgcctacgtctccatccaccatccccatgaccgactgatgttcccacggatgctaatgaaactggtgagcctccggaccctgagcagcgtccactcagagcaagtgtttgcactgcgtctgcaggacaaaaagctcccaccgctgctctctgagatctgggatgtgcacgaatgactgttctgtccccatattttctgttttcttggccggatggctgaggcctggtggctgcctcctagaagtggaacagactgagaagggcaaacattcctgggagctgggcaaggagatcctcccgtggcattaaaagagagtcaaagggt

SEQ ID NO: 3205 - protein, 447 aa, Homo sapiens
MSLWLGAPVPDIPPDSAVELWKPGAQDASSQAQGGSSCILREEARMPHSAGGTAGVGLEAAEPTALLTRAEPPSEPTEIRPQKRKKGPAPKMLGNELCSVCGDKASGFHYNVLSCEGCKGFFRRSVIKGAHYICHSGGHCPMDTYMRRKCQECRLRKCRQAGMREECVLSEEQIRLKKLKRQEEEQAHATSLPPRRSSPPQILPQLSPEQLGMIEKLVAAQQQCNRRSFSDRLRVTPWPMAPDPHSREARQQRFAHFTELAIVSVQEIVDFAKQLPGFLQLSREDQIALLKTSAIEVMLLETSRRYNPGSESITFLKDFSYNREDFAKAGLQVEFINPIFEFSRAMNELQLNDAEFALLIAISIFSADRPNVQDQLQVERLQHTYVEALHAYVSIHHPHDRLMFPRMLMKLVSLRTLSSVHSEQVFALRLQDKKLPPLLSEIWDVHE

SEQ ID NO: 3206 - DNA, 2109 bp, Homo sapiens
ttgctgcatagattacaacggtgatggcgggcaagcggtccggctggagccgggcggctctcctccagctccttctcggcgtgaacctggtggtgatgccgcccacccgggcccggagtctgcgcttcgttaccttgctgtaccgccatggagaccgttcaccagtgaagacatatcccaaggacccctatcaggaagaagaatggccccaggggtttggtcagttaaccaaggaggggatgctacagcactgggaactgggccaggccctgcggcagcgctatcacggcttcctaaacacctcttatcaccggcaagaggtttatgtgcgaagcacagactttgaccggactctcatgagtgctgaggccaacctggctggactcttccctcccaacgggatgcagcgcttcaacccgaacatctcgtggcagcctattcctgtgcacactgtgcccatcactgaggacaggctgctgaagttcccgttgggcccatgtccccgttatgagcagctgcagaacgagacccggcagacaccagagtatcagaatgagagttctcggaatgcacaatttctggacatggtggccaacgagacagggcttacagacctgacactggagaccgtctggaatgtctatgacacactcttctgtgagcaaacgcacgggctgcgcctgccgccctgggcctcaccccaaaccatgcagcgtctcagccggctaaaggacttcagcttccgcttcctcttcggaatctaccagcaggcggagaaggcccggcttcaggggggagtcctgctggctcagataaggaagaacctgaccctaatggcgaccacctcccagctccccaagctgctggtttactctgcgcacgacactaccctggttgccctgcaaatggcactggatgtctacaatggtgaacaagccccctacgcctcctgccacatatttgaactgtaccaggaagattctgggaatttctcagtggagatgtactttcggaacgagagtgacaaggccccctggccgctcagcctgcctggctgccctcaccgctgcccactgcaggacttccttcgcctcacagagcccgtcgtgcccaaggattggcagcaggagtgccagctggcaagcggtcctgcagacacagaggtgattgtggccttggctgtatgtggctccatcctcttcctcctcatagtgctgctcctcaccgtcctcttccggatgcaggcccagcctcctggctaccgccacgtcgcagatggggaggaccacgcctgacaaccactcagcccccttccctccacctcctaggggaggtgggctgggccctcgctcctgactgttgctgctccccagcccatggacaggagatcctgggttgggcctccctctgatgaccccagccagatgagcgagtggggctcagcgtggcccatggtgcctgtcactcagcattcccatgcctgatgtttaccaagtgctgtgttggacactggctttctccaaacaggatttgcctcctccacgctccctacacacctgagatgtaaactggcagtcagtgttcactcaggacctaggattagaaaatggcagagttggtgctggatccaccttgcacttctatcaagccctgttctttttcctccagcctgaagtcttcggcaaatagctcagagggacacggtcttgcctctcagtgcttattttagtgggaaaaacagctaataccaggggtacaaacattggctcccaaggaactggatcacccaacagccagccagccacatttccctgtgtctggctagagccaccattagactcagacagaatgcttcaggaatcgttgtcaccccttcaactggagcaggacggaaggttgtctgtacttgggagggagtggggagtggtgggaagggagttgcttgtcacacgaatcaggaaactgctctccctcagctgggctggggtctccagggacctgagctacatgcaggttgtgagctggaaaagaaagttctagactgtggcccagaatagggctggggcagctcccagagaatgaatagtgctgtttcctattggactgata

SEQ ID NO: 3207 - protein, 423 aa, Homo sapiens
MAGKRSGWSRAALLQLLLGVNLVVMPPTRARSLRFVTLLYRHGDRSPVKTYPKDPYQEEEWPQGFGQLTKEGMLQHWELGQALRQRYHGFLNTSYHRQEVYVRSTDFDRTLMSAEANLAGLFPPNGMQRFNPNISWQPIPVHTVPITEDRLLKFPLGPCPRYEQLQNETRQTPEYQNESSRNAQFLDMVANETGLTDLTLETVWNVYDTLFCEQTHGLRLPPWASPQTMQRLSRLKDFSFRFLFGIYQQAEKARLQGGVLLAQIRKNLTLMATTSQLPKLLVYSAHDTTLVALQMALDVYNGEQAPYASCHIFELYQEDSGNFSVEMYFRNESDKAPWPLSLPGCPHRCPLQDFLRLTEPVVPKDWQQECQLASGPADTEVIVALAVCGSILFLLIVLLLTVLFRMQAQPPGYRHVADGEDHA

SEQ ID NO: 3208 - DNA, 1820 bp, Homo sapiens
gagctccaagctggtttgaacaagccctgggcatgtttggcgggaagttggcttagctcggctacctgtggccccgcagttttgtagtccccgccttgtttctccccagaggcctctcaatcctccctccatgatcttcgcatagagcacagtaccccttcacacggaggacgcgatggctcccaagaaacgcccagaaacccagaagacctccgagattgtattacgccccaggaacaagaggagcaggagtcccctggagctggagcccgaggccaagaagctctgtgcgaagggctccggtcctagcagaagatgtgactcagactgcctctgggtggggctggctggcccacagatcctgccaccatgccgcagcatcgtcaggaccctccaccagcataagctgggcagagcttcctggccatctgtccagcaggggctccagcagtcctttttgcacactctggattcttaccggatattacaaaaggctgccccctttgacaggagggctacatccttggcgtggcacccaactcaccccagcaccgtggctgtgggttccaaagggggagatatcatgctctggaattttggcatcaaggacaaacccaccttcatcaaagggattggagctggagggagcatcactgggctgaagtttaaccctctcaataccaaccagttttacgcctcctcaatggagggaacaactaggctgcaagactttaaaggcaacattctacgagtttttgccagctcagacaccatcaacatctggttttgtagcctggatgtgtctgctagtagccgaatggtggtcacaggagacaacgtggggaacgtgatcctgctgaacatggacggcaaagagctttggaatctcagaatgcacaaaaagaaagtgacgcatgtggccctgaacccatgctgtgattggttcctggccacagcctccgtagatcaaacagtgaaaatttgggacctgcgccaggttagagggaaagccagcttcctctactcgctgccgcacaggcatcctgtcaacgcagcttgtttcagtcccgatggagcccggctcctgaccacggaccagaagagcgagatccgagtttactctgcttcccagtgggactgccccctgggcctgatcccgcaccctcaccgtcacttccagcacctcacacccatcaaggcagcctggcatcctcgctacaacctcattgttgtgggccgatacccagatcctaatttcaaaagttgtaccccttatgaattgaggacgatcgacgtgttcgatggaaactcagggaagatgatgtgtcagctctatgacccagaatcttctggcatcagttcgcttaatgaattcaatcccatgggggacacgctggcctctgcaatgggttaccacattctcatctggagccaggaggaagccaggacacggaagtgagagacactaaagaaggtgtgggccagacaaggccttggagcccacacatgggatcaagtcctgcaagcagaggtggtgatttgttaaagggccaaaagtatccaaggttagggttggagcaggggtgctgggacctggggcactgtgggactgggacacttttatgttaatgctctggacttgcctccagagactgctccagagttggtgacacagctgtcccaagggcccctctgtatctagcctggaaccaaggttatcttggaactaaatgacttttctcctctcagtgggtggtagcagagggatcaagcagttatttgatttgtgctcttttgatatggccaataaaaccataccg

SEQ ID NO: 3209 - protein, 427 aa, Homo sapiens
MAPKKRPETQKTSEIVLRPRNKRSRSPLELEPEAKKLCAKGSGPSRRCDSDCLWVGLAGPQILPPCRSIVRTLHQHKLGRASWPSVQQGLQQSFLHTLDSYRILQKAAPFDRRATSLAWHPTHPSTVAVGSKGGDIMLWNFGIKDKPTFIKGIGAGGSITGLKFNPLNTNQFYASSMEGTTRLQDFKGNILRVFASSDTINIWFCSLDVSASSRMVVTGDNVGNVILLNMDGKELWNLRMHKKKVTHVALNPCCDWFLATASVDQTVKIWDLRQVRGKASFLYSLPHRHPVNAACFSPDGARLLTTDQKSEIRVYSASQWDCPLGLIPHPHRHFQHLTPIKAAWHPRYNLIVVGRYPDPNFKSCTPYELRTIDVFDGNSGKMMCQLYDPESSGISSLNEFNPMGDTLASAMGYHILIWSQEEARTRK

SEQ ID NO: 3210 - DNA, 1903 bp, Homo sapiens
ggcacgaggaggactcgggccggagcgtggccggacccccacccgccgaggggcccagggaggacgcggcagagtcacggtggcagcattgagagttggacacccgggtccttgaagtgatctctaggccccagccccaaatccgccaccattccgtgctgcggggacaccatggctccagaagaggacgctggaggggaggccttagggggcagtttctgggaggctggcaactacaggcgcacggtacagcgggtggaggacgggcaccggctgtgcggggacctggtcagctgcttccaggagcgcgcccgcatcgagaaggcttatgcccagcagttggctgactgggcccgaaagtggagggggaccgtggagaagggcccccagtatggcacactggagaaggcctggcatgcctttttcacggcggctgagcggctgagcgcgctgcacctggaggtgcgggagaagctgcaagggcaggacagtgagcgggtgcgcgcctggcagcggggggctttccaccggcctgtgctgggcggcttccgcgagagccgggcggccgaggacggcttccgcaaggcccagaagccctggctgaagaggctgaaggaggttgaggcttccaagaaaagctaccacgcagcccggaaggatgagaagaccgcccagacgagggagagccacgcaaaggcagacagcgccgtctcccaggagcagctgcgcaaactgcaggaacgggtggaacgctgtgccaaggaggccgagaagacaaaagctcagtatgagcagacgctggcagagctgcatcgctacactccacgctacatggaggacatggaacaggcctttgagacctgccaggccgccgagcgccagcggcttcttttcttcaaggatatgctgctcaccttacaccagcacctggacctttccagcagtgagaagttccatgaactccaccgtgacttgcaccagggcattgaggcagccagtgacgaagaggatctgcgctggtggcgcagcacccacgggccaggcatggccatgaactggccacagttcgaggagtggtccttggacacacagaggacaatcagccggaaagagaagggtggccggagccctgatgaggttaccctgaccagcattgtgcctacaagagatggcaccgcacccccaccccagtccccggggtccccaggcacggggcaggatgaggagtggtcagatgaagagagtccccggaaggctgccaccggggttcgggtgagggcactctatgactacgctggccaggaagctgatgagctgagcttccgagcaggggaggagctgctgaagatgagtgaggaggacgagcagggctggtgccaaggccagttgcagagtggccgcattggcctgtaccctgccaactacgtggagtgtgtgggcgcctgagtgtcctgacagcccttctgcaacgtttacccaccctggttcagagcccagcttctcctggagagccggaccctcagggccctgaaccgtcgctctctggctgctcctctgtcccttgagggaggaagtcctgggacccagggaggggaggggcctttgtctagggaagggactggtagggaagggacgagtctaggctgagggcaagatgggaggtcagaggtgacagaagcgttcaggggtgcctgggcctccccaggagctgtggactcagttcctgacctctgctttggggttcctggggtgggcttggggtgagtgtagttctggcctagcagcaccctcttgtggcttgttctagcgtgtattaaaacttgacacacacccacacacaaaaccaaaaaaaaaaaaaaaaaaaaaaaaaaaaaaaaaaaaaaaaaaaaaaaaaaaaaaaaaa

SEQ ID NO: 3211 - protein, 424 aa, Homo sapiens [sequence omitted]

SEQ ID NO: 3212 - DNA, 818 bp, Homo sapiens
tgggaaggagagaaaatggcggcggagccgaacaagaccgaaatccagactctttttaagaggcttcgcgcagttccaaccaacaaggcctgtttcgactgcggcgccaagaatccgagttgggccagcatcacgtacggtgttttcttgtgcattgactgttccggggtgcaccgctccctgggcgtccatctgagcttcatcaggtccacagagttggattccaactggaactggttccagctgaggtgtatgcaggtcggcgggaatgccaatgcgacggctttttttcgccaacatggatgcacagccaatgatgccaacaccaaatataatagccgagctgcccagatgtaccgggagaagatccggcagctggggagtgcggccctggctaggcatggcactgatctttggatagacaacatgagtagtgccgttcctaatcactccccagagaagaaggactctgatttcttcacagaacacactcaaccccctgcctgggatgcgccagccactgagccttcagggacccagcagccagccccgtctacagagagcagtggcctggcacagccggagcatggccccaacacagacctgcttggcacctcacccaaagcctcactggaactgaaaagctccatcattggcaagaagaagccagagcttcagtgagattgagcggcaggctcaggtggcagagaagctccgtgagcagcaggcagccgatgccaagaagcaggcggaggagtccatggtcgcctccatgcgtctggcctaccaggagctccagattgatcgtaagaaagagg

SEQ ID NO: 3213 - protein, 521 aa, Homo sapiens
MAAEPNKTEIQTLFKRLRAVPTNKACFDCGAKNPSWASITYGVFLCIDCSGVHRSLGVHLSFIRSTELDSNWNWFQLRCMQVGGNANATAFFRQHGCTANDANTKYNSRAAQMYREKIRQLGSAALARHGTDLWIDNMSSAVPNHSPEKKDSDFFTEHTQPPAWDAPATEPSGTQQPAPSTESSGLAQPEHGPNTDLLGTSPKASLELKSSIIGKKKPAAAKKGLGAKKGLGAQKVSSQSFSEIERQAQVAEKLREQQAADAKKQAEESMVASMRLAYQELQIDRKKEEKKLQNLEGKKREQAERLGMGLVSRSSVSHSVLSEMQVIEQETPVSAKSSRSQLDLFDDVGTFASGPPKYKDNPFSLGESFGSRWDTDAAWGMDRVEEKEPEVTISSIRPISERATNRREVESRSSGLESSEARQKFAGAKAISSDMFFGREVDAEYEARSRLQQLSGSSAISSSDLFGDMDGAHGAGSVSLGNVLPTADIAQFKQGVKSVAGKMAVLANGVMNSLQDRYGSY

SEQ ID NO: 3214 - DNA, 1312 bp, Homo sapiens
gaaaaagggggtttcgtttacatgctgtgagatcaccgcaaacctacctcactgtgttgaaacgggacaaatacaatagaacgcattgggtggtgtgtgtctgatcctgggttcttgtctcccctaaatgctgccccccaagttactgtatttgtctgggctttgtaggacttcactaagttgattgctaggtggcctagtttgtgtaaatataatgtattggtcttcctccgtgttctttgggggttttgtttacaaagttctttttgtattgagagaaaaatagccaaagcatctttgacagaagtttctgcaccaggcaaaaagatctgaaacattagtttggggggcccgcttcttaaagtggggatcttgaaccatcctttcttttgtattccccttcccctattacctattagaccagatcttctgtcctaaaaacttgtcttctaccctgccctcttttctgttcacccccaaaagaaaacttacacacccacacacatacacatttaatgcttggagtgtctccacaactcttaaatgatgtatgcaaaaatcctgaagctaggaaaaccctccatcccttgttcccaacctcctaagtcaagaccattaccatttctttctttttttggtgggggggggggggtggatggagtctcgctctgtcgcccaggcggaggttgcagtgagctgagatcgcaccactgcactccagcctggttacagagcaagaccctgtctcgaaaaaaaaaaaacaaaaaaacaacaaaaaaaaaaccacactactgtattttggatggatcaaacctacttacttttaatttctaatcctaaagtaaagagatgcaattgggggccttccatgtagaaagtggggtcaggaggccaagaaagggaatatgaatgtatatccaagtcactcaggaacttttatgcaggtggtagaaacttatgtcaaagtggccacaagattgtttaataggagatgaatgaatgtaactccatgtttactgctagaaaccaaagctttgtgtaaaatcttgaatttatggggagggagggtaggaaagcctgtacctgtctgtttttttcctgatccttttccctcattcctgaactgcaggagactgagcccctttgggctttggtgaccccatcactggggtgtgtttatttgacggttgattttgctgtactgggtacttcctttcccattttctcatcattttttaacacatgctgactcttcccttcccttctcctttccctgggaaaatacaatgaataaataaagacttactggtac

SEQ ID NO: 3215 - DNA, 2839 bp, Homo sapiens
gaattccgtacggcttccggtggcgggacgcggggccgcgcacgcgggaaaagcttccccggtgtccccccatccccctccccgcgccccccccgcgtccccccagcgcgcccacctctcgcgccggggccctcgcgaggccgcagcctgaggagattcccaacctgctgagcatccgcacacccactcaggagttggggcccagctcccagtttacttggtttcccttgtgcagcctggggctctgcccaggccaccacaggcaggggtcgacatggcagagacactggagttcaacgacgtctatcaggaggtgaaaggttccatgaatgatggtcgactgaggttgagccgtcagggcatcatcttcaagaatagcaagacaggcaaagtggacaacatccaggctggggagttaacagaaggtatctggcgccgtgttgctctgggccatggacttaaactgcttacaaagaatggccatgtctacaagtatgatggcttccgagaatcggagtttgagaaactctctgatttcttcaaaactcactatcgccttgagctaatggagaaggacctttgtgtgaagggctggaactgggggacagtgaaatttggtgggcagctgctttcctttgacattggtgaccagccagtctttgagatacccctcagcaatgtgtcccagtgcaccacaggcaagaatgaggtgacactggaattccaccaaaacgatgacgcagaggtgtctctcatggaggtgcgcttctacgtcccacccacccaggaggatggtgtggaccctgttgaggcctttgcccagaatgtgttgtcaaaggcggatgtaatccaggccacgggagatgccatctgcatcttccgggagctgcagtgtctgactcctcgtggtcgttatgacattcggatctaccccacctttctgcacctgcatggcaagacctttgactacaagatcccctacaccacagtactgcgtctgtttttgttaccccacaaggaccagcgccagatgttctttgtgatcagcctggatcccccaatcaagcaaggccaaactcgctaccacttcctgatcctcctcttctccaaggacgaggacatttcgttgactctgaacatgaacgaggaagaagtggagaagcgctttgagggtcggctcaccaagaacatgtcaggatccctctatgagatggtcagccgggtcatgaaagcactggtaaaccgcaagatcacagtgccaggcaacttccaagggcactcaggggcccagtgcattacctgttcctacaaggcaagctcaggactgctctacccgctggagcggggcttcatctacgtccacaagccacctgtgcacatccgcttcgatgagatctcctttgtcaactttgctcgtggtaccactactactcgttcctttgactttgaaattgagaccaagcagggcactcagtataccttcagcagcattgagagggaggagtacgggaaactgtttgattttgtcaacgcgaaaaagctcaacatcaaaaaccgaggattgaaagagggcatgaacccaagctacgatgaatatgctgactctgatgaggaccagcatgatgcctacttggagaggatgaaggaggaaggcaagatccgggaggagaatgccaatgacagcagcgatgactcaggagaagaaaccgatgagtcattcaacccaggtgaagaggaggaagatgtggcagaggagtttgacagcaacgcctctgccagctcctccagtaatgagggtgacagtgaccgggatgagaagaagcggaaacagctcaaaaaggccaagatggccaaggaccgcaagagccgcaagaagcctgtggaggtgaagaagggcaaagaccccaatgcccccaagaggcccatgtctgcatacatgctgtggctcaatgccagccgagagaagatcaagtcagaccatcctggcatcagcatcacggatctttccaagaaggcaggcgagatctggaagggaatgtccaaagagaagaaagaggagtgggatcgcaaggctgaggatgccaggagggactatgaaaaagccatgaaagaatatgaagggggccgaggcgagtcttctaagagggacaagtcaaagaagaagaagaaagtaaaggtaaagatggaaaagaaatccacgccctctaggggctcatcatccaagtcgtcctcaaggcagctaagcgagagcttcaagagcaaagagtttgtgtctagtgatgagagctcttcgggagagaacaagagcaaaaagaagaggaggaggagcgaggactctgaagaagaagaactagccagtactccccccagctcagaggactcagcgtcaggatccgatgagtagaaacggaggaaggttctctttgcgcttgccttctcacaccccccgactccccacccatattttggtaccagtttctcctcatgaaatgcagtccctggattctgtgccatctgaacatgctctcctgttggtgtgtatgtcactagggcagtggggagacgtcttaactctgctgcttcccaaggatggctgtttataatttggggagagatagggtgggaggcagggcaatgcaggatccaaatcctcatcttactttcccgaccttaaggatgtagctgctgcttgtcctgttcaagttgctggagcaggggtcatgtgaggccaggcctgtagctcctacctggggcctatttctactttcattttgtatttctggtctgtgaaaatgatttaataaagggaactgactttggaaaccaaaaaaaggaattc

SEQ ID NO: 3216 - protein, 709 aa, Homo sapiens
MAETLEFNDVYQEVKGSMNDGRLRLSRQGIIFKNSKTGKVDNIQAGELTEGIWRRVALGHGLKLLTKNGHVYKYDGFRESEFEKLSDFFKTHYRLELMEKDLCVKGWNWGTVKFGGQLLSFDIGDQPVFEIPLSNVSQCTTGKNEVTLEFHQNDDAEVSLMEVRFYVPPTQEDGVDPVEAFAQNVLSKADVIQATGDAICIFRELQCLTPRGRYDIRIYPTFLHLHGKTFDYKIPYTTVLRLFLLPHKDQRQMFFVISLDPPIKQGQTRYHFLILLFSKDEDISLTLNMNEEEVEKRFEGRLTKNMSGSLYEMVSRVMKALVNRKITVPGNFQGHSGAQCITCSYKASSGLLYPLERGFIYVHKPPVHIRFDEISFVNFARGTTTTRSFDFEIETKQGTQYTFSSIEREEYGKLFDFVNAKKLNIKNRGLKEGMNPSYDEYADSDEDQHDAYLERMKEEGKIREENANDSSDDSGEETDESFNPGEEEEDVAEEFDSNASASSSSNEGDSDRDEKKRKQLKKAKMAKDRKSRKKPVEVKKGKDPNAPKRPMSAYMLWLNASREKIKSDHPGISITDLSKKAGEIWKGMSKEKKEEWDRKAEDARRDYEKAMKEYEGGRGESSKRDKSKKKKKVKVKMEKKSTPSRGSSSKSSSRQLSESFKSKEFVSSDESSSGENKSKKKRRRSEDSEEEELASTPPSSEDSASGSDE

SEQ ID NO: 3217 - DNA, 645 bp, Homo sapiens
atggcctcccacgaagttgataatgcagagctggggtcagcctctgcccatggtaccccaggcagtgaggcgggaccagaagagctgaatacttctgtctaccagcccatagatggatcaccagattatcagaaagcaaaattacaagttcttggggccatccagatcctgaatgcagcaatgattctggctttgggtgtctttctgggttccttgcaatacccataccacttccaaaagcacttctttttcttcaccttctacacaggctacccgatttggggtgctgtgtttttctgtagttcaggaaccttgtctgttgtagcagggataaaacccacaagaacatggatacagaacagttttggaatgaacattgccagtgctacaattgcactagtggggactgcttttctctcactaaatatagcagttaatatccagtcattaaggagttgtcactcttcatcagagtcaccggacctatgcaattacatgggctccatatcaaatggcatggtgtctctactgctgattctcaccttgctggaattatgcgtaaccatctctaccatagccatgtggtgcaatgcaaactgctgtaattcaagagaggaaatttcctcacctcccaattctgtgtaa

SEQ ID NO: 3218 - DNA, 1910 bp, Homo sapiens
aggtttcggcgggggctgcacgtgcgcaggggtgtggaaacttaccggctgagccatggatacaccgttaaggcgcagccgacggctgggaggcctaaggcccgaatcccccgagagcctcacctcagtttcgcggacgagacgggcccttgtggagttcgagtcgaacccagaagaaacgagggagcccgggtctcctccgagtgtgcagcgggctggcctggggtcccccgaaaggccgccgaagacaagcccaggatcaccccgtctgcagcagggtgcaggcttggagtcaccccaagggcagccagagccaggcgcagcgtccccccagcgtcagcaagacctacacctggagtcgcctcaaagacagccagagtacagtcctgaatccccacgatgtcagccgaagccaagtgaggaggcaccaaagtgttctcaggaccagggagtactggcctcggagttggcccagaataaggaggagctgaccccgggggccccccagcatcagctaccgccggtcccaggatcaccagagccttaccccggtcagcaagctcccggtccggagccctctcagccactactggagctgacacccagggcacctggctccccccggggtcagcatgagccgagcaagccacctccagctggggagacggtgacaggcggcttcggggcaaagaagcgaaaaggttcttcatcccaggccccagcgtccaagaagttgaataaagaggagcttcctgtaatcccgaaggggaagcccaaatcggggcgagtgtggaaggaccgctccaagaaaagattctcccagatgcttcaggacaagcccctgcgcacatcgtggcagcggaagatgaaggaacgacaggagaggaagctggccaaggactttgcccgtcacctggaggaggagaaggagaggcgccgccaggagaagaaacagcgccgggctgagaacctgaaacgccgcctggagaatgagcggaaggcagaggtcgtccaagtgatccgaaaccccgccaagctcaagcgggcaaagaagaagcagctgcgctccattgagaagcgggacaccctggccctgctgcagaagcagccgccccagcagccggcagccaagatctgagctcaggacggcccgaggccttccatggccaacgaccatgtcagacacagcacctcaggccgctgctcagatgcctctgctggagctggcactccaaacccatggctccagaacggggacccccaccccgaccggggctcctcggcctttgaaggcttccaggcaggtctgtgtgggacagaagcccagagggggcctgggacctggcagagatgggggcgggaagagattcagctcccatccctccttcctctccttctccaagtgccttcaaaccaagaactgtacattcttctggttcctcagtgagctggtgactggcaggtgactccctcagcagtgtatgccctttctcagcatcctaggtccatcccaggcctggaggctgacagttgggaatccagcttcccccacaccttcccaaaggctgctctgagcacctccacaccccactgcctctgtccccagcaaactgaatccggttcctctccacttttcaatactgaaagattaaaatggggaggttgcagggagcagagcttttccctagcacccactttcccaaaccagtctctgcagaagccccagagaatctaactcatgcctgtccagtctacagcaaaaatatttattgagtgcctgttgcatacaggcacaatcctaggcaccggcaaatacagacaatagaccaaagtccctgccctcgaggagctttcattctgatggagagaaaacataataaacaagcaaaatgcaaaaaaaaaaaaaaaaa

SEQ ID NO: 3219 - protein, 360 aa, Homo sapiens
MDTPLRRSRRLGGLRPESPESLTSVSRTRRALVEFESNPEETREPGSPPSVQRAGLGSPERPPKTSPGSPRLQQGAGLESPQGQPEPGAASPQRQQDLHLESPQRQPEYSPESPRCQPKPSEEAPKCSQDQGVLASELAQNKEELTPGAPQHQLPPVPGSPEPYPGQQAPGPEPSQPLLELTPRAPGSPRGQHEPSKPPPAGETVTGGFGAKKRKGSSSQAPASKKLNKEELPVIPKGKPKSGRVWKDRSKKRFSQMLQDKPLRTSWQRKMKERQERKLAKDFARHLEEEKERRRQEKKQRRAENLKRRLENERKAEVVQVIRNPAKLKRAKKKQLRSIEKRDTLALLQKQPPQQPAAKI

SEQ ID NO: 3220 - DNA, 2167 bp, Homo sapiens
aattcggcacgaggaggtgctgaaggctgtggcgcgcggctgtccccattcccacgtgaagcgctacgctagcatcgctcggctggcggctcccagctcgccgcggagcagtcccggcagcagcgggggaccggaagtggctcgcggaggctcagaagctagtcccggagcccggcgtgtggcgcctcggagcacggtgacggcgccatgtccctaatctgctccatctctaacgaagtgccggagcacccatgtgtatcccctgtctctaatcatgtttatgagcggcggctcatcgagaagtacattgcggagaatggtaccgaccccatcaacaaccagcctctctccgaggagcagctcatcgacatcaaagttgctcacccaatccggcccaagcctccctcagccaccagcatcccggccattctgaaagctttgcaggatgagtgggatgcagtcatgctgcacagcttcactctgcgccagcagctgcagacaacccgccaagagctgtcacacgctctgtaccagcacgatgccgcctgccgtgtcattgcccgtctcaccaaggaagtcactgctgcccgagaagctctggctaccctgaaaccacaggctggcctcattgtgccccaggctgtgccaagttcccaaccaagtgttgtgggtgcgggtgagccaatggatttgggtgagctggtgggaatgaccccagagattattcagaagcttcaagacaaagccactgtgctaaccacggagcgcaagaagagagggaagactgtgcctgaggagctggtgaagccagaagagctcagcaaataccggcaggtggcatcccacgtggggttgcacagtgccagcattcctgggatcctggccctggacctctgcccgtccgacaccaacaagatcctcactggtggggcggataaaaatgtcgttgtgtttgacaaaagttctgaacaaatcctggctaccctcaaaggccataccaagaaggtcaccagcgtggtgtttcacccttcccaggacctggtgttttctgcttcccccgatgccactatcaggatttggtcggtccccaatgcctcttgtgtacaggtggttcgggcccatgagagtgctgtgacaggcctcagccttcatgccactggcgactatctcctgagctcctccgatgatcagtactgggctttctctgacatccagacagggcgtgtgctcaccaaggtgacagatgagacctccggctgctctctcacctgtgcacagttccaccctgacggactcatctttggaacaggaaccatggactctcagatcaagatctgggacttgaaggaacgtactaatgtggccaacttccctggccactcgggccccatcactagcatcgccttctctgagaatggttactacctggctacagcggctgatgactcctctgtcaagctctgggatctgcgcaagcttaagaactttaagactttgcagctggataacaactttgaggtaaagtcactgatctttgaccagagtggtacctacctggctcttgggggcacggatgtccagatctacatctgcaaacaatggacggagattcttcactttacagagcacagtggcctgaccacaggggtggccttcgggcatcacgccaagttcatcgcttcaacaggcatggacagaagcctcaagttctacagcctgtaggccctggcccttctgatggaagctgggcctcatctcagtagaggggtagaattagggtttggggggggggtggggggaatctatggggggagggggctctgtggggtgggacattcacatcatttcactctggtctgagtggtggcctgagaaccatggtggcatggaccaccctcatccatgcaactccaggccccatgggaacggatgtggaaggaagaactgtcaccctcttaaggcccagggtcggagcccagggcctctcccttcctgtcgttcaatggacgtggtggtggctgttccacacccattttgttgcagttcctgtgagacaggagaggctgagccaagggaactgtgaaggggatgggcaggagggcttgtgcagggttttgtaagcagtgatctagtttcattaaaaaaagaaaacaataaccataaccac

SEQ ID NO: 3221 - protein, 504 aa, Homo sapiens
MSLICSISNEVPEHPCVSPVSNHVYERRLIEKYIAENGTDPINNQPLSEEQLIDIKVAHPIRPKPPSATSIPAILKALQDEWDAVMLHSFTLRQQLQTTRQELSHALYQHDAACRVIARLTKEVTAAREALATLKPQAGLIVPQAVPSSQPSVVGAGEPMDLGELVGMTPEIIQKLQDKATVLTTERKKRGKTVPEELVKPEELSKYRQVASHVGLHSASIPGILALDLCPSDTNKILTGGADKNVVVFDKSSEQILATLKGHTKKVTSVVFHPSQDLVFSASPDATIRIWSVPNASCVQVVRAHESAVTGLSLHATGDYLLSSSDDQYWAFSDIQTGRVLTKVTDETSGCSLTCAQFHPDGLIFGTGTMDSQIKIWDLKERTNVANFPGHSGPITSIAFSENGYYLATAADDSSVKLWDLRKLKNFKTLQLDNNFEVKSLIFDQSGTYLALGGTDVQIYICKQWTEILHFTEHSGLTTGVAFGHHAKFIASTGMDRSLKFYSL

SEQ ID NO: 3222 - DNA, 2736 bp, Homo sapiens
attgtctgggaattgcagccgcggggcgggcggcggcggcggcggcggcggccgggacccagcgggccaggtggggacggcgcggagcgggtgcgggagatgccgtgcgggactggggccacctgagccgcccgcctcgtccccgccttctgtgggaaggatgtgcgcgcggatggccggtcgcacaacagcggcccctcgggggccctacggcccctggctctgcctcctggtggccctcgccctggacgtcgtgagagtggactgtggccaggctcccctggaccctgtctacctgcatgtgacagccgcccgcccagcccagcccacactctggactgccaagctggaccgcttcaagggctccaggcaccacaccaccctcatcacctgccaccgtgctgggctcacagagccagattccagcagtccccttgaactgtctgagttcctatgggtggactttgtggtggagaatagcactggtgggggcgtagcggtcactcgccccgtcacgtggcagctggagtacccaggccaggcccctgaagcagagaaggacaaaatggtgtgggaaatcctggtgtctgagcgggacatcagagcccttatcccactggccaaggctgaggagctggtgaatacagcaccactgactggagtgccccagcatgtccccgtgcgccttgtcactgtggacggcgggggggccttggtggaggtgacagagcatgtcggctgcgagtctgccaacacacaggtcctgcaggtgtctgaggcctgtgatgccgtgttcgtggctggcaaggagagccggggcgcccggggggtgcgagtggacttctggtggcgccggctccgcgcctcgctgcggctgaccgtgtgggcccccctgctaccgctgcgtatcgagctcaccgacaccaccctcgagcaggtccgcggctggagggtacctggccctgctgaagggcctgcggaacccgctgcagaggcgtcggatgaggccgagcggcgcgcccgtggctgccacctgcagtaccagcgggccggtgtgcgcttcctcgcccccttcgcggcccacccgctggacggcggccgccgcctcacgcacctgcttggccccgactggctgctagacgtgtcccacctcgtggcgccacacgcccgcgtgctggactcgcgtgtagcctctctggagggtggccgtgtcgtggtgggccgggagcccggtgtcacctccattgaggtgcgttccccactgtctgactccatcctgggggagcaggcgctggctgtgacggacgacaaggtctcagtgctggagctgagggtgcagccagtgatgggcatctcgctgaccttgagccggggcactgcccaccccggggaggtcacagctacgtgctgggcacagtcagcccttcccgccccaaagcaggaggtggccctctccctatggctgtccttctctgatcacactgtggccccagctgagctctacgaccgccgtgacctgggactgtccgtctcagccgaggagcctggtgccatcctgccagctgaggagcagggtgcccagctcggggtggtggtgagtggggcaggcgccgaggggctgccgctgcatgtggctctgcacccgcccgagccctgccgccggggccgccaccgtgtgcctctggcctctggcaccgcctggctggggctgccccctgcctccactccagcccctgctctcccatccagccctgcttggagcccaccagccacagaagccaccatgggtggtaaacggcaggtggcaggcagtgtcgggggcaacacaggtgtgaggggcaagtttgagcgggcagaggaggaggccaggaaggaggagaccgaagccagggaggaggaggaggaagaggaggaggagatggtccctgcccctcagcatgtcactgagctagagctgggcatgtacgccctgctgggagtcttctgcgtggccatcttcatcttcttggtcaatggtgtggtcttcgtcctgcgctatcagcgcaaagaacctcccgacagtgccactgaccccacctccccccagccccacaactgggtctggctgggcactgaccaggaggaactgagccgccagctggaccggcagtcccctggcccgcccaagggggaggggagctgcccctgtgagagtgggggaggaggggaggcccctaccctggcccctggccctcctgggggcaccaccagctcctcaagcaccctggcccgaaaggaggctggggggcggcggaagcgagtagagtttgtgacatttgcgccagcccctccagcccagtcacctgaggagcctgtaggggcccctgctgtgcagtccatccttgtggcaggcgaggaggacatccgctgggtgtgtgaggacatggggctgaaggaccctgaggagcttcgcaactacatggagaggatccggggcagctcctgaccctccacagccacctggtcagccaccagctggggcaacgagggtggaggtcccactgagcctctcgcctgcccccgccactcgtctggtgcttgttgatccaagtcccctgcctggtcccccacaaggactcccatccaggccccctctgccctgccccttgtcatggaccatggtcgtgaggaagggctcatgccccttatttatgggaaccatttcattctaacagaataaaccgagaaggaaaccag

SEQ ID NO: 3223 - DNA, 4213 bp, Homo sapiens
cagcggcagtggagttcgctgcgcgctgttgggggccacctgtcttttcgcttgtgtccctctttctagtgtcgcgctcgagtcccgacgggccgctccaagcctcgacatgtcgtacaactacgtggtaacggcccagaagcccaccgccgtgaacggctgcgtgaccggacactttacttcggccgaagacttaaacctgttgattgccaaaaacacgagattagagatctatgtggtcaccgccgaggggcttcggcccgtcaaagaggtgggcatgtatgggaagattgcggtcatggagcttttcaggcccaagggggagagcaaggacctgctgtttatcttgacagcgaagtacaatgcctgcatcctggagtataaacagagtggcgagagcattgacatcattacgcgagcccatggcaatgtccaggaccgcattggccgcccctcagagaccggcattattggcatcattgaccctgagtgccggatgattggcctgcgtctctatgatggccttttcaaggttattccactagatcgcgataataaagaactcaaggccttcaacatccgcctggaggagctgcatgtcattgatgtcaagttcctatatggttgccaagcacctactatttgctttgtctaccaggaccctcaggggcggcacgtaaaaacctatgaggtgtctctccgagaaaaggaattcaataagggcccttggaaacaggaaaatgtcgaagctgaagcttccatggtgatcgcagtcccagagccctttgggggggccatcatcattggacaggagtcaatcacctatcacaatggtgacaaatacctggctattgcccctcctatcatcaagcaaagcacgattgtgtgccacaatcgagtggaccctaatggctcaagatacctgctgggagacatggaaggccggctcttcatgctgcttttggagaaggaggaacagatggatggcaccgtcactctcaaggatctccgtgtagaactccttggagagacctctattgctgagtgcttgacataccttgataatggtgttgtgtttgtcgggtctcgcctgggtgactcccagcttgtgaagctcaacgttgacagtaatgaacaaggctcctatgtagtggccatggaaacctttaccaacttaggacccattgtcgatatgtgcgtggtggacctggagaggcaggggcaggggcagctggtcacttgctctggggctttcaaggaaggttctttgcggatcatccggaatggaattggaatccacgagcatgccagcattgacttaccaggcatcaaaggattatggccactgcggtctgaccctaatcgtgagactgatgacactttggtgctctcttttgtgggccagacaagagttctcatgttaaatggagaggaggtagaagaaaccgaactgatgggtttcgtggatgatcagcagactttcttctgtggcaacgtggctcatcagcagcttatccagatcacttcagcatcggtgaggtggtctctcaagaacccaaagctctggtcagtgaatggaaggagcctcaggccaagaacatcagtgtggcctcctgcaatagcagccaggtggtggtggctgtaggcagggccctctactatctgcagatccatcctcaggagctccggcagatcagccacacagagatggaacatgaagtggcttgcttggacatcaccccattaggagacagcaatggactgtcccctctttgtgccattggcctctggacggacatctcggctcgtatcttgaagttgccctcttttgaactactgcacaaggagatgctgggtggagagatcattcctcgctccatcctgatgaccacctttgagagtagccattacctcctttgtgccttgggagatggagcgcttttctactttgggctcaacattgagacaggtctgttgagcgaccgtaagaaggtgactttgggcacccagcccaccgtattgaggacttttcgttctctttctaccaccaacgtctttgcttgttctgaccgccccactgtcatctatagcagcaaccacaaattggtcttctcaaatgtcaacctcaaggaagtgaactacatgtgtcccctcaattcagatggctatcctgacagcctggcgctggccaacaatagcaccctcaccattggcaccatcgatgagatccagaagctgcacattcgcacagttcccctctatgagtctccaaggaagatctgctaccaggaagtgtcccagtgtttcggggtcctctccagccgcattgaagtccaagacacgagtgggggcacgacagccttgaggcccagcgctagcacccaggctctgtccagcagtgtaagctccagcaagctgttctccagcagcactgctcctcatgagacctcctttggagaagaggtggaggtgcacaacctacttatcattgaccaacacacctttgaagtgcttcatgcccaccagtttctgcagaatgaatatgccctcagtctggtttcctgcaagctgggcaaagaccccaacacttacttcattgtgggcacagcaatggtgtatcctgaagaggcagagcccaagcagggtcgcattgtggtctttcagtattcggatggaaaactacagactgtggctgaaaaggaagtgaaaggggccgtgtactctatggtggaatttaacgggaagctgttagccagcatcaatagcacggtgcggctctatgagtggacaacagagaaggagctgcgcactgagtgcaaccactacaacaacatcatggccctctacctgaagaccaagggcgacttcatcctggtgggcgaccttatgcgctcagtgctgctgcttgcctacaagcccatggaaggaaactttgaagagattgctcgagactttaatcccaactggatgagtgctgtggaaatcttggatgatgacaattttctgggggctgaaaatgcctttaacttgtttgtgtgtcaaaaggatagcgctgccaccactgacgaggagcggcagcacctccaggaggttggtcttttccacctgggcgagtttgtcaatgtcttttgccacggctctctggtaatgcagaatctgggtgagacttccacccccacacaaggctcggtgctcttcggcacggtcaacggcatgatagggctggtgacctcactgtcagagagctggtacaacctcctgctggacatgcagaatcgactcaataaagtcatcaaaagtgtggggaagatcgagcactccttctggagatcctttcacaccgagcggaagacagaaccagccacaggtttcatcgacggtgacttgattgagagtttcctggatattagccgccccaagatgcaggaggtggtggcaaacctacagtatgacgatggcagcggtatgaagcgagaggccactgcagacgacctcatcaaggttgtggaggagctaactcggatccattagccaagggcagggggcccctttgctgaccctccccaaaggctttgccctgctgccctccccctcctctccaccatcgtcttcttggccatgggaggcctttccctaagccagctgcccccagagccacagttcccctatgtggaagtggggcgggcttcatagagacttgggaatgagctgaaggtgaaacattttctccctggatttttaccagtctcacatgattccagccatcaccttagaccaccaagccttgattggtgttgccagttgtcctccttccggggaaggattttgcagttctttggctgaaaggaagctgtgcgtgtgtgtgtgtgtatgtgtgtgtgtgtatgtgtatctcacactcatgcattgtcctctttttatttagattggcagtgtagggagttgtgggtagtggggaagagggttaggagggtttcattgtctgtgaagtgagaccttccttttacttttcttctattgcctctgagagcatcaggcctagaggcctgactgccaagccatgggtagcctgggtgtaaaacctggagatggtggatgatccccacgccacagcccttttgtctctgcaaactgccttcttcggaaagaagaaggtgggaggatgtgaattgttagtttctgagttttaccaaataaagtagaatataagaag

SEQ ID NO: 3224 - DNA, 686 bp, Homo sapiens
gcctgcaacgtgtctctggggcggaggcagcggcagtggagttcgctgcgcgctgttgggggccacctgtcttttcgcttgtgtccctctttctagtgtcgcgctcgagtcccgacgggccgctccaagcctcgacatgtcgtacaactacgtggtaacggcccagaagcccaccgccgtgaacggctgcgtgaccggacactttacttcggccgaagacttaaacctgttgattgccaaaaacacgagattagagatctatgtggtcaccgccgaggggcttcggcccgtcaaagaggtgggcatgtatgggaagattgcggtcatggagcttttcaggcccaagggggagagcaaggacctgctgtttatcttgacagcgaagtacaatgcctgcatcctggagtataaacagagtggcgagagcattgacatcattacgcgagcccatggcaatgtccaggaccgcattggccgcccctcatagaccggcattattggcatcattgaccctgagtgccggatgattggcctgcgtctctatgatggccttttcaaggttattccactagatcgcgataataaagaactcaaggccttcaacatccgcctggaggagctgcatgtcattgatgtcaagttcctatatggttgccaagcacctactatttgctttgtctaccagg

SEQ ID NO: 3225 - DNA, 2210 bp, Homo sapiens
agcagctcagtgcaacggtgtgaactcagcctgtttcagagcctccacaccatgacctccaagaagctggtgaactcggtggctggctgtgctgatgacgctcttgctggcctggtggcctgcaaccccaacctgcagctcctgcagggccaccgcgtggccctccgttctgacctggacagcctcaagggccgggtggcactgctgtcgggtgggggctctggccatgagcctgcccatgctggtttcatagggaaggggatgctgactggggtcatcgcgggagctgtgttcacctccccggcagtgggcagcatcctggcagccatcagggccgtggcccaggccggcacagtggggacgctccttatcgtgaagaactacactggggatcggctcaacttcggcctggcccgggagcaggcccgggctgaaggcatcccggtggagatggtggtgattggggacgacagcgccttcactgtcctgaagaaggcaggccggcgggggctgtgcggcacggtgcttatacacaaggtggcaggtgctctggctgaggctggtgtggggctggaggagatcgcaaagcaggtgaacgtggtcgccaaggccatgggtaccctgggggtgagcttatcctcctgcagcgtccctggttccaaacccaccttcgagctctcagccgacgaggtggagctgggcctggggatccacggggaagctggtgtgcgccggataaagatggcaaccgccgatgagattgtgaaactcatgctcgaccacatgacaaacaccaccaacgcgtcccatgtgcctgtgcagcccggctcctcagttgtgatgatggtcaacaacctgggtggcctgtcattcctggaactgggcatcatagccgacgctaccgtccgctccctggagggccgcggggtgaagattgcccgtgccctggtgggcaccttcatgtcagcactggagatgcctggcatttctctcaccctcctgctggtggatgagcctctcctgaaactgatagatgctgaaaccactgcagcagcctggcctaacgtggctgcagtctccattactgggcggaagcggagccgggtagcccctgccgagccccaggaggcccctgattccactgctgcaggaggctcagcctcgaagcggatggcgctggtgctggaacgggtgtgcagcactctcctgggcctggaggaacacctgaatgccctggaccgggctgctggtgacggcgactgtggcaccacccacagccgtgcggccagagcaatccaggagtggctgaaggagggcccaccccctgccagccctgcccagctgctctccaagttgtctgtcctgctcctggagaagatgggaggctcatctggggcgctctatggcctgttcctgactgcggctgcacagcccctgaaggccaagaccagcctcccagcctggtctgctgccatggatgccggcctggaagccatgcagaagtatggcaaggctgctccaggggacaggactatgctggattctctgtgggcagcggggcaggagctccaagcctggaagagcccaggagctgatctgttacaagtcctgaccaaagcagtcaagagtgccgaagctgcagccgaggccaccaagaatatggaagctggagccggaagagccagttatatcagctcagcacggctggagcagccagaccccggggcggtggcagctgctgccatcctccgggccatcttggaggtcttgcagagctagggtgtgtgactgcctcccttggcctcagctcctctcactgctgtgctgaggtggcctttgtcacttccttctgccttccaaccctcaccttcccccggcctggccccattggcccaccctctaagttgagcaggaaatcctccaccaagcttccagaactacagacagcacccagagtgagctggagtgggtccccatgcctctccagcatgccctttccctttgcaggagggtggagtccctgggtcatgccctcccctgccagctctgggcttcagagataaggcattttccttgtgcagcctttacctggcaatcctaatttggttttaagactccctgtgaaatgctttccgcaccttaaccccagtgagcgtgaaaaagaaagttaataaactataatacatggaagcaagaaaaaaaaaaaaaaa

SEQ ID NO: 3226 - protein, 575 aa, Homo sapiens
MTSKKLVNSVAGCADDALAGLVACNPNLQLLQGHRVALRSDLDSLKGRVALLSGGGSGHEPAHAGFIGKGMLTGVIAGAVFTSPAVGSILAAIRAVAQAGTVGTLLIVKNYTGDRLNFGLAREQARAEGIPVEMVVIGDDSAFTVLKKAGRRGLCGTVLIHKVAGALAEAGVGLEEIAKQVNVVAKAMGTLGVSLSSCSVPGSKPTFELSADEVELGLGIHGEAGVRRIKMATADEIVKLMLDHMTNTTNASHVPVQPGSSVVMMVNNLGGLSFLELGIIADATVRSLEGRGVKIARALVGTFMSALEMPGISLTLLLVDEPLLKLIDAETTAAAWPNVAAVSITGRKRSRVAPAEPQEAPDSTAAGGSASKRMALVLERVCSTLLGLEEHLNALDRAAGDGDCGTTHSRAARAIQEWLKEGPPPASPAQLLSKLSVLLLEKMGGSSGALYGLFLTAAAQPLKAKTSLPAWSAAMDAGLEAMQKYGKAAPGDRTMLDSLWAAGQELQAWKSPGADLLQVLTKAVKSAEAAAEATKNMEAGAGRASYISSARLEQPDPGAVAAAAILRAILEVLQS

SEQ ID NO: 3227 - DNA, 1821 bp, Homo sapiens
agtctggccgccatgttggagctttcgctgttcggggcccggcctgctccgggccctcccagcgtcgccgctagctgacttagggctcccgcccacactgcgcacggccttgctgagggccggctcgtagtgggaggcttcgcgttcacctgaacatttccgcctcctctggatgggggatgagaggcggggctgatgcatcgcagcagtcctggaccctgacttcggacttggagaagaaacgccgaggaggaacgggagttagggggttagcagcttggcgcgctgggagccggccacccctggtctccggacttcacttcccaggaggcctcgcgcgcgactggaagtgctgcgagcctataagaaggcgaggcggcacccgccgctctgctctggggcggcattgccagccggctgtaggcattcagggcagtgtcttctgcatctcctaggaacctcgggagcggcagctccggcgcctggtagcgagaggcgggttccggagatcccggcctcacttcgtcccactgtggttaggggtgagtcctgcaaatgttaagtgatttgctcaaggtgcccatttcgcaggaattggagcccaggccagttctctgagcctatcattagggctaaaggagtgcgtgatcagaatggtgtctggacggttctacttgtcctgcctgctgctggggtccctgggctctatgtgcatcctcttcactatctactggatgcagtactggcgtggtggctttgcctggaatggcagcatctacatgttcaactggcacccagtgcttatggttgctggcatggtggtattctatggaggtgcgtcactggtgtaccgcctgccccagtcgtgggtggggcccaaactgccctggaaactcctccatgcagcgctgcacctgatggccttcgtcctcactgttgtggggctggttgctgtctttacgtttcacaaccatggaaggactgccaacctctactcccttcacagctggctgggcatcaccactgtcttcctcttcgcctgccagtggttcctgggctttgctgtcttcctcctgccctgggcgtccatgtggctgcgcagcctcctaaaacctatccacgtcttttttggagccgccatcctctctctgtccatcgcatccgtcatttcgggcattaatgagaagcttttcttcagtttgaaaaacaccaccaggccataccacagcctgcccagtgaggcggtctttgccaacagcaccgggatgctggtggtggcctttgggctgctggtgctctacatccttctggcttcatcttggaagcgcccagagccggggatcctgaccgacagacagctgctgctacagctgaggcctggatcccggcctttccctgtgacttacgtgtctgtcaccggcaggcagccctacaaatcctggtgacctgctctcccaagaacagagcctgtccccagatgtcccagtagcgatgagtaacagaggtggctgtggacttcctctacttctccttgctggatcagggccttcctgcctcccgctgggcaggtctggccttgctctcttggcagggccccagcccctctgaccactctgcagctcaccatgcagctgatgccaaagttgtggtgtccagtgtgcagcagccctgggagccactgccaccttcagaggggttccttgctgagacccacattgcttcacctggccccaccatggctgcttgcctggcccaacctagcgttctgtgccatgctagagcttgagctgttgctcttcttcaggggaggaaatagggtgg

SEQ ID NO: 3228 - DNA, 4417 bp, Homo sapiens
aaagggccagaggtagacattgaaggtcctgaagggaagctcaaaggtcccaagtttaagatgcctgatgtacatttcaaaagcccacaaatctccatgagtgacattgatttgaatttgaaaggacctaagataaaaggagatatggacatttccgttcctaaactggagggagatctgaaaggtcccaaagtggatgtcaaaggccctaaagtgggcattgacactcctgatattgacattcatggtccagaagggaaactgaagggccccaaatttaaaatgcctgacttacacctcaaggcaccgaagatctctatgcctgaagttgacctgaatctgaaaggtccaaaggtgaagggcgacatggacatttctctgcccaaagtggaaggcgacctcaagggccccgaagttgacatcagggaccccaaagtggacattgatgtcccagatgtggacgttcaaggcccagactggcacctaaaaatgcccaaagtgaaaatgcccaagttcagcatgcctggcttcaaaggagagggcccagatgtggatgtgaacctgcccaaggctgacattgatgtctcaggacccaaagtggacgttgatgttcctgatgtgaatatcgaaggtccagatgcgaaactaaagggccccaagttcaagatgcctgagatgagcatcaaagcccccaagatctccatgcctgatattgacttaaacctgaaaggacccaaagtgaagggcgatgtggatgttacccttcctaaagtggaaggtgacctcaagggcccagaagctgacatcaagggcccaaaagtggacatcaacacccctgatgtggatgttcatggcccagactggcacctgaagatgcccaaggtgaaaatgcccaaattcagcatgcctggcttcaaaggagaaggtccagatgtggatgtgagcctgcccaaggccgacatcgatgtctcgggacccaaggtggacgttgatattccagatgtgaatatcgaaggtccagacgcaaaactgaagggccccaagttcaagatgcctgaaataaatatcaaagctcccaagatctccatacctgatgttgacctggatttgaaaggacccaaagtaaaaggagattttgatgtgtctgtccctaaggttgaagggactttgaaaggcccagaagtagatcttaaaggtccacgtctggatttcgaaggccctgatgccaaactcagtggcccatctttgaagatgccatcgctggagatatctgctcctaaagtaactgctcctgatgttgatttgcatctcaaggcaccaaaaattggattttcaggtccgaagttagaaggtggtgaagtggacctcaagggacccaaagttgaagctccaagcttagatgtacacatggacagcccagatattaacatcgaagggccagatgttaaaatccccaaatttaagaaacccaagtttggatttggggcaaaaagccccaaagctgacatcaagtcaccttcactggatgtcactgttcctgaggcagagctgaaccttgagactcctgaaattagtgttggtggcaagggcaagaaaagtaagtttaaaatgcctaaaattcatatgagtggtcctaagattaaggccaaaaaacagggatttgacctgaatgttcctgggggtgaaattgatgccagcctcaaggctccggatgtagatgtcaacatcgcagggccggatgctgcactcaaagtcgacgtgaaatcgcccaaaaccaagaaaacgatgtttggaaaaatgtacttcccagatgtagagtttgacattaaatcacctaaatttaaagctgaggcccctctccctagccccaaactggagggtgaactccaggcacctgatctggaactttctttgccagcgattcacgtcgaaggtcttgacatcaaggcgaaggctcccaaggtcaagatgccagatgtggacatctcagtgccaaaaatagagggtgacctgaaaggccccaaagtgcaggcaaacttgggtgcacctgacatcaacatcgaaggcctagatgctaaagtcaaaacaccgtccttcggcatttctgcccctcaagtctccatccctgatgtgaatgtaaacttgaaaggaccaaagataaagggtgatgtccccagcgtgggactggaaggaccagatgtagatctgcaaggtccagaagcaaaaattaagttccccaagttttccatgcccaagatcggcatcccaggtgtgaaaatggagggtgggggagccgaggtccatgcccagctaccctctcttgaaggagacttgagaggaccagatgttaagctcgaagggcccgatgtttctctaaaggggccaggagtagacttgccttcagtgaacctctctatgccaaaagtctctgggcctgaccttgatctgaacttgaaaggaccaagtttgaagggagacctggatgcatctgttcccagcatgaaggtgcatgctccagggctcaacctcagtggtgtcggtggcaaaatgcaggtgggaggagacggtgtgaaagtgccagggatcgatgccacaacaaagcttaacgttggggcaccagatgtgacactgaggggaccaagcctgcagggagatctggctgtctctggtgacatcaaatgccctaaagtatccgtaggagctcctgatctaagcttggaggcatccgaaggcagcattaaacttcccaaaatgaagctgccccaatttggcatctctactccggggtccgacttgcacgtcaatgccaaggggccacaggtttctggcgaactgaaggggccaggtgtggatgtgaacctgaaagggcctcggatttcagcaccgaatgtggactttaacttggaaggaccaaaagtgaaagggagccttggggccactggtgagatcaaaggccccactgtcggaggaggtcttccaggcattggtgttcaaggcctagaaggaaacctccagatgcctggaattaagtcctctggatgtgatgtgaacctgccaggcgtgaatgtgaaactcccaactgggcagatttctgggcctgaaatcaaaggtggtctgaaaggttcagaagtaggtttccatggggctgctcctgatatcagtgtgaaggggcctgcctttaatatggcatctcctgagtcagattttggcatcaacttgaagggcccaaaaatcaaaggaggtgcggatgtttcagggggtgtcagtgccccagacatcagccttggtgaagggcatttgagtgttaaaggttccgggggtgagtggaagggaccccaagtctcctctgctctcaacttggacacatctaagtttgctgggggccttcatttctcaggaccaaaggtggaaggaggtgtgaaaggaggtcagattggactccaggctcctgggctgagtgtgtctgggcctcaaggtcacttggaaagtggatctggaaaagtaacattccctaaaatgaagatccccaaatttaccttctctggccgtgagctggttggcagagaaatgggggtggatgttcacttccctaaagcagaggccagcatccaagctggtgctggagacggcgagtgggaagagtctgaagtcaaactgaaaaagtccaagatcaaaatgcccaagtttaatttttccaaacctaaagggaaaggtggtgtcactggctcaccagaagcatcaatttctgggtccaaaggtgacctgaaaagttcaaaggccagcctgggctctctggaaggagaggcagaggccgaagcctcttcaccgaaaggcaaattctccttatttaaaagtaagaagccacggcaccgctcaaattcattcagtgatgaaagagagttctctggaccttccaccccgacggggacgctggagtttgaaggtggggaagtgtctctggaaggtgggaaagttaaagggaaacacgggaagctgaaattcggtacctttggtggattggggtcaaagagcaaaggtcattatgaggtgactgggagcgatgatgagacaggcaagttacaggggagtggggtgtccctggcctctaagaagtcccgactgtcctcctcttctagcaatgacagtgggaataaggttggcatccagcttcccgaggtggagctgtcagtttccacaaagaaagagtagcaggcctttgtatgtgtgtacatatatatatatataacaaaacatcagccttgggtggtgtgttcctatataaactccaaagggaaacacaccgactgcctcagcaatcatgcaaagaccttgcctggcccggtggcaagcgctgaaaaaccgaccgcctgtaggctcctggaactatacagataggtaaagagttccaagttcgtcc

SEQ ID NO: 3229 - protein, 1239 aa, Homo sapiens
MPKVKMPKFSMPGFKGEGPDVDVNLPKADIDVSGPKVDVDVPDVNIEGPDAKLKGPKFKMPEMSIKAPKISMPDIDLNLKGPKVKGDVDVTLPKVEGDLKGPEADIKGPKVDINTPDVDVHGPDWHLKMPKVKMPKFSMPGFKGEGPDVDVSLPKADIDVSGPKVDVDIPDVNIEGPDAKLKGPKFKMPEINIKAPKISIPDVDLDLKGPKVKGDFDVSVPKVEGTLKGPEVDLKGPRLDFEGPDAKLSGPSLKMPSLEISAPKVTAPDVDLHLKAPKIGFSGPKLEGGEVDLKGPKVEAPSLDVHMDSPDINIEGPDVKIPKFKKPKFGFGAKSPKADIKSPSLDVTVPEAELNLETPEISVGGKGKKSKFKMPKIHMSGPKIKAKKQGFDLNVPGGEIDASLKAPDVDVNIAGPDAALKVDVKSPKTKKTMFGKMYFPDVEFDIKSPKFKAEAPLPSPKLEGELQAPDLELSLPAIHVEGLDIKAKAPKVKMPDVDISVPKIEGDLKGPKVQANLGAPDINIEGLDAKVKTPSFGISAPQVSIPDVNVNLKGPKIKGDVPSVGLEGPDVDLQGPEAKIKFPKFSMPKIGIPGVKMEGGGAEVHAQLPSLEGDLRGPDVKLEGPDVSLKGPGVDLPSVNLSMPKVSGPDLDLNLKGPSLKGDLDASVPSMKVHAPGLNLSGVGGKMQVGGDGVKVPGIDATTKLNVGAPDVTLRGPSLQGDLAVSGDIKCPKVSVGAPDLSLEASEGSIKLPKMKLPQFGISTPGSDLHVNAKGPQVSGELKGPGVDVNLKGPRISAPNVDFNLEGPKVKGSLGATGEIKGPTVGGGLPGIGVQGLEGNLQMPGIKSSGCDVNLPGVNVKLPTGQISGPEIKGGLKGSEVGFHGAAPDISVKGPAFNMASPESDFGINLKGPKIKGGADVSGGVSAPDISLGEGHLSVKGSGGEWKGPQVSSALNLDTSKFAGGLHFSGPKVEGGVKGGQIGLQAPGLSVSGPQGHLESGSGKVTFPKMKIPKFTFSGRELVGREMGVDVHFPKAEASIQAGAGDGEWEESEVKLKKSKIKMPKFNFSKPKGKGGVTGSPEASISGSKGDLKSSKASLGSLEGEAEAEASSPKGKFSLFKSKKPRHRSNSFSDEREFSGPSTPTGTLEFEGGEVSLEGGKVKGKHGKLKFGTFGGLGSKSKGHYEVTGSDDETGKLQGSGVSLASKKSRLSSSSSNDSGNKVGIQLPEVELSVSTKKE

SEQ ID NO: 3230 - DNA, 3060 bp, Homo sapiens
tccggaaggaggcgaaccctgaggcgggcccggcaagccttccctgcggccggcagagcccaacgactagtgggactccgcgggggcgggggtagctggagcctggctctggcctggcaggagccgagcttgttccggaagaagccgagcggacgggggccagcctcagcgtcccgggagtgaggcgatagctgcggcggcgacagcgcgggccgggatgaaccgcgacggctgaggcagcggaggtgccggctgcgcgggccccagtgagactccctcgaagcggcagcccaccgttcggggctttgcctcgagccgagccctgcccccgcgagcctcccggacccctttgtgcggccggaggcggcggcgggaacggccatggcggccaacatgtaccgggtgggagattacgtctattttgagaactcttccagcaatccttacctggttagacggattgaggagctcaacaagactgcaaatggaaatgtggaggcaaaggttgtctgtcttttccggcgcagggacatttctagtagcctcaacagcctggctgatagtaatgccagggagtttgaagaggaatcaaagcagccaggggtgtctgagcagcagcgccatcaactgaagcaccgggaactttttctttctcggcaatttgaatcattaccagccacccacatacgggggaaatgcagtgtgaccctcttgaatgagacagatatcttgagccagtacctggaaaaggaggactgctttttttactcactggtgtttgaccccgtgcagaagacacttctcgctgatcagggcgagattagagttggttgcaaataccaagctgagatcccagatcgcctagtagagggagaatctgataatcggaaccagcagaagatggagatgaaggtctgggacccagacaaccctctcacagaccggcagatcgaccagtttcttgtggtggcccgagctgtgggaacctttgcaagagccctagattgtagcagctccattcggcagccaagcttgcacatgagtgcagctgctgcctcccgagatatcactctgtttcacgccatggataccttgcaaaggaacggctacgacctggctaaggccatgtcgaccctggtaccccagggaggcccggtgctgtgtcgggatgagatggaggaatggtcagcctcagaggccatgctatttgaggaggccctagagaagtatgggaaggacttcaatgatattcgccaggattttctaccctggaagtcacttgccagcatagtccagttttattacatgtggaaaaccacagaccggtatattcagcagaaaaggttgaaagctgctgaagcagacagcaaactgaaacaggtctacattcccacctacactaagccaaaccctaaccagatcatttctgtgggttcaaaacctggcatgaatggggctggatttcagaagggcctgacttgtgagagttgccacaccacacagtctgctcagtggtatgcctggggcccacctaacatgcagtgccgcctctgtgcttcctgttggatctactggaagaagtatgggggactgaagaccccaactcagcttgagggggccactcggggcaccacggagccacactcaaggggtcatttatccagacctgaagctcaaagtctctctccttacacaaccagcgccaacagggccaagctactggctaagaacagacaaactttcctgcttcagaccacaaagctgacccgtcttgccagacgcatgtgcagggacctattacagccaaggagggccgcccgacggccttatgctcctatcaatgccaatgccatcaaagcagagtgctccattcgacttcctaaggccgccaagactccattgaagattcaccctctggtgcggctgcccctggcaactatcgtcaaagatctggtggcccaggcacccctgaaaccaaaaacacctcggggtaccaagacaccgatcaacagaaaccagctgtcccagaaccggggactggggggcattatggtgaaacgggcctatgagactatggcaggggcaggggttcctttctctgccaatggaaggcctctggcttcagggattcgttcaagctcacagccagcagccaagcgtcagaaactaaacccagctgatgcccccaatcctgtggtgtttgtggccacaaaggataccagggccctacggaaggctctgacccatctggaaatgcggcgagctgctcgccgacccaacttgcccctgaaggtgaagccaacgctgattgcagtgcggccccctgtccctctacctgcaccctcacatcctgccagcaccaatgagcctattgtcctggaggactgagcacctgtggggaagggaggtgggctgagaggtagagggtggatgcccagggcacccaaacctcccttccctttcgtgtcgaagggagtgaggagtgaattaaggaagagagcaagtgagtgtgtgtccctggaggggttgggcgccctctggtgttaccacctcgagacttgtctcatgcctccatgcttgccgatggaggacagactgcaggaacttggcccatgtgggaacctagcctgttttggggggtaggacccacagatgtcttggacagttttggggggagggttttttaattttttaaaagttttgcctccctttgtgaaaggggatggggaggggaagagtaaacagataacaggtggtggtacctggttgggggaggggggcgtgcactgccatgtctttttttttttttttttttttttttttcctaattgggggtttctctttctgtccggtgtccggactttcctaattggagtttgaggcccctaagctggcatcaaccccaggccacgctcgctctttccttccctcccctccccctctgccttttgtacgccagttctcagaaataaagatcttttgtccgtttttttaacctcggattctgtaattggttcttatagtaacaaataaaaagctgttttcttcagcttctcctgg

SEQ ID NO: 3231 - protein, 668 aa, Homo sapiens
MAANMYRVGDYVYFENSSSNPYLVRRIEELNKTANGNVEAKVVCLFRRRDISSSLNSLADSNAREFEEESKQPGVSEQQRHQLKHRELFLSRQFESLPATHIRGKCSVTLLNETDILSQYLEKEDCFFYSLVFDPVQKTLLADQGEIRVGCKYQAEIPDRLVEGESDNRNQQKMEMKVWDPDNPLTDRQIDQFLVVARAVGTFARALDCSSSIRQPSLHMSAAAASRDITLFHAMDTLQRNGYDLAKAMSTLVPQGGPVLCRDEMEEWSASEAMLFEEALEKYGKDFNDIRQDFLPWKSLASIVQFYYMWKTTDRYIQQKRLKAAEADSKLKQVYIPTYTKPNPNQIISVGSKPGMNGAGFQKGLTCESCHTTQSAQWYAWGPPNMQCRLCASCWIYWKKYGGLKTPTQLEGATRGTTEPHSRGHLSRPEAQSLSPYTTSANRAKLLAKNRQTFLLQTTKLTRLARRMCRDLLQPRRAARRPYAPINANAIKAECSIRLPKAAKTPLKIHPLVRLPLATIVKDLVAQAPLKPKTPRGTKTPINRNQLSQNRGLGGIMVKRAYETMAGAGVPFSANGRPLASGIRSSSQPAAKRQKLNPADAPNPVVFVATKDTRALRKALTHLEMRRAARRPNLPLKVKPTLIAVRPPVPLPAPSHPASTNEPIVLED

SEQ ID NO: 3232 - DNA, 2917 bp, Homo sapiens
gcaaactctgcacaagatggcggcggtagcggcagtggcggcgcgtaggaggcggtcttgggcgtctttggtactggcttttttaggggtctgcctggggattacccttgctgtggatagaagcaactttaagacctgtgaagagagttctttctgcaagcgacagagaagcatacggccaggcctctctccataccgagccttgctggactctctacagcttggtcctgattccctcacggtccatctgatccatgaggtcaccaaggtgttgctggtgctagagcttcaggggcttcaaaagaacatgactcggttcaggattgatgagctggagcctcggcgaccccgataccgtgtaccagatgttttggtggctgatccaccaatagcccggctttctgtctctggtcgtgatgagaacagtgtggagttaaccatggctgagggaccctacaagatcatcttgacagcacggccattccgccttgacctactagaggaccgaagtcttttgcttagtgtcaatgcccgaggactcttggagtttgagcatcagagggcccctagggtctctttctcggataaggttaatctcacgcttggtagcatatgggataagatcaagaaccttttctctaggcaaggatcaaaagacccagctgagggcgatggggcccagcctgaggaaacacccagggatggcgacaagccagaggagactcaggggaaggcagagaaagatgagccaggagcctgggaggagacattcaaaactcactctgacagcaagccgtatggccccatgtctgtgggtttggacttctctctgccaggcatggagcatgtctatgggatccctgagcatgcagacaacctgaggctgaaggtcactgagggtggggagccatatcgcctctacaatttggatgtgttccagtatgagctgtacaacccaatggccttgtatgggtctgtgcctgtgctcctggcacacaaccctcatcgcgacttgggcatcttctggctcaatgctgcagagacctgggttgatatatcttccaacactgccgggaagaccctgtttgggaagatgatggactacctgcagggctctggggagaccccacagacagatgttcgctggatgtcagagactggcatcattgacgtcttcctgctgctggggccctccatctctgatgttttccggcaatatgctagtctcacaggaacccaggcgttgcccccactcttctccctcggctaccaccagagccgttggaactaccgggacgaggctgatgtgctggaagtggatcagggctttgatgatcacaacctgccctgtgatgtcatctggctagacattgaacatgctgatggcaagcggtatttcacctgggaccccagtcgcttccctcagccccgcaccatgcttgagcgcttggcttctaagaggcggaagctggtggccatcgtagacccccacatcaaggtggactccggctaccgagttcacgaggagctgcggaacctggggctgtatgttaaaacccgggatggctctgactatgagggctggtgctggccaggctcagctggttaccctgacttcactaatcccacgatgagggcctggtgggctaacatgttcagctatgacaattatgagggctcagctcccaacctctttgtctggaatgacatgaacgaaccatctgtgttcaatggtcctgaggtcaccatgctcaaggatgcccagcattatgggggctgggagcaccgggatgtgcataacatctatggcctttatgtgcacatggcgactgctgatgggctgagacagcgctctgggggcatggaacgcccctttgtcctggccagggccttcttcgctggctcccagcgctttggagccgtgtggacaggggacaacactgccgagtgggaccatttgaagatctctattcctatgtgtctcagcttggggctggtgggactttccttctgtggggcggatgtgggtggcttcttcaaaaacccagagccagagctgcttgtgcgctggtaccagatgggtgcttaccagccattcttccgggcacatgcccacttggacactgggcgacgagagccatggctgttaccatctcagcacaatgatataatccgagatgccttgggccagcgatattctttgctgcccttctggtacaccctcttatatcaggcccatcgggaaggcattcctgtcatgagacccctgtgggtgcagtaccctcaggatgtgactaccttcaatatagatgatcagtacttgcttggggatgcgttgctggttcaccctgtatcagactctggagcccatggtgtccaggtctatctgcctggccaaggggaggtgtggtatgacattcaaagctaccagaagcatcatggtccccagaccctgtacctgcctgtaactctaagcagtatccctgtgttccagcgtggagggacaatcgtgcctcgatggatgcgagtgcggcggtcttcagaatgtatgaaggatgaccccatcactctctttgttgcacttagccctcagggtacagctcaaggagagctctttctggatgatgggcacacgttcaactatcagactcgccaagagttcctgctgcgtcgattctcattctctggcaacacccttgtctccagctcagcagaccctgaaggacactttgagacaccaatctggattgagcgggtggtgataataggggctggaaagccagcagctgtggtactccagacaaaaggatctccagaaagccgcctgtccttccagcatgaccctgagacctctgtgttggtcctgcgcaagcctggcatcaatgtggcatctgattggagtattcacctgcgataa

SEQ ID NO: 3233 - protein, 966 aa, Homo sapiens
MAAVAAVAARRRRSWASLVLAFLGVCLGITLAVDRSNFKTCEESSFCKRQRSIRPGLSPYRALLDSLQLGPDSLTVHLIHEVTKVLLVLELQGLQKNMTRFRIDELEPRRPRYRVPDVLVADPPIARLSVSGRDENSVELTMAEGPYKIILTARPFRLDLLEDRSLLLSVNARGLLEFEHQRAPRVSFSDKVNLTLGSIWDKIKNLFSRQGSKDPAEGDGAQPEETPRDGDKPEETQGKAEKDEPGAWEETFKTHSDSKPYGPMSVGLDFSLPGMEHVYGIPEHADNLRLKVTEGGEPYRLYNLDVFQYELYNPMALYGSVPVLLAHNPHRDLGIFWLNAAETWVDISSNTAGKTLFGKMMDYLQGSGETPQTDVRWMSETGIIDVFLLLGPSISDVFRQYASLTGTQALPPLFSLGYHQSRWNYRDEADVLEVDQGFDDHNLPCDVIWLDIEHADGKRYFTWDPSRFPQPRTMLERLASKRRKLVAIVDPHIKVDSGYRVHEELRNLGLYVKTRDGSDYEGWCWPGSAGYPDFTNPTMRAWWANMFSYDNYEGSAPNLFVWNDMNEPSVFNGPEVTMLKDAQHYGGWEHRDVHNIYGLYVHMATADGLRQRSGGMERPFVLARAFFAGSQRFGAVWTGDNTAEWDHLKISIPMCLSLGLVGLSFCGADVGGFFKNPEPELLVRWYQMGAYQPFFRAHAHLDTGRREPWLLPSQHNDIIRDALGQRYSLLPFWYTLLYQAHREGIPVMRPLWVQYPQDVTTFNIDDQYLLGDALLVHPVSDSGAHGVQVYLPGQGEVWYDIQSYQKHHGPQTLYLPVTLSSIPVFQRGGTIVPRWMRVRRSSECMKDDPITLFVALSPQGTAQGELFLDDGHTFNYQTRQEFLLRRFSFSGNTLVSSSADPEGHFETPIWIERVVIIGAGKPAAVVLQTKGSPESRLSFQHDPETSVLVLRKPGINVASDWSIHLR

SEQ ID NO: 3234 - DNA, 3259 bp, Homo sapiens
cgccgctcgcgcctcgggctcggctcgggctccgggatgtccgcgctgtgcgaccctcccggggccccagggccacctgggcctgccccggccacccacggtcccgcgcctctcagtgctcaggagctgtcccaggaaatcaaggcttttctgactggcgtagaccccattctgggccaccaactctcagcccgggaacatgctcgctgtggtcttctcctgctccgttctttgccacctgctcgggctgctgtgcttgaccacttgagaggtgtctttgatgagagtgtccgggcccacctggctgccctggatgaaacccctgtggctggtccacctcacctccgtccacctccaccctctcatgtccctgctggtggacctggtctagaggatgtggttcaggaagtgcagcaggtgctgtctgagtttatccgggccaacccaaaggcctgggcacctgtgattagtgcatggtccattgacctcatggggcaactgagcagcacgtactcaggccagcaccagcgtgttccccacgctactggcgctcttaatgaactgctacagctgtggatgggttgtagggccacgcgtacattaatggacatctatgtgcagtgcctctcggctctcattggtagctgcccagatgcgtgtgtggatgccttgctggatacctctgttcagcattctccacactttgactgggttgtggcacatattggctcctcttttcctggcaccatcatttcccgggttctctcctgtggccttaaggacttttgtgtccatggtggggctggaggtggagctggcagtagtggtggaagctcttctcagaccccctctacagaccccttccctggatctcctgccattcctgcggagaaacgggtgcccaagattgcctcagttgtaggcatcctaggtcacctggcctcccgccacggagatagcatccgacgggagctcctgcgaatgttccatgatagcctggcagggggatctggaggccgcagtggggacccctcccttcaggccacggttccgttcctactgcagctggcagtcatgtcaccagctttgctgggcactgtctctggagagcttgtggattgcctcaagcccccagctgtgctgagccagctgcagcaacaccttcaaggattcccccgagaggagctggacaacatgttgaacctggctgtgcacctggtgagccaggcctctggggcaggtgcctaccgcttgctgcagttcctggtggacacagctatgcctgcttcggtcattaccacccagggcctggctgtgccagacaccgtgcgtgaggcttgtgaccggctaatccagctgctgctgctgcacctgcaaaaactggttcatcaccggggagggtctcctggggaaggggtgctaggcccgcccccacctccccgcttggtgccctttttagatgcgctcaaaaaccatgttggagagctgtgtggagagacgttacgattggaacggaagcgcttcctctggcagcaccagctcttgggcctgctgtctgtctatacccggcctagctgtggacctgaggccttgggccatctgctgagccgagcccgaagccctgaagagttgagtttggccacccagttatatgcagggctagtggtcagcctctctggcctcctgcccctggctttccgaagctgtctggctcgggtgcatgcagggacattacagcctcccttcacggcccggttcctgcgcaacttggcactgctagtagggtgggaacagcagggtggcgagggccctgcagccctaggggcgcactttggggaatctgcctcagcccatctgtctgacctggctcctctcctgctacatcctgaggaggaagtagctgaagctgctgcctctctcctggccatttgtccctttccttctgaagccttatccccctcccagctcctgggactggtaagggctggggtgcaccgcttctttgcctctctgaggctgcatggacccccaggtgtggcctcagcctgtcagcttctcacccgcctgtctcagacatccccagctgggctcaaggctgtcctgcagctgctggttgaaggagccttacatcgaggcaacacagaactgtttggtgggcaagtagatggggacaatgagactctctcagttgtttcagcttctttggcttctgcctccctgttggacactaaccggaggcacactgcagctgtgccaggtcctggagggatttggtcagttttccatgctggagtcatcggccgtggcttaaagccacccaagtttgtccagtcacgaaatcagcaggaagtgatctataacacccagagcctcctcagcctcctggttcactgctgcagtgccccagggggcactgaatgtggggaatgctggggggcacccatcttgagtccagaggcagccaaagcagtggcagtgaccttggtggagagtgtgtgtcccgatgcagctggtgcagagctggcctggccccccgaggaacacgcccgggccaccgtggagcgggatctccgcattggccggcgcttccgcgaacagcccctgctctttgagctgttaaagctggtagcagctgcacccccagccctgtgctactgttccgtgctgcttcgggggctgctggccgccctcttgggccattgggaagcctctcgccaccctgacacgacccactccccctggcacctggaggcatcctgcaccttagtggctgtcatggctgagggaagcctcctgcctccggccctgggtaatatgcatgaagtatttagccaactggcacctttcgaggtgcgtctgctgctgctcagtgtctggggttttctccgggagcatgggcccttgcctcagaagttcatcttccaatcagagcggggtcgcttcattcgggacttctccagggagggtggaggtgagggtggaccccatctggctgtgctgcacagtgtcctccaccgcaacatcgaccgcctaggtcttttctctggccgtttccaggcaccttcaccgtccactctccttcgacaggggacgtagccttttcttgctctggaagcccagggaggttgagcagtgagagagggaagggactaacgtgctccggaagggtggaggtttctcttctaagtccttggtctaaagagcgctgtcacttttttctctcccacttttttttttctaaataaaatttgccaacttg

SEQ ID NO: 3235 - protein, 1019 aa, Homo sapiens
MSALCDPPGAPGPPGPAPATHGPAPLSAQELSQEIKAFLTGVDPILGHQLSAREHARCGLLLLRSLPPARAAVLDHLRGVFDESVRAHLAALDETPVAGPPHLRPPPPSHVPAGGPGLEDVVQEVQQVLSEFIRANPKAWAPVISAWSIDLMGQLSSTYSGQHQRVPHATGALNELLQLWMGCRATRTLMDIYVQCLSALIGSCPDACVDALLDTSVQHSPHFDWVVAHIGSSFPGTIISRVLSCGLKDFCVHGGAGGGAGSSGGSSSQTPSTDPFPGSPAIPAEKRVPKIASVVGILGHLASRHGDSIRRELLRMFHDSLAGGSGGRSGDPSLQATVPFLLQLAVMSPALLGTVSGELVDCLKPPAVLSQLQQHLQGFPREELDNMLNLAVHLVSQASGAGAYRLLQFLVDTAMPASVITTQGLAVPDTVREACDRLIQLLLLHLQKLVHHRGGSPGEGVLGPPPPPRLVPFLDALKNHVGELCGETLRLERKRFLWQHQLLGLLSVYTRPSCGPEALGHLLSRARSPEELSLATQLYAGLVVSLSGLLPLAFRSCLARVHAGTLQPPFTARFLRNLALLVGWEQQGGEGPAALGAHFGESASAHLSDLAPLLLHPEEEVAEAAASLLAICPFPSEALSPSQLLGLVRAGVHRFFASLRLHGPPGVASACQLLTRLSQTSPAGLKAVLQLLVEGALHRGNTELFGGQVDGDNETLSVVSASLASASLLDTNRRHTAAVPGPGGIWSVFHAGVIGRGLKPPKFVQSRNQQEVIYNTQSLLSLLVHCCSAPGGTECGECWGAPILSPEAAKAVAVTLVESVCPDAAGAELAWPPEEHARATVERDLRIGRRFREQPLLFELLKLVAAAPPALCYCSVLLRGLLAALLGHWEASRHPDTTHSPWHLEASCTLVAVMAEGSLLPPALGNMHEVFSQLAPFEVRLLLLSVWGFLREHGPLPQKFIFQSERGRFIRDFSREGGGEGGPHLAVLHSVLHRNIDRLGLFSGRFQAPSPSTLLRQGT

SEQ ID NO: 3236 - DNA, 3462 bp, Homo sapiens
gaggaacatgattttattggttctttcagttcaccacatccgactcgcgtctcggccctggcccgccttgcggaccttaaagcagtcagtccagggtttgggggaaacgtgctcacccgacggcagctcacaggaccccggagagtcctggcatggtatctcggtccggactctccgctgggcccacgaaggagaaaggctgcctcggattcctgcgcccaagccaaggtccggcgcccacggaggcaagtccggtctcacggtgacctcccgctggcgccgccttcgccgccaaccatccagttcttcctccaggccacgttctcctgcgtggtcgctgcctcctgcagagtggccagcaatagctgctgggtcctggccgcctcctccctgctccttgggtcctgcagtggcatctcctgagggcaggaaggggagttcgcaggagctccagtccggggctctccacccgcccacccttcctcgggactaccagttgcttctacctttagcatttcctgcttccgccgctctcccggggtcacgataacgaggagcgcgtagcccacgccagcccctgcgcccagcattgcgactgagatcagcattttccgcaaggaatccatggccgcctgcacagccagcggagcgcccacgggagctccccgcagccgcaagctgttgccgcgcggtctcactaccccttggcgcaggctagagcgccctatagcagaaaccatagataagcggccggctagagaggacctgctcgaggaaacgtttggaatccggagcgcttggatctcaggtttagctgagggggttgaggtgtccaagaagtgctggcaccaagggctgagcgcggggaccctgtgtcctcaattccggggtgggattgctagggggagagtgcgtgtcttcatggttgccgtgggttttatgattgcccatttttctgtcttccgacgtttcccgatcagtagaggcccgagctgtgctctgtggtttcctgcagtcacccgcgagttttcaacacagcgcatggagggcatctacacacatacacatccctctccatcccctcaactctggaacaaacactcaaagtcaagtatactggttggagaaatgggtaatagttacttatctttaacatttattttacaaacaacctattccttttctcgtcatggtacacacttggtattgtttgggtttttttttggttttgttgttgttgttagtgtgtgggcgtggttttgtttgtttttggagacaaggtctcgctctgtcgcccagggctggagtgcagtggcgcgatcatggctcactgaagcctcgacttccagggcccaagcgatcctcctgcctcaacctcccggatagctgggattacaggcgtgcaccaccacgcccggctggtattgctttttgttttgcttcgttttcttttttgctttttgagacagagtctcactctgttgcccagctggagtgcagtggcgtgatctcggctcactgcaagctctgcctcccgggttcacgccattctcctgcctcagcctcccgagtagctgggactacaggcgcccgccaccacggccggctaattttttgtatttttagtagagaaagagtttcactatgtaggtcaggctggtctcgaactcctgacctcgtgatccgcccaatccgcccacctcggcctcccaaagtgctgggattacaggtgtgagccaccgcgcccggctgttttgctttgttttcaaccactaaaaggctggattcgtgtaacatactgaattctgctttacagaagaaaacacctcttagctgtgtgactgattataggcaagttcttgtgccccggtttctgcatcagaaaatgaagcttataacaacagtacttgtctcacagttttaggataattaaattagttatatgtaaagcaattaaaacagctcctgccaaagagtaaacaccatataaatattcattaaataacatacaaacataccaggttgggaaaaatcagtaagcataggagtcaggaaattccaagttggttatcacaactcttggcccacagggctttaatccaggtgcccttgtctcctacccttgttgccatcccagtgtctccagggagtaagtagaaataaagatcctatctcacctcttgggcattttcccctgccctgaaagcgtataatcgcttagcacagtcggtgcttaaggggccaggctccaaagaagattaaaggaacagtttgtggggtgcactgggcagcagtactctcctctgagttcaatcatcttgcactctaagaatcaccaccatggcccttgtgccagggagaagcaaggaggatgggctttggactagaaatagcccaggctcctcccagcatccagaaagtcccaggctgcccaaccctctctgggacagaggaaaaattggcaaggttgaaggtcaccagcacattcaggatttctctcaaaagtcccatctgccgtctattgtggtggaatccagtgaggtgaatgaagagagtggggatctccatttgccccatgaggagctgctgctgctcactgatggtgaggaagaggatgctgaggccttcttccaagaccaaagtgaagagccaggctgggcttggagcccacaggaccctagaagtcctttaagaacatttaacgctggactcagctgggggcaggaccaggatgaagaagatgcttgttggattcttgaggacacagcatgtctggaagccaccaaccactgtcccttctgggactcaacaggctcccgtgtttgtagaagtggctttgtggaatattcccatctcctgcctcctaatagctttgagggagctgaagaagaagctgttcaaacgccggcgggtgttgaatcgggagcggcgtctgaggcaccgggtggtcggggctgtgatagaccaagggctgatcacgcggcaccacctcaagaagcgggcgtccagtgcacgtgccaacattacactgtcagggaagaagcgcagaaaactcctccagcagatccggcttgcccagaaagagaagacagccatggaagtggaagccccttcaaagccagccaggactagtgaaccacagctcaaaaggcaaaagaagacaaaagccccccaggatgtagaaatgaaggaccttgaagatgagagctaaacctcttccactagaagattctcaactggagccagccttcagactcagtggttgtttcagaggactttgacaaaagcaaggccccttttcactctccagatttcctcctacctaatggcctactgacctcccctagagggatgtctttgggagggaagaaggtacagaagaaagattggagaagggcctctctagcagtcaactccatttgtaataaagccctagcactctgaaaaaaaaaaaaaaaaaaa

SEQ ID NO: 3237 - protein, 159 aa, Homo sapiens
MKKMLVGFLRTQHVWKPPTTVPSGTQQAPVFVEVALWNIPISCLLIALRELKKKLFKRRRVLNRERRLRHRVVGAVIDQGLITRHHLKKRASSARANITLSGKKRRKLLQQIRLAQKEKTAMEVEAPSKPARTSEPQLKRQKKTKAPQDVEMKDLEDES

SEQ ID NO: 3238 - DNA, 1316 bp, Homo sapiens
ggcacgaggggctgctatagagccgggtgagagagcgagcgcccgtcggcgggtgtcgagggcgggttgcctcgcgctgacccttcccgccctccttctcgtcacacaccaggtccccgcggaagccgcggtgtcggcgccatggcggagctgacggctcttgagagtctcatcgagatgggcttccccaggggacgcgcggagaaggctctggccctcacagggaaccagggcatcgaggctgcgatggactggctgatggagcacgaagacgaccccgatgtggacgagcctttagagactccccttggacatatcctgggacgggagcccacttcctcagagcaaggcggccttgaaggatctggttctgctgccggagaaggcaaacccgctttgagtgaagaggaaagacaggaacaaactaagaggatgttggagctggtggcccagaagcagcgggagcgtgaagaaagagaggaacgggaggcattggaacgggaacggcagcgcaggagacaagggcaagagttgtcagcagcacgacagcggctacaggaagatgagatgcgccgggctgctgaggagaggcggagggaaaaggccgaggagttagcagccagacaaagagttagagaaaagatcgagagggacaaagcagagagagccaagaagtatggtggcagtgtgggctctcagccacccccagtggcaccagagccaggtcctgttccctcttctcccagccaggagcctcccaccaagcgggagtatgaccagtgtcgcatacaggtcaggctgccagatgggacctcactgacccagacgttccgggcccgggaacagctggcagctgtgaggctctatgtggagctccaccgtggggaggaactaggtgggggccaggaccctgtgcaattgctcagtggcttccccagacgggccttctcagaagctgacatggagcggcctctgcaggagctgggtatggctgcaagactagaaaccaggactagaaactgggggagtagggaggcatgcctaggaaaaggagggatgcaaagagaaggggctttgtgaacatggtgcaaggccaggaattttgggagcaaaaaccaagtatccttgtggttcaagcctgttttcttccatcttcaggactcgtgccttctgctgttctcattgtggccaagaaatgtcccagctgagggcctttgtcccattgtccctctgtgaccccttcatctttgataaagcactgacatctccttcctaataaatagaccctgagttctgtaaaaaaaaaaaaaaaaaaa

SEQ ID NO: 3239 - protein, 312 aa, Homo sapiens
MAELTALESLIEMGFPRGRAEKALALTGNQGIEAAMDWLMEHEDDPDVDEPLETPLGHILGREPTSSEQGGLEGSGSAAGEGKPALSEEERQEQTKRMLELVAQKQREREEREEREALERERQRRRQGQELSAARQRLQEDEMRRAAEERRREKAEELAARQRVREKIERDKAERAKKYGGSVGSQPPPVAPEPGPVPSSPSQEPPTKREYDQCRIQVRLPDGTSLTQTFRAREQLAAVRLYVELHRGEELGGGQDPVQLLSGFPRRAFSEADMERPLQELGMAARLETRTRNWGSREACLGKGGMQREGAL

SEQ ID NO: 3240 - DNA, 2012 bp, Homo sapiens
ggcacgaggcctaagagttcctctgctgtacgactgcactcccgcaccctcccctaaatcccccctcttcggcctgtttaccttttaacttggcttcgttgcacgtttgtgtgtgtgtgtttgctcttcgcagcctcttgagcgtcttttgtacttaattcttacactgtggacgctctctcgcgcccgccatcccccgacccctctgatctccgatccttgacgatgtctagcctgcattgattggcccttttccctgggtatggcagatctattgcttgatgatcctctccccccaagaattctaacacaggagctgtcctgaggctctggatgactttattcttcaaatggctttaccctcccagtagctccagggaccctccattttccatatccaggaaaatgtgatgcgccacaggtatcagcgtctggatcgccacttcacgttttagccacaagtgactcagtggaagatccagagtcaacagaggctcgtcaggaagatgtctacagaaaaggtagaccaaaaggaggaagctggggaaaaagaggtgtgcggagaccagatcaaaggaccggacaaagaggaggaaccaccagctgctgcatcccatggccaggggtggcgtccaggtggcagagcagctaggaacgcaaggcctgaacctggggccagacaccctgctctcccggccatggtcaacgaccctccagtacctgccttactgtgggcccaggaggtgggccaagtcttggcaggccgtgcccgcaggctgctgctgcagtttggggtgctcttctgcaccatcctccttttgctctgggtgtctgtcttcctctatggctccttctactattcctatatgccgacagtcagccacctcagccctgtgcatttctactacaggaccgactgtgattcctccaccacctcactctgctccttccctgttgccaatgtctcgctgactaagggtggacgtgatcgggtgctgatgtatggacagccgtatcgtgttaccttagagcttgagctgccagagtcccctgtgaatcaagatttgggcatgttcttggtcaccatttcctgctacaccagaggtggccgaatcatctccacttcttcgcgttcggtgatgctgcattaccgctcagacctgctccagatgctggacacactggtcttctctagcctcctgctatttggctttgcagagcagaagcagctgctggaggtggaactctacgcagactatagagagaactcgtacgtgccgaccactggagcgatcattgagatccacagcaagcgcatccagctgtatggagcctacctccgcatccacgcgcacttcactgggctcagatacctgctatacaacttcccgatgacctgcgccttcataggtgttgccagcaacttcaccttcctcagcgtcatcgtgctcttcagctacatgcagtgggtgtgggggggcatctggccccgacaccgcttctctttgcaggttaacatccgaaaaagagacaattcccggaaggaagtccaacgaaggatctctgctcatcagccaggtgcagggcctgaaggccaggaggagtcaactccgcaatcagatgttacagaggatggtgagagccctgaagatccctcagggacagagggtcagctgtccgaggaggagaaaccagatcagcagcccctgagcggagaagaggagctagagcctgaggccagtgatggttcaggctcctgggaagatgcagctttgctgacggaggccaacctgcctgctcctgctcctgcttctgcttctgcccctgtcctagagactctgggcagctctgaacctgctgggggtgctctccgacagcgccccacctgctctagttcctgaagaaaaggggcagactcctcacattccagcactttcccacctgactcctctcccctcgtttttccttcaataaactattttgtgtcagcttcaaaaaaaaaaaaaaaaaaa

SEQ ID NO: 3241 - protein, 464 aa, Homo sapiens
MSTEKVDQKEEAGEKEVCGDQIKGPDKEEEPPAAASHGQGWRPGGRAARNARPEPGARHPALPAMVNDPPVPALLWAQEVGQVLAGRARRLLLQFGVLFCTILLLLWVSVFLYGSFYYSYMPTVSHLSPVHFYYRTDCDSSTTSLCSFPVANVSLTKGGRDRVLMYGQPYRVTLELELPESPVNQDLGMFLVTISCYTRGGRIISTSSRSVMLHYRSDLLQMLDTLVFSSLLLFGFAEQKQLLEVELYADYRENSYVPTTGAIIEIHSKRIQLYGAYLRIHAHFTGLRYLLYNFPMTCAFIGVASNFTFLSVIVLFSYMQWVWGGIWPRHRFSLQVNIRKRDNSRKEVQRRISAHQPGAGPEGQEESTPQSDVTEDGESPEDPSGTEGQLSEEEKPDQQPLSGEEELEPEASDGSGSWEDAALLTEANLPAPAPASASAPVLETLGSSEPAGGALRQRPTCSSS

SEQ ID NO: 3242 - DNA, 2264 bp, Homo sapiens
ggcacgagggagcgcttgggagttaggttgtttgccggcgtagcggccagcgcctgagcccgccgttgatcttcgctgtggcatggcggacgaggggaagtcgtacagcgaacacgatgatgaacgcgttaatttccctcaaagaaagaagaaaggccggggtcccttccggtggaaatatggtgaaggaaaccgtaggtctggaagaggcggttctggtattcggtcttcccgccttgaggaagatgatggagatgtggcaatgagtgatgcccaggatggtccccgagtacgatacaacccctataccacccgacctaaccgtcggggtgatacttggcatgatcgagatcgcattcatgttactgtgcggagagacagagctcctccagagagaggaggggctggcaccagccaggatgggacctcaaagaactggttcaagattacaattccttatggcagaaagtatgacaaggcatggctcctgagcatgattcagagcaagtgcagtgtgcccttcacccctattgagtttcactatgagaatacacgggcccagttcttcgttgaagacgccagtactgcctctgcattgaaggctgtcaactataagattttggatcgggagaaccgaaggatatctatcatcatcaactcttctgctccaccccacactatactgaatgaactgaagccagaacaagtagaacagctaaagctgatcatgagcaaacgatacgatggctcccaacaagcccttgacctcaaaggcctccgttcagacccagatttggtggcccagaacattgacgttgtcctgaatcgcagaagctgtatggcagctaccctgaggatcattgaagagaacatccctgagctattgtccttgaacttgagcaacaacaggctgtacaggctggatgacatgtctagcattgttcagaaggcacccaacctgaagatcctaaacctttctggaaatgaattgaagtctgagcgggaattggacaagataaaggggctgaagctagaagagctctggctcgatggaaactccctgtgtgacaccttccgagaccagtccacctacatcagcgccattcgcgaacgatttcccaagttactacgcctggatggccatgagctacccccaccaattgcctttgatgttgaagcccccacgacgttaccgccctgcaagggaagctattttggaacagaaaacttgaagagtctggtcttgcacttcctgcaacagtactatgcaatttacgactctggagaccgacaagggctcctggatgcctaccatgatggggcctgctgttccctgagcattcctttcattcctcagaaccctgcccgaagcagcttagccgagtatttcaaggatagcagaaatgtgaagaagcttaaagaccctaccttgcggttccggctgctgaagcacacgcgtctcaacgttgttgccttcctcaatgagttgcccaaaacccagcacgacgtcaattccttcgtggtagacataagcgcccagacaagcacattgctgtgtttttctgtcaatggagtcttcaaggaagtggacggaaagtcccgggattctttgcgagccttcacccggacattcattgctgttcctgctagcaattcagggctatgtattgtaaatgatgagctatttgtgcggaatgccagttctgaagagatccaaagagccttcgctatgcctgcacccacgccttcctccagcccggtgcccaccctctctccagagcagcaggaaatgttgcaagcattctctacccagtctggcatgaacctcgagtggtcccagaagtgccttcaggacaacaactgggactacaccagatctgcccaggccttcactcatctcaaggccaagggcgagatcccagaagtggcattcatgaagtgatcgtagtcatgcctcagaagcagtcccccctgtaaatagtccttggatattaccgtctggttgtcgtctgtcatctcctcctgtctggcccgaggccgccccgtgactgtgaccgagggagggagggctgcctgatccctctcctcgcctgccttctggaagacttcagaagattgagcctcactggtgccaggaagccaaagcttactttgtagaactgacactaaactacccgaaggacttaggtgctttgtgtacttaaccccaggacctccttactttttaatataaagagtgatgttgtaaaaaaaaaaaaaaaaaa

SEQ ID NO: 3243 - protein, 619 aa, Homo sapiens
MADEGKSYSEHDDERVNFPQRKKKGRGPFRWKYGEGNRRSGRGGSGIRSSRLEEDDGDVAMSDAQDGPRVRYNPYTTRPNRRGDTWHDRDRIHVTVRRDRAPPERGGAGTSQDGTSKNWFKITIPYGRKYDKAWLLSMIQSKCSVPFTPIEFHYENTRAQFFVEDASTASALKAVNYKILDRENRRISIIINSSAPPHTILNELKPEQVEQLKLIMSKRYDGSQQALDLKGLRSDPDLVAQNIDVVLNRRSCMAATLRIIEENIPELLSLNLSNNRLYRLDDMSSIVQKAPNLKILNLSGNELKSERELDKIKGLKLEELWLDGNSLCDTFRDQSTYISAIRERFPKLLRLDGHELPPPIAFDVEAPTTLPPCKGSYFGTENLKSLVLHFLQQYYAIYDSGDRQGLLDAYHDGACCSLSIPFIPQNPARSSLAEYFKDSRNVKKLKDPTLRFRLLKHTRLNVVAFLNELPKTQHDVNSFVVDISAQTSTLLCFSVNGVFKEVDGKSRDSLRAFTRTFIAVPASNSGLCIVNDELFVRNASSEEIQRAFAMPAPTPSSSPVPTLSPEQQEMLQAFSTQSGMNLEWSQKCLQDNNWDYTRSAQAFTHLKAKGEIPEVAFMK

SEQ ID NO: 3244 - DNA, 2375 bp, Homo sapiens
gaacttgcggcgcgaaaaaggcgcgcatgcgtcctacgggagcgtgctggctcaccgaccgcattgcggcttggttttctcacccagtgcatgtggcaggagcggtgagatcactgcctcacggcgatcctggactgacggtcacgactgcctaccctctaaccctgttctgagctgccccttgcccacacaccccaaacctgtgtgcaggatccgcctccatggagctacagcctcctgaagcctcgatcgccgtcgtgtcgattccgcgccagttgcctggctcacattcggaggctggtgtccagggtctcagcgcgggggacgactcagagttggggtctcactgtgttgcccagactggtctcgaactcttggcctcaggtgatcctcttccctcagcttcccagaatgccgagatgatagagacggggtctgactgtgttacccaggctggtcttcaactcttggcctcaagtgatcctcctgccttagcttccaagaatgctgaggttacagtagaaacggggtttcaccatgttagccaggctgatattgaattcctgacctcaattgatccgactgcctcggcctccggaagtgctgggattacaggcaccatgagccaggacaccgaggtggatatgaaggaggtggagctgaatgagttagagcccgagaagcagccgatgaacgcggcgtctggggcggccatgtccctggcgggagccgagaagaatggtctggtgaagatcaaggtggcggaagacgaggcggaggcggcagccgcggctaagttcacgggcctgtccaaggaggagctgctgaaggtggcaggcagccccggctgggtacgcacccgctgggcactgctgctgctcttctggctcggctggctcggcatgcttgctggtgccgtggtcataatcgtgcgagcgccgcgttgtcgcgagctaccggcgcagaagtggtggcacacgggcgccctctaccgcatcggcgaccttcaggccttccagggccacggcgcgggcaacctggcgggtctgaaggggcgtctcgattacctgagctctctgaaggtgaagggccttgtgctgggtccaattcacaagaaccagaaggatgatgtcgctcagactgacttgctgcagatcgaccccaattttggctccaaggaagattttgacagtctcttgcaatcggctaaaaaaaagagcatccgtgtcattctggaccttactcccaactaccggggtgagaactcgtggttctccactcaggttgacactgtggccaccaaggtgaaggatgctctggagttttggctgcaagctggcgtggatgggttccaggttcgggacatagagaatctgaaggatgcatcctcattcttggctgagtggcaaaatatcaccaagggcttcagtgaagacaggctcttgattgcggggactaactcctccgaccttcagcagatcctgagcctactcgaatccaacaaagacttgctgttgactagctcatacctgtctgattctggttctactggggagcatacaaaatccttagtcacacagtatttgaatgccactggcaatcgctggtgcagctggagtttgtctcaggcaaggctcctgacttccttcttgccggctcaacttctccgactctaccagctgatgctcttcaccctgccagggacccctgttttcagctacggggatgagattggcctggatgcagctgcccttcctggacagcctatggaggctccagtcatgctgtgggatgagtccagcttccctgacatcccaggggctgtaagtgccaacatgactgtgaagggccagagtgaagaccctggctccctcctttccttgttccggcggctgagtgaccagcggagtaaggagcgctccctactgcatggggacttccacgcgttctccgctgggcctggactcttctcctatatccgccactgggaccagaatgagcgttttctggtagtgcttaactttggggatgtgggcctctcggctggactgcaggcctccgacctgcctgccagcgccagcctgccagccaaggctgacctcctgctcagcacccagccaggccgtgaggagggctcccctcttgagctggaacgcctgaaactggagcctcacgaagggctgctgctccgcttcccctacgcggcctgacttcagcctgacatggacccactacccttctcctttccttcccaggccctttggcttctgatttttctcttttttaaaaacaaacaaacaaactgttgcagattatgagtgaacccccaaatagggtgttttctgccttcaaataaaagtcacccctgcatggtg

SEQ ID NO: 3245 - DNA, 503 bp, Homo sapiens
gacagcggcttccttgatccttgccacccgcgactgaacaccgacagcagcagcctcaccatgaagttgctgatggtcctcatgctggcggccctctcccagcactgctacgcaggctctggctgccccttattggagaatgtgatttccaagacaatcaatccacaagtgtctaagactgaatacaaagaacttcttcaagagttcatagacgacaatgccactacaaatgccatagatgaattgaaggaatgttttcttaaccaaacggatgaaactctgagcaatgttgaggtgtttatgcaattaatatatgacagcagtctttgtgatttattttaactttctgcaagacctttggctcacagaactgcagggtatggtgagaaaccaactacggattgctgcaaaccacaccttctctttcttatgtctttttactacaaactacaagacaattgttgaaacctgctatacatgtttattttaataaattgatggca

SEQ ID NO: 3246 - protein, 93 aa, Homo sapiens
MKLLMVLMLAALSQHCYAGSGCPLLENVISKTINPQVSKTEYKELLQEFIDDNATTNAIDELKECFLNQTDETLSNVEVFMQLIYDSSLCDLF

SEQ ID NO: 3247 - DNA, 630 bp, Homo sapiens
cgccgccgctccagcgccgcgcagccaccgccgccgccgccgcctctccttagtcgccgccatgacgaccgcgtccacctcgcaggtgcgccagaactaccaccaggactcagaggccgccatcaaccgccagatcaacctggagctctacgcctcctacgtttacctgtccatgtcttactactttgaccgcgatgatgtggctttgaagaactttgccaaatactttcttcaccaatctcatgaggagagggaacatgctgagaaactgatgaagctgcagaaccaacgaggtggccgaatcttccttcaggatatcaagaaaccagactgtgatgactgggagagcgggctgaatgcaatggagtgtgcattacatttggaaaaaaatgtgaatcagtcactactggaactgcacaaactggccactgacatgaaagccatcaaagaattgggtgaccacgtgaccaacttgcgcaagatgggagcgcccgaatctggcttggcggaatatctctttgacaagcacaccctgggagacagtgataatgaaagctaagcctcgggctaatttccccatagccgtggggtgacttccctggtcaccaaggcagtgcatgcatgttgggg

SEQ ID NO: 3248 - DNA, 2343 bp, Homo sapiens
ctggtggggggaagaaggctcctgctacctcccttcccggcaccctccagagggaccctcagtctggccttgcaagcatggactcttctgaggagcacgctgggtgccccgcccgagggacatgtcccgtgttcctggccatgagtgcagggactgtccgctacgccccatcaggcctgtgccctgtacttgaggggaacttgagagaagagccctggggcacagacagcccaccccagccagaccagggcctcccgccgccccttgcagctgtcccggtcccctggaagagcacggacccctgccaaggccacagggagtccccaggagccctggtggagacctctgcaggggaggaggcccgaggccaggagggccccgcagccgcccagctggacgtgttgcgcctgcgcagctcttccatggagatccgagagaagggctccgagttcctgaaggaggagctgcacagagcgcagaaggagctgaagctaaaggacgaggaatgtgagcggctgtccaaggtgcgggagcagctagaacaggagctggaagagctgacggccagcctgtttgaggaagctcacaagatggttcgagaagccaacatgaagcaggcggcatcagaaaagcagctgaaggaggctcggggcaagatcgacatgctgcaggcagaggtgacagccttgaagacgctggtcatcacgtccacaccagcctctcccaaccgcgagcttcacccccagctgctgagccccaccaaggccgggccccgaaagggccactctcgccacaagagcaccagcagcaccctctgccccgccgtgtgtcccgctgcgggacacaccctcaccccagacagagagggcaaggaggtggacacaatcctgtttgcagagttccaggcctggagggaatcccccaccctggacaagacctgccccttcctggaaagggtgtaccgggaggacgtgggcccctgcctggacttcacgatgcaggagctctcggtgctggtacgggccgccgtggaggacaacacgctcaccattgagccggtggcttcgcagacgctgcccacagtgaaggtggccgaggttgactgtagcagcaccaacacatgtgccctgagcgggctgacccgcacctgccgccaccgaatccggctcggggactccaaaagccattactacatctcgccatcttcccgggccaggatcaccgcagtgtgcaacttcttcacctacatccgctacatccagcaaggcctggtgcggcaggacgcagagcccatgttctgggagatcatgaggttgcggaaggagatgtcactggccaagctcggcttcttcccccaggaggcttagggcgcggcccaggcctgaaggggagctctgagacagagcaaacacccaccccagaacaagccgacacacagggagacgggggcctggagccagccctgagccagaggcagaatggatggacagacaggccatggaggcagcactgagccagcaccacacgtccatcctgggacagacgggcctggacttcacggcaagacccccctctcttccccactgggttctgccaccaccaggaggatttcaagaaagcaccaaagaccagggagctcggatccatactcggggggcctcagcccttgggaggggacacctgaggcagccagcgccccctccccagtccccagaactgcctgcaggtgccttgttgctggcttgtcttcagaaagggactgttctgggtggctggatctccagggtaccctccaccccagctgccaagccctgggccagcagcacccccttgtggccatcctgtgccttgttcccggtggcctccctattggactactaggaggggctggcagggcctccatagcacagaattgccccaaagccttgttaagatgagtcaagacccctcccccgcttcctcccttcctttcccccttcctccctcccccttcacaaaggcctcccttgtcaccttccctcccaccccgtctcagccctgtgctcctggaggccctgctcccaaaaccgctggaaggactggggcactttctgccacagtagaacacagacagggcttcagatcgcccacgcctgttttcagctgtgggtggccatgcagacacgcgccctggcatgtggggcctgggtgggcaggcaggacctgggccctcccacccatcagagcccactcaggaccagcgttcggagctcccacctggacgcatccctcaccacgtccggatttccttctttggatggaatgtaacgcgatctctatttaataaaggcaggctttgttggt

SEQ ID NO: 3249 - DNA, 3149 bp, Homo sapiens
agggggcgcggtgggaggagtaggagaagacaaaagccgaaagcgaagagggcccgggctgcacacaccggctgggaggcagccgtctgtgcagcgagcagccggcgcggggaggccgcagtgcacggggcgtcacagtcggcaggcagcatggggaagggagggaaccagggcgagggggccgccgagcgcgaggtgtcggtgcccaccttcagctgggaggagattcagaagcataacctgcgcaccgacaggtggctggtcattgaccgcaaggtttacaacatcaccaaatggtccatccagcacccggggggccagcgggtcatcgggcactacgctggagaagatgcaacggatgccttccgcgccttccaccctgacctggaattcgtgggcaagttcttgaaacccctgctgattggtgaactggccccggaggagcccagccaggaccacggcaagaactcaaagatcactgaggacttccgggccctgaggaagacggctgaggacatgaacctgttcaagaccaaccacgtgttcttcctcctcctcctggcccacatcatcgccctggagagcattgcatggttcactgtcttttactttggcaatggctggattcctaccctcatcacggcctttgtccttgctacctctcaggcccaagctggatggctgcaacatgattatggccacctgtctgtctacagaaaacccaagtggaaccaccttgtccacaaattcgtcattggccacttaaagggtgcctctgccaactggtggaatcatcgccacttccagcaccacgccaagcctaacatcttccacaaggatcccgatgtgaacatgctgcacgtgtttgttctgggcgaatggcagcccatcgagtacggcaagaagaagctgaaatacctgccctacaatcaccagcacgaatacttcttcctgattgggccgccgctgctcatccccatgtatttccagtaccagatcatcatgaccatgatcgtccataagaactgggtggacctggcctgggccgtcagctactacatccggttcttcatcacctacatccctttctacggcatcctgggagccctccttttcctcaacttcatcaggttcctggagagccactggtttgtgtgggtcacacagatgaatcacatcgtcatggagattgaccaggaggcctaccgtgactggttcagtagccagctgacagccacctgcaacgtggagcagtccttcttcaacgactggttcagtggacaccttaacttccagattgagcaccacctcttccccaccatgccccggcacaacttacacaagatcgccccgctggtgaagtctctatgtgccaagcatggcattgaataccaggagaagccgctactgagggccctgctggacatcatcaggtccctgaagaagtctgggaagctgtggctggacgcctaccttcacaaatgaagccacagcccccgggacaccgtggggaaggggtgcaggtggggtgatggccagaggaatgatgggcttttgttctgaggggtgtccgagaggctggtgtatgcactgctcacggaccccatgttggatctttctccctttctcctctcctttttctcttcacatctcccccatagcaccctgccctcatgggacctgccctccctcagccgtcagccatcagccatggccctcccagtgcctcctagccccttcttccaaggagcagagaggtggccaccgggggtggctctgtcctacctccactctctgcccctaaagatgggaggagaccagcggtccatgggtctggcctgtgagtctccccttgcagcctggtcactaggcatcacccccgctttggttcttcagatgctcttggggttcataggggcaggtcctagtcgggcagggcccctgaccctcccggcctggcttcactctccctgacggctgccattggtccaccctttcatagagaggcctgctttgttacaaagctcgggtctccctcctgcagctcggttaagtacccgaggcctctcttaagatgtccagggccccaggcccgcgggcacagccagcccaaaccttgggccctggaagagtcctccaccccatcactagagtgctctgaccctgggctttcacgggccccattccaccgcctccccaacttgagcctgtgaccttgggaccaaagggggagtccctcgtctcttgtgactcagcagaggcagtggccacgttcagggaggggccggctggcctggaggctcagcccaccctccagcttttcctcagggtgtcctgaggtccaagattctggagcaatctgacccttctccaaaggctctgttatcagctgggcagtgccagccaatccctggccatttggccccaggggacgtgggccctgcaggctgcaggagggcactggagctgggaggtctcgtcccagccctccccatctcggggctgctgtgtggacggcgctgcctcaggcactctcctgtctgaacctgcccttactgtgtttaacctgttgctccaggatgcattctgataggagggggcggcagggctgggccttgtgacaatctgcctttcaccacatggccttgcctcggtggccctgactgtcagggagggccagggaggcagagcgggagggagtctcaggaggaggctgccctgaggggctggggagggggtacctcatgaggaccagggtggagctgagaagaggaggaggtgggggctggaggtgctggtagctgaggggacgggcaagtgagaggggagggagggaagtcctgggaggatcctgagctgctgttgcagtctaacccactaatcagttcttagattcaggggaagggcaggcaccaacaactcagaatgggggctttcggggagggcgcctagtccccccagctctaagcagccaggagggacctgcatctaagcatctgggttgccatggcaatggcatgccccccagctactgtatgcccccgacccccgcagaggcagaatgaacccatagggagctgatcgtaatgtttatcatgttacttccccacccctacattttttgaaataaaataaggaattttattctc

SEQ ID NO: 3250 - protein, 444 aa, Homo sapiens
MGKGGNQGEGAAEREVSVPTFSWEEIQKHNLRTDRWLVIDRKVYNITKWSIQHPGGQRVIGHYAGEDATDAFRAFHPDLEFVGKFLKPLLIGELAPEEPSQDHGKNSKITEDFRALRKTAEDMNLFKTNHVFFLLLLAHIIALESIAWFTVFYFGNGWIPTLITAFVLATSQAQAGWLQHDYGHLSVYRKPKWNHLVHKFVIGHLKGASANWWNHRHFQHHAKPNIFHKDPDVNMLHVFVLGEWQPIEYGKKKLKYLPYNHQHEYFFLIGPPLLIPMYFQYQIIMTMIVHKNWVDLAWAVSYYIRFFITYIPFYGILGALLFLNFIRFLESHWFVWVTQMNHIVMEIDQEAYRDWFSSQLTATCNVEQSFFNDWFSGHLNFQIEHHLFPTMPRHNLHKIAPLVKSLCAKHGIEYQEKPLLRALLDIIRSLKKSGKLWLDAYLHK

SEQ ID NO: 3251 - DNA, 4213 bp, Homo sapiens
tccactcctggagcccgcggaccccgagcacgcgcctgacagcccctgctggcccggcgcgcggcgtcgccaggccagctatggcccccgacccggtggccgccgagaccgcggctcagggacctaccccgcgctacttcacctgggacgaggtggcccagcgctcagggtgcgaggagcggtggctagtgatcgaccgtaaggtgtacaacatcagcgagttcacccgccggcatccagggggctcccgggtcatcagccactacgccgggcaggatgccacggatccctttgtggccttccacatcaacaagggccttgtgaagaagtatatgaactctctcctgattggagaactgtctccagagcagcccagctttgagcccaccaagaataaagagctgacagatgagttccgggagctgcgggccacagtggagcggatggggctcatgaaggccaaccatgtcttcttcctgctgtacctgctgcacatcttgctgctggatggtgcagcctggctcaccctttgggtctttgggacgtcctttttgcccttcctcctctgtgcggtgctgctcagtgcagttcaggcccaggctggctggctgcagcatgactttgggcacctgtcggtcttcagcacctcaaagtggaaccatctgctacatcattttgtgattggccacctgaagggggcccccgccagttggtggaaccacatgcacttccagcaccatgccaagcccaactgcttccgcaaagacccagacatcaacatgcatcccttcttctttgccttggggaagatcctctctgtggagcttgggaaacagaagaaaaaatatatgccgtacaaccaccagcacaaatacttcttcctaattgggcccccagccttgctgcctctctacttccagtggtatattttctattttgttatccagcgaaagaagtgggtggacttggcctggatgattaccttctacgtccgcttcttcctcacttatgtgccactattggggctgaaagccttcctgggccttttcttcatagtcaggttcctggaaagcaactggtttgtgtgggtgacacagatgaaccatattcccatgcacattgatcatgaccggaacatggactgggtttccacccagctccaggccacatgcaatgtccacaagtctgccttcaatgactggttcagtggacacctcaacttccagattgagcaccatctttttcccacgatgcctcgacacaattaccacaaagtggctcccctggtgcagtccttgtgtgccaagcatggcatagagtaccagtccaagcccctgctgtcagccttcgccgacatcatccactcactaaaggagtcagggcagctctggctagatgcctatcttcaccaataacaacagccaccctgcccagtctggaagaagaggaggaagactctggagccaaggcagaggggagcttgagggacaatgccactatagtttaatactcagagggggttgggtttggggacataaagcctctgactcaaactcctcccttttatcttctagccacagttctaagacccaaagtggggggtggacacagaagtccctaggagggaaggagctgttggggcaggggtgtaaattatttcctttttctagtttggcacatgcaggtagttggtgaacagagagaaccaggagggtaacagaagaggagggacctactgaacccagagtcaggaagagatttaacactaaaattccactcatgccgggcgtggtggcacgcgcctgtaatcccagctacccaggaggctgaggcaggagaatcgcttgaaccggggaggtggaggttgcagtgagctgagatcacgccattgtactccagcctgggcgacagagcaagactccatttcaaaaaaaaaaaaaaaatccactcatataaaaggtgagctcagctcactggtccatttctcagtggcttctccatcctcatttgcaaacctcagagggataaggcagttgaacctgatgagcaagaattataacagcaaggaaacattaatgcttagaattctgagatccagcacaactcagtctgtgggagctcagctcgctgcccagggataggtatgacctatgtctgccttaggctgctgggagatgccattctccagtttcagaagcaggcagggcaaaggtcaagactgtggtattggggtcttttggctctgaaggatcctggaaccactgattttggtttattccctccagggtctaaagagaacaagaggtgctagctcttaccaaaacagatggtagagagagttgctggctatttaaaaagctctttcatcttttaattcacctcttcttttcacctctttaaccactcctcaggaacagaacacttctaggactgggggtcttttagctccataagcaagtgagcagatgggacaagttagtcttttctccctagaaacaaaggggatgcccagtggtttccctttgcttcccaacctaaaatttcaagtttaataaaatagcaattagcagaagtgaccaaattgggagataattatcagtcatgaggaaagacacagatttcggtcataaagaatgtaagggctataagtagaaactttctataacctaaatgatgttatagaattatttttgagcaggagcagaaagattaaatatgatcacttcatacttctaaatcagaaataggaagattaaaaccacagaacagtttgtgatttctattgctgtagctaggtatcttactctgtccactcttgttcaagtatctaactcttctggaaaccaaataggctttagaagagattatcctatattcctatcagtataatactaaaatgtaactttttaatcatctggtttttaaaagataaacagtttagcccatctctccagagagcaaacataggaatatgactcaggagcctcctagggcttatcatcagccctcacacccgcttccccctccaacccacagcctttgcttccaggtggcaggattactactttgcctcttcagcagcatctactctaggcatattgatcattttagacactgggagaagagaacctcaaactaggaggaaaagacagagcctccacttagttttgggaggggatggcagacagtcaaggagatgagcgtcctaaggcatgttgggatagggtcagatgcaccacccatggagaggtttgtcaacacaaagacatggaaggttagaggtttgtcaacaaaaagacatggaaggttaggtttgtcaacacaaagacatggaagattagaggtttgtcaacacaaagacacaggaagaatgggctgcagaagatttagatgttttccatttgggcacattttacttagctggagaactaggtttaaaacagcctgggtaggaaaattagaagcaagctggatgcagtggctcatgcctgtaatcccaacacttttgggaggtccaggcaggaggatcacttgggcccaggaggtcaagcctgcagcgagctgagatcacaccactgcactccagcctggggtgatagaacaagaccctgtctcaaaaaaaaaaaaaaacaacaaaaacttagaattgaggagttgtacctccattggcttcctcactccaaaataggtgctgatccttcctattcctattctttgccaccttttgggtgtggtgtcaccagcctgtttagccaagtagctttgggcataggctgcccaatctgagcaaacaccagtgaggctctattgagccaagaccaagtcctcaaagcacctgaaccactgtggccttctcagcctacagcagtgtggtctcttacatggccacaaagggacacacagtgacaaaaggctcggaatgttacaatggtaaaatgagtgatctcaaatccactgacagatataaaataggcttagagaggaaaagctgcctctggtcaagtagatcatggcagcatgaattccaactcacttttttacaactccaacttctatgtttatctttgttactttcacttttttacaacctggccagaggcattttttaaatcaggcccaatatcagtattctttttgtgtgtgccaattttgttatcacatccctatgaagttgaaaaataaagttaattttgaccaaaaaaaaaaaaaaaag

SEQ ID NO: 3252 - protein, 444 aa, Homo sapiens
MAPDPVAAETAAQGPTPRYFTWDEVAQRSGCEERWLVIDRKVYNISEFTRRHPGGSRVISHYAGQDATDPFVAFHINKGLVKKYMNSLLIGELSPEQPSFEPTKNKELTDEFRELRATVERMGLMKANHVFFLLYLLHILLLDGAAWLTLWVFGTSFLPFLLCAVLLSAVQAQAGWLQHDFGHLSVFSTSKWNHLLHHFVIGHLKGAPASWWNHMHFQHHAKPNCFRKDPDINMHPFFFALGKILSVELGKQKKKYMPYNHQHKYFFLIGPPALLPLYFQWYIFYFVIQRKKWVDLAWMITFYVRFFLTYVPLLGLKAFLGLFFIVRFLESNWFVWVTQMNHIPMHIDHDRNMDWVSTQLQATCNVHKSAFNDWFSGHLNFQIEHHLFPTMPRHNYHKVAPLVQSLCAKHGIEYQSKPLLSAFADIIHSLKESGQLWLDAYLHQ

SEQ ID NO: 3253 - DNA, 2265 bp, Homo sapiens
agtcctgcgatttcgggtgtagagggagcaggggcctgcggggacctggtgtgggtggagtggggacaagcggtggagaagggtacgccagggtcgctgagagactctgttctccctggagggactggttgccatgagagcagccgtctgaggggacgcagcctgcactacgcgccccaagaggctgtgcgtggcgagcaggtcacgtgacgggagcgcgggctttggaaggcggctgaacgtcaggccacccgccgctaagctgagaagggagagcgagcttaggaccgcctgcccggggcaaccccgaaccaagctttagccgccgaggccgcgtgtcccaaaggccagtcatccctcctctgtgttgccatgggaattcaaggcctggccaaactaattgctgatgtggcccccagtgccatccgggagaatgacatcaagagctactttggccgtaaggtggccattgatgcctctatgagcatttatcagttcctgattgctgttcgccagggtggggatgtgctgcagaatgaggagggtgagaccaccagccacctgatgggcatgttctaccgcaccattcgcatgatggagaacggcatcaagcccgtgtatgtctttgatggcaagccgccacagctcaagtcaggcgagctggccaaacgcagtgagcggcgggctgaggcagagaagcagctgcagcaggctcaggctgctggggccgagcaggaggtggaaaaattcactaagcggctggtgaaggtcactaagcagcacaatgatgagtgcaaacatctgctgagcctcatgggcatcccttatcttgatgcacccagtgaggcagaggccagctgtgctgccctggtgaaggctggcaaagtctatgctgcggctaccgaggacatggactgcctcaccttcggcagccctgtgctaatgcgacacctgactgccagtgaagccaaaaagctgccaatccaggaattccacctgagccggattctgcaggagctgggcctgaaccaggaacagtttgtggatctgtgcatcctgctaggcagtgactactgtgagagtatccggggtattgggcccaagcgggctgtggacctcatccagaagcacaagagcatcgaggagatcgtgcggcgacttgaccccaacaagtaccctgtgccagaaaattggctccacaaggaggctcaccagctcttcttggaacctgaggtgctggacccagagtctgtggagctgaagtggagcgagccaaatgaagaagagctgatcaagttcatgtgtggtgaaaagcagttctctgaggagcgaatccgcagtggggtcaagaggctgagtaagagccgccaaggcagcacccagggccgcctggatgatttcttcaaggtgaccggctcactctcttcagctaagcgcaaggagccagaacccaagggatccactaagaagaaggcaaagactggggcagcagggaagtttaaaaggggaaaataaatgtgtttccccattatacctccttcaccccagaatatttgccgtcttgtacccttaagagctacagctagagaaaccttcacggggtggagagaggattctaaggcttttctagcgtgacccttttcagtagtgctagtcccttttttacttgatcttaatggcaagaaggccacagaggtacttttccttttttagctcaggaaaatatgtcaggctcaaaccacttctcaggcagtttaatggacactaagtccattgttacatgaaagtgatagatagcaacaagttttggagaagagagagggagataaaagggggagacaaaagatgtacagaaatgatttcctggctggccaactggtggccagtgggaggtgatggtggacctagactgtgcttttctgtcttgttcagccttgacccaccttgagagagagccaccaggaaggcgcatcttagcagatgggaggaactgctgagagaagatgggcagaaagctggagcccctggagttggctgtgtctgtgtttgtgactgattactggctgtgtcttgggtgggcagaaactcgaacttgctatgtaatttgtgtctagttattcagaggagtaagatggtgatgttcacctggcaatcagctgagttgagactttggaataagacactggttttcatgcgctgtttttgttttaaagttatgaagaaaaaagtcaataaaattctaaaagtaaaaaaaaaaaaaaaaaa

SEQ ID NO: 3254 - protein, 380 aa, Homo sapiens
MGIQGLAKLIADVAPSAIRENDIKSYFGRKVAIDASMSIYQFLIAVRQGGDVLQNEEGETTSHLMGMFYRTIRMMENGIKPVYVFDGKPPQLKSGELAKRSERRAEAEKQLQQAQAAGAEQEVEKFTKRLVKVTKQHNDECKHLLSLMGIPYLDAPSEAEASCAALVKAGKVYAAATEDMDCLTFGSPVLMRHLTASEAKKLPIQEFHLSRILQELGLNQEQFVDLCILLGSDYCESIRGIGPKRAVDLIQKHKSIEEIVRRLDPNKYPVPENWLHKEAHQLFLEPEVLDPESVELKWSEPNEEELIKFMCGEKQFSEERIRSGVKRLSKSRQGSTQGRLDDFFKVTGSLSSAKRKEPEPKGSTKKKAKTGAAGKFKRGK

SEQ ID NO: 3255 - DNA, 2059 bp, Homo sapiens
caggtgaccagcgccatgtccagccaggtggtgggcattgagcctctctacatcaaggcagagccggccagccctgacagtccaaagggttcctcggagacagagaccgagcctcctgtggccctggcccctggtccagctcccactcgctgcctcccaggccacaaggaagaggaggatggggagggggctgggcctggcgagcagggcggtgggaagctggtgctcagctccctgcccaagcgcctctgcctggtctgtggggacgtggcctccggctaccactatggtgtggcatcctgtgaggcctgcaaagccttcttcaagaggaccatccaggggagcatcgagtacagctgtccggcctccaacgagtgtgagatcaccaagcggagacgcaaggcctgccaggcctgccgcttcaccaagtgcctgcgggtgggcatgctcaaggagggagtgcgcctggaccgcgtccggggtgggcggcagaagtacaagcggcggccggaggtggacccactgcccttcccgggccccttccctgctgggcccctggcagtcgctggaggcccccggaagacagcagccccagtgaatgcactggtgtctcatctgctggtggttgagcctgagaagctctatgccatgcctgaccccgcaggccctgatgggcacctcccagccgtggctaccctctgtgacctctttgaccgagagattgtggtcaccatcagctgggccaagagcatcccaggcttctcatcgctgtcgctgtctgaccagatgtcagtactgcagagcgtgtggatggaggtgctggtgctgggtgtggcccagcgctcactgccactgcaggatgagctggccttcgctgaggacttagtcctggatgaagagggggcacgggcagctggcctgggggaactgggggctgccctgctgcaactagtgcggcggctgcaggccctgcggctggagcgagaggagtatgttctactaaaggccttggcccttgccaattcagactctgtgcacatcgaagatgccgaggctgtggagcagctgcgagaagctctgcacgaggccctgctggagtatgaagccggccgggctggccccggagggggtgctgagcggcggcgggcgggcaggctgctgctcacgctaccgctcctccgccagacagcgggcaaagtgctggcccatttctatggggtgaagctggagggcaaggtgcccatgcacaagctgttcttggagatgctcgaggccatgatggactgagtgcaaggggtgggactggtgggggttctggcaggacctgcctagcatggggtcagccccaagggctggggcggagctggggtctgggcagtgccacagcctgctggcagggccaggcaatgccatcagcccctgggaacaggccccacgccctctcctccccctcctagggggtgtcagaagctgggaacgtgtgtccaggctctgggcacagtgctgccccttgcaagccataacgtgcccccagagtgtagggggccttgcggaagccatagggggctgcacgggatgcgtgggaggcagaaacctatctcagggagggaaggggatggaggccagagtctcccagtgggtgatgcttttgctgctgcttaatcctaccccctcttcaaagcagagtgggacttggagagcaaaggcccatgcccccttcgctcctcctctcatcatttgcattgggcattagtgtccccccttgaagcaataactccaagcagactccagcccctggacccctggggtggccagggcttccccatcagctcccaacgagcctcctcagggggtaggagagcactgcctctatgccctgcagagcaataacactatatttatttttgggtttggccagggaggcgcagggacatggggcaagccagggcccagagcccttgactgtacagagactctattttaatgtatatttgctgcaaagagaaaccgcttttggttttaaacctttaatgagaaaaaaatatataataccgagctc

SEQ ID NO: 3256 - DNA, 1127 bp, Homo sapiens
cacgggcggggcggggcctgggtccaccggggttctgaggggagactgaggtcctgagccgacagcctcagctccctgccaggccagacccggcagacagatgagggcccaggaggcctggcgggcctgggggcgctacggtgggagaggaagccaggggtacctgcctctgccttccagggccaccgttggccccagctgtgccttgactacgtaacatcttgtcctcacagcccagagcatgttccagatcccagagtttgagccgagtgagcaggaagactccagctctgcagagaggggcctgggccccagccccgcaggggacgggccctcaggctccggcaagcatcatcgccaggccccaggcctcctgtgggacgccagtcaccagcaggagcagccaaccagcagcagccatcatggaggcgctggggctgtggagatccggagtcgccacagctcctaccccgcggggacggaggacgacgaagggatgggggaggagcccagcccctttcggggccgctcgcgctcggcgccccccaacctctgggcagcacagcgctatggccgcgagctccggaggatgagtgacgagtttgtggactcctttaagaagggacttcctcgcccgaagagcgcgggcacagcaacgcagatgcggcaaagctccagctggacgcgagtcttccagtcctggtgggatcggaacttgggcaggggaagctccgccccctcccagtgaccttcgctccacatcccgaaactccacccgttcccactgccctgggcagccatcttgaatatgggcggaagtacttccctcaggcctatgcaaaaagaggatccgtgctgtctcctttggagggagggctgacccagattcccttccggtgcgtgtgaagccacggaaggcttggtcccatcggaagttttgggttttccgcccacagccgccggaagtggctccgtggccccgccctcaggctccgggctttcccccaggcgcctgcgctaagtcgcgagccaggtttaaccgttgcgtcaccgggacccgagcccccgcgatgccctgggggccgtgctcactaccaaatgttaataaagcccgcgtctgtgccgcc

SEQ ID NO: 3257 - protein, 168 aa, Homo sapiens
MFQIPEFEPSEQEDSSSAERGLGPSPAGDGPSGSGKHHRQAPGLLWDASHQQEQPTSSSHHGGAGAVEIRSRHSSYPAGTEDDEGMGEEPSPFRGRSRSAPPNLWAAQRYGRELRRMSDEFVDSFKKGLPRPKSAGTATQMRQSSSWTRVFQSWWDRNLGRGSSAPSQ

SEQ ID NO: 3258 - DNA, 956 bp, Homo sapiens
gagcccggggtgctggagggaggcggcaggcccgggtcaggtgcctcgagatcgggcttgggcccagagcatgttccagatcccagagtttgagccgagtgagcaggaagactccagctctgcagagaggggcctgggccccagccccgcaggggacgggccctcaggctccggcaagcatcatcgccaggccccaggcctcctgtgggacgccagtcaccagcaggagcagccaaccagcagcagccatcatggaggcgctggggctgtggagatccggagtcgccacagctcctaccccgcggggacggaggacgacgaagggatgggggaggagcccagcccctttcggggccgctcgcgctcggcgccccccaacctctgggcagcacagcgctatggccgcgagctccggaggatgagtgacgagtttgtggactcctttaagaagggacttcctcgcccgaagagcgcgggcacagcaacgcagatgcggcaaagctccagctggacgcgagtcttccagtcctggtgggatcggaacttgggcaggggaagctccgccccctcccagtgaccttcgctccacatcccgaaactccacccgttcccactgccctgggcagccatcttgaatatgggcggaagtacttccctcaggcctatgcaaaaagaggatccgtgctgtctcctttggagggagggctgacccagattcccttccggtgcgtgtgaagccacggaaggcttggtcccatcggaagttttgggttttccgcccacagccgccggaagtggctccgtggccccgccctcaggctccgggctttcccccaggcgcctgcgctaagtcgcgagccaggtttaaccgttgcgtcaccgggacccgagcccccgcgatgccctgggggccgtgctcactaccaaatgttaataaagcccgcgtctgtgccgcc

SEQ ID NO: 3259 - protein, 168 aa, Homo sapiens; identical to SEQ ID NO: 3257

SEQ ID NO: 3260 - DNA, 1147 bp, Homo sapiens
ggcgaggaaggggcgggagccggggtcccggtagcttctagtaggttccagaaggcggcgcgtgcggttgggaacgcggagcggacggattcgattcaacggggttccggaccgcgctgcgctatggagcaggtcaatgagctgaaggagaaaggcaacaaggccctgagcgtgggtaacatcgatgatgccttacagtgctactccgaagctattaagctggatccccacaaccacgtgctgtacagcaaccgttctgctgcctatgccaagaaaggagactaccagaaggcttatgaggatggctgcaagactgtcgacctaaagcctgactggggcaagggctattcacgaaaagcagcagctctagagttcttaaaccgctttgaagaagccaagcgaacctatgaggagggcttaaaacacgaggcaaataaccctcaactgaaagagggtttacagaatatggaggccaggttggcagagagaaaattcatgaaccctttcaacatgcctaatctgtatcagaagttggagagtgatcccaggacaaggacactactcagtgatcctacctaccgggagctgatagagcagctacgaaacaagccttctgacctgggcacgaaactacaagatccccggatcatgaccactctcagcgtcctccttggggtcgatctgggcagtatggatgaggaggaagagattgcaacacctccaccaccaccccctcccaaaaaggagaccaagccagagccaatggaagaagatcttccagagaataagaagcaggcactgaaagaaaaagagctggggaacgatgcctacaagaagaaagactttgacacagccttgaagcattacgacaaagccaaggagctggaccccactaacatgacttacattaccaatcaagcagcggtatactttgaaaagggcgactacaataagtgccgggagctttgtgagaaggccattgaagtggggagagaaaaccgagaagactatcgacagattgccaaagcatatgctcgaattggcaactcctacttcaaagaagaaaagtacaaggatgccatccatttctataacaagtctctggcagagcaccgaaccccagatgtgctcaagaaatgccagcagg

SEQ ID NO: 3261 - DNA, 892 bp, Homo sapiens
ggcacgagggcacgtcggccctgcctcccggaccaccctgcggggcgcaccaccgatctggggtgcggggctcggcctccctgcgctcctggctgacggtgtgaccttgggaccgagacgtgcagctgtccaaggctctgtcctatgccctgcgccatggggccttgaagctggggcttcccatgggagctgatggcttcgtgcccctgggcaccctcctgcagttgccccagttccgcggcttctctgctgaagatgtgcagcgcgtggtggacaccaataggaagcagcggttcgccctgcagctgggcgatcccagcactggccttctcatccgggccaaccagggccattccctgcaggtacctaagttggagctgatgcccctggagacaccgcaggccctgcccccgatgctagtccatggtacattctggaagcactggccatccatcctactcaaaggcctgtcctgccagggaaggacgcacattcacctggccccaggactgcctggagaccccggtatcatcagtggcatgcggtcccattgtgaaatagctgtgttcatcgatggacccctggctctggcagatggaatacccttcttccgctctgccaatggggtgattctgactccagggaatactgatggcttcctccttcccaagtacttcaaggaggccctgcagctacgccctacccgaaagcccctttccttggctggtgatgaagagacagagtgtcagagtagccccaagcacagctccagagaaaggaggaggatccaacaataaaatattaatttataaaaaagaaattttaaaaagtaacaagaaagaactcgtttgaaaccatgtttcatcatcctgtaaaaaaaaaaaaaaaaaaa

SEQ ID NO: 3262 - protein, 204 aa, Homo sapiens
MGADGFVPLGTLLQLPQFRGFSAEDVQRVVDTNRKQRFALQLGDPSTGLLIRANQGHSLQVPKLELMPLETPQALPPMLVHGTFWKHWPSILLKGLSCQGRTHIHLAPGLPGDPGIISGMRSHCEIAVFIDGPLALADGIPFFRSANGVILTPGNTDGFLLPKYFKEALQLRPTRKPLSLAGDEETECQSSPKHSSRERRRIQQ

SEQ ID NO: 3263 - DNA, 1600 bp, Homo sapiens
agacagaccccgtgcggctgacacagctgtatgagcaggcccggtgggacctgctgctggaggagattgactgcaccgaggaggagatgatggtgtttgccgccctgcagtaccacatcaacaagctgtcccagagcggggaggtgggggagccggctggcacagacccagggctggacgacctggatgtggccctgagcaacctggaggtgaagctggaggggtcggcgcccacagatgtgctggacagcctcaccaccatcccagagctcaaggaccatctccgaatctttcggccccggaagctgaccctgaagggctaccgccaacactgggtggtgttcaaggagaccacactgtcctactacaagagccaggacgaggcccctggggaccccattcagcagctcaacctcaagggctgtgaggtggttcccgatgttaacgtctccggccagaagttctgcattaaactcctagtgccctcccctgagggcatgagtgagatctacctgcggtgccaggatgagcagcagtatgcccgctggatggctggctgccgcctggcctccaaaggccgcaccatggccgacagcagctacaccagcgaggtgcaggccatcctggccttcctcagcctgcagcgcacgggcagtgggggcccgggcaaccacccccacggccctgatgcctctgccgagggcctcaacccctacggcctcgttgccccccgtttccagcgaaagttcaaggccaagcagctcaccccacggatcctggaagcccaccagaatgtggcccagttgtcgctggcagaggcccagctgcgcttcatccaggcctggcagtccctgcccgacttcggcatctcctatgtcatggtcaggttcaagggcagcaggaaagacgagatcctgggcatcgccaacaaccgactgatccgcatcgacttggccgtgggcgacgtggtcaagacctggcgtttcagcaacatgcgccagtggaatgtcaactgggacatccggcaggtggccatcgagtttgatgaacacatcaatgtggccttcagctgcgtgtctgccagctgccgaattgtacacgagtatatcgggggctacattttcctgtcgacgcgggagcgggcccgtggggaggagctggatgaagacctcttcctgcagctcaccgggggccatgaggccttctgagggctgtctgattgcccctgccctgctcaccacctgtcacagccactcccaagcccacacccacaggggctcactgccccacacccgctccaggcaggcacccagctgggcatttcacctgctgtcactgactttgtgcaggccaaggacctggcagggccagacgctgtaccatcacccaggccaaggatgggggtgggggtccctgagctcatgtggtgccccctttccttgtctgagtggctgaggctgatacccctgacctatctgcagtcccccagcacacaaggaagaccagatgtagctacaggatgatgaaacatggtttcaaacgagttctttcttgttactttttaaaatttcttttttataaattaatattttattgttgg

SEQ ID NO: 3264 - DNA, 472 bp, Homo sapiens
ggctacggctgaccgttttttgtggtgtactccgtgccatcatgtccgtcctgacgccgctgctgctgcggggcttgacaggctcggcccggcggctcccagtgccgcgcgccaagatccattcgttgccgccggaggggaagcttgggatcatggaattggccgttgggcttacctcctgcttcgtgaccttcctcctgccagcgggctggatcctgtcacacctggagacctacaggaggccagagtgaaggggtccgttctgtccctcacactgtgacctgaccagccccaccggcccatcctggtcatgttactgcatttgtggccggcctcccctggatcatgtcattcaattccagtcacctcttctgcaatcatgacctcttgatgtctccatggtgacctccttgggggtcactgaccctgcttggtggggtcccccttgtaacaataaatctatttaaacttt

SEQ ID NO: 3265 - protein, 69 aa, Homo sapiens
MSVLTPLLLRGLTGSARRLPVPRAKIHSLPPEGKLGIMELAVGLTSCFVTFLLPAGWILSHLETYRRPE

SEQ ID NO: 3266 - DNA, 1747 bp, Homo sapiens
aattggcaacccggaagcggtcggtagtgcggcgctgtttaaagatggcggcggaggaacctcagcagcagaagcaggagccgctgggcagcgactccgaaggtgttaactgtctggcctatgatgaagccatcatggctcagcaggaccgaattcagcaagagattgctgtgcagaaccctctggtgtcagagcggctggagctctcggtcctatacaaggagtatgctgaagatgacaacatctatcaacagaagatcaaggacctccacaaaaagtactcgtacatccgcaagaccaggcctgacggcaactgtttctatcgggctttcggattctcccacttggaggcactgctggatgacagcaaggagttgcagcggttcaaggctgtgtctgccaagagcaaggaagacctggtgtcccagggcttcactgaattcacaattgaggatttccacaacacgttcatggacctgattgagcaggtggagaggcagacctctgtcgccgacctgctggcctccttcaatgaccagagcacctccgactaccttgtggtctacctgcggctgctcacctcgggctacctgcagcgcgagagcaagttcttcgagcacttcatcgagggtggacggactgtcaaggagttctgccagcaggaggtggagcccatgtgcaaggagagcgaccacatccacatcattgcgctggcccaggccctcagcgtgtccatccaggtggagtacatggaccgcggcgagggcggcaccaccaatccgcacatcttccctgagggctccgagcccaaggtctaccttctctaccggcctggacactacgatatcctctacaaatagggctggctccagcccgctgctgccctgctgcccccctctgccaggcgctagacatgtacagaggtttttctgtggttgtaaatggtcctatttcacccccttcttcctgtcacatgacccccccccatgttttattaaagggggtgctggtggtgagccgtgtgtgcgtgtccctgctctgctgcccgcctggctgctctgtctgctgccccctccccccaggtgggtccccctgcttttcacctatctactcctgagcttccccaacaggagcaggtttgaggggccaggcctcttggaggcccctcctgcttcgttgggttctgcttccttcccttcttagctggctcaggggcttctatgggatcctggaagttccttagggacttgcccagggtcccagggccacccacacttcatctgctccctcataggccccacctccacgtcccggctgggccccagaccccagcttcctgccctccaccgggagtctgcatggttgggagtcctgggtggaggggcctttgtgaggctggacccggctcagggcaggtggaggagctgggcctcccacagggtgcccgggcagtgccatcctggtgggggagggcagccttcaaacgtgtggggtctacagtcctcaggtctaggcagggcagccggttctccacctccccatccgccccaggccccctgcctgtgcctgccttgcaccccctctgcttgggccacggtgtctctgcattgcctgcctttttgccttcacctcttttcttccccgccccctgcacattcggggtctcagcccccaggctgtgagctccttgggggcaggccctcaataaatgtgaactgctgctgccgccaaaaaaaaaaaaaaaaaa

SEQ ID NO: 3267 - protein, 271 aa, Homo sapiens
MAAEEPQQQKQEPLGSDSEGVNCLAYDEAIMAQQDRIQQEIAVQNPLVSERLELSVLYKEYAEDDNIYQQKIKDLHKKYSYIRKTRPDGNCFYRAFGFSHLEALLDDSKELQRFKAVSAKSKEDLVSQGFTEFTIEDFHNTFMDLIEQVERQTSVADLLASFNDQSTSDYLVVYLRLLTSGYLQRESKFFEHFIEGGRTVKEFCQQEVEPMCKESDHIHIIALAQALSVSIQVEYMDRGEGGTTNPHIFPEGSEPKVYLLYRPGHYDILYK

SEQ ID NO: 3268 - DNA, 654 bp, Homo sapiens
agagtgggcgtctggcggggtccgcagtttcagcagagccgtgcagccatggccccaatcaaggtgggagatgccatcccagcagtggaggtgtttgaaggggagccagggaacaaggtgaacctggcagagctgttcaagggcaagaagggtgtgctgtttggagttcctggggccttcacccctggatgttccaagacacacctgccagggtttgtggagcaggctgaggctctgaaggccaagggagtccaggtggtggcctgtctgagtgttaatgatgcctttgtgactggcgagtggggccgagcccacaaggcggaaggcaaggttcggctcctggctgatcccactggggcctttgggaaggagacagacttattactagatgattcgctggtgtccatctttgggaatcgacgtctcaagaggttctccatggtggtacaggatggcatagtgaaggccctgaatgtggaaccagatggcacaggcctcacctgcagcctggcacccaatatcatctcacagctctgaggccctgggccagattacttcctccacccctccctatctcacctgcccagccctgtgctggggccctgcaattggaatgttggccagatttctgcaataaacacttgtggtttgcgg

SEQ ID NO: 3269 - DNA, 3120 bp, Homo sapiens
aaatgaagtgcgcgctgcgacacctcccagcccaccgaactccgccgccatttcctcgcttggcctaacggttcggccaatcccagcgcgcatcaagaaggactgaggctccgccaatcggaggccgccgatttcgacccttcgcctcggcccggcccaatccaggccccggccccgccgcccccggcccgcccccgcggtgccctctctcctccctctttgtgcgtctcgcgccgccgccgcccgccgcgtgagaggacgggctccgcgcgctccggcagcgcattcgggtcccctccccccgggaggcttgcgaaggagaagccgccgcagaggaaaagcaggtgccggtgcctgtccccgggggcgccatggcgaccggagcgaacgccacgccgttggacttcccaagtaagaagcggaagaggagccgctggaaccaagacacaatggaacagaagacagtgattccaggaatgcctacagttattccccctggacttactcgagaacaagaaagagcttatatagtgcaactgcagatagaagacctgactcgtaaactgcgcacaggagacctgggcatcccccctaaccctgaggacaggtccccttcccctgagcccatctacaatagcgaggggaagcggcttaacacccgagagttccgcacccgcaaaaagctggaagaggagcggcacaacctcatcacagagatggttgcactcaatccggatttcaagccacctgcagattacaaacctccagcaacacgtgtgagtgataaagtcatgattccacaagatgagtacccagaaatcaactttgtggggctgctcatcgggcccagagggaacaccctgaagaacatagagaaggagtgcaatgccaagattatgatccgggggaaagggtctgtgaaagaagggaaggttgggcgcaaagatggccagatgttgccaggagaagatgagccacttcatgccctggttactgccaatacaatggagaacgtcaaaaaggcagtggaacagataagaaacatcctgaagcagggtatcgagactccagaggaccagaatgatctacggaagatgcagcttcgggagttggctcgcttaaatgggacccttcgggaagacgataacaggatcttaagaccctggcagagctcagagacccgcagcattaccaacaccacagtgtgtaccaagtgtggaggggctggccacattgcttcagactgtaaattccaaaggcctggtgatcctcagtcagctcaggataaagcacggatggataaagaatatttgtccctcatggctgaactgggtgaagcacctgtcccagcatctgtgggctccacctctgggcctgccaccacacccctggccagcgcacctcgtcctgctgctcccgccaacaacccacctccaccgtctctcatgtctaccacccagagccgcccaccctggatgaattctggcccttcagagagtcggccctaccacggcatgcatggaggtggtcctggtgggcccggaggtggcccccacagcttcccacacccattacccagcctgacaggtgggcatggtggacatcccatgcagcacaaccccaatggacccccacccccttggatgcagccaccaccaccaccgatgaaccagggcccccaccctcctgggcaccatggccctcctccaatggatcagtacctgggaagtacgcctgtgggctctggggtctatcgcctgcatcaaggaaaaggtatgatgccgccaccacctatgggcatgatgccgccgccgccgccgcctcccagtgggcagcccccaccccctccctctggtcctcttcccccatggcaacaacagcagcagcagcctccgccaccccctccgcccagcagcagtatggcttccagtacccccttgccatggcagcaaaatacgacgactaccaccacgagcgctggcacagggtccatcccgccatggcaacagcagcaggcggctgccgcagcttctccaggagcccctcagatgcaaggcaaccccactatggtgcccctgccccccggggtccagccgcctctgccgcctggggcccctccccctccgccccgtagcatcgagtgtcttctttgtcttctttctctcctcacccaactccctttgcctctccccaaaccgggccgccaggatccctccccgcggcggcgatggcccgagccatgagagtgaggactttccgcgcccattggtgacccttccaggcagacagcctcagcaacgcccctggtggacaggatggttcggcaaagcagcctgagttatttttgtggacggaatcggaacacgctggctccatatcgtgaaatttttattaatttttttctttttcctttgttacttctttatcttttcctttcttcagactccgtccaaggagatgctctccccggtcttctgctgcaatttagattcctttcccttctctccagttctccttcccttaccaaggagaggggagcaaatggttttgggcaagggctttggccattcatgtcaagctggttgtgggtttttcaaggtgccatagccacccccaaatatgtttgtttaaagcgtggggttttttaatctctgccacccttgtcaagggagtcttgtaaagttgccgagggtaggttcatctccaggtttcgggattcccatccgtcctggcgatcctgccagcagtgggtgggcagcctgagctccctcgggctcgcctgccagcctggagttcttcctgtgctccttgatcacctgagctgcctcagattccatttggtcctctccttcctggaaggcttccttttatgttttgttttaatcccaaatgtctgaatgttttgcagtgtgtaggggtttgagccccttgttcattctccttcctttttcctcccgcttccctctccatgaagtgattctgttgacaataatgtatactgcgcgttctcttcactggtttatctgcagaaatttctctgggcttttttcggtgttagattcaacactgcgctaaagcggggatgttccattgaataaaagagcagtgtggttttctggg

SEQ ID NO: 3270 - DNA, 2872 bp, Homo sapiens
gcgccgggccatggcgctgctgcgggatgtgtcgctgcaggacccgcgggaccgcttcgagctgctgcagcgcgtgggggccgggacctatggcgacgtctacaaggcccgcgacacggtcacgtccgaactggccgccgtgaagatagtcaagctagacccaggggacgacatcagctccctccagcaggaaatcaccatcctgcgtgagtgccgccaccccaatgtggtggcctacattggcagctacctcaggaatgaccgcttgtggatctgcatggagttctgcggagggggctccctgcaggagatttaccatgccactgggcccctggaggagcggcagattgcctacgtctgccgagaggcactgaaggggctccaccacctgcattctcaggggaagatccacagagacatcaagggagccaaccttctcctcactctccagggagatgtcaaactggctgactttggggtgtcaggcgagctgacagcgtctgtggccaagaggaggtctttcattgggactccctactggatggctcccgaggtggctgctgtggagcgcaaaggtggctacaatgagctatgtgacgtctgggccctgggcatcactgccattgagctgggcgagctgcagccccctctgttccacctgcaccccatgagggccctgatgctcatgtcgaagagcagcttccagccgcccaaactgagagataagactcgctggacccagaatttccaccactttctcaaactggccctgaccaagaatcctaagaagaggccgacagcagagaagctcctgcagcacccgttcacgactcagcagctccctcgggccctcctcacacagctgctggacaaagccagtgaccctcatctggggaccccctcccctgaggactgtgagctggagacctatgacatgtttccagacaccattcactcccgggggcagcacggcccagccgagaggaccccctcggagatccagtttcaccaggtgaaatttggcgccccacgcaggaaggaaactgacccactgaatgagccgtgggaggaagagtggacactactgggaaaggaagagttgagtgggagcctgctgcagtcggtccaggaggccctggaggaaaggagtctgactattcggtcagcctcagaattccaggagctggactccccagacgataccatgggaaccatcaagcgggccccgttcctagggccactccccactgaccctccagcagaggagcctctgtccagtcccccaggaaccctgcccccacctccttcaggccccaacagctccccactgctgcccacggcctgggccaccatgaagcagcgggaggatcctgagaggtcatcctgccacgggctccccccaactcccaaggtgcatatgggcgcctgcttctccaaggtcttcaatggctgccccctgcggatccacgctgctgtcacctggattcaccctgttactcgggaccagttcctggtggtaggggccgaggaaggcatctacacactcaacctgcatgaactgcatgaggatacgctggagaagctgatttcacatcgctgctcctggctctactgcgtgaacaacgtgctgctgtcactctcagggaaatccacgcacatctgggcccatgacctcccaggcctgtttgagcagcggaggctacagcaacaggttcccctctccatccccaccaaccgcctcacccagcgcatcatccccaggcgctttgctctgtccaccaagattcctgacaccaaaggctgcttgcagtgtcgtgtggtgcggaacccctacacgggtgccaccttcctgctggccgccctgcccaccagcctgctcctgctgcagtggtatgagccgctgcagaagtttctgctgctgaagaacttctccagccctctgcccagcccagctgggatgctggagccgctggtgctggatgggaaggagctgccgcaggtgtgtgttggggccgaggggcctgaggggcccggctgccgcgtcctgttccatgtcctgcccctggaggctggcctgacgcccgacatcctcatcccacctgaggggatcccaggctcggcccagcaggtgatccaggtggacagggacacaatcctagtcagctttgaacgctgtgtgaggattgtcaacatgcagggcgagcccacggccacactggcacctgagctgacctttgatttccccatcgagactgtggtgtgcctgcaggacagtgtgctggccttctggagccatgggatgcaaggccgaagcctggataccaatgaggtgacccaggagatcacagatgaaacaaggatcttccgagtgcttggggcccacagagacatcatcctggagagcattcccactgacaacccagaggcgcacagcaacctctacatcctcacgggccaccagagcacctactaagagcagcgggcctgtccaggggctccccgccccaccccacgccttagctgcaggcccttttgggcaaaggggcccatcctagaccagaggagcccaggccctggccctgctggggctgaaggtcagaagtaatcctgagaaatgtttcaggcctggggagggaggggagcccccgacgcctctgcaataactggaccagggggagctgctgtcactcccccatccccgaggcagcccagtccctagtgcccaaggcagggaccctgggcctgggccatccattccattttgttccacatttcctttctactctttctgccaagagcctgcccctgcatttgtcctgggaaacacggtatttaagagagaactatattggtattaaagctggtttgtttt

SEQ ID NO: 3271 - DNA, 2229 bp, Homo sapiens
ggcaccagtcggaggggcggggctgggaggggctcctccctaccgcccccaattccgccctgcccccgccgcggcggcgctagccgccactgagggaccgaccctataaaggccgctccgcgaggggtgcgcagcattcggcagagggcgcttcgacgggctgggctgtgcgcctgcgcagtgtgggtcgctcccgattccctgccccggccggccccgcctcggctccgcaccctcgccccgctctcagccgccgctctgccccgcagcagccagccccgtgtccggcagtatgttcagctgggtcagcaaggatgcccgccgcaagaaggagccggagctcttccagacggtggctgaggggctgcggcagctgtacgcgcagaagctgctacccctggaggagcactaccgcttccacgagttccactcgcccgcgctggaggacgctgacttcgacaacaagcctatggtgctcctcgtggggcagtacagcacgggcaagaccaccttcatccgacacctgatcgagcaggacttcccggggatgcgcatcgggcccgagcccaccaccgactccttcatcgccgtcatgcacggccccactgagggcgtggtgccgggcaacgcgctcgtggtggacccgcggcgccccttccgcaagctcaacgcgtttggcaacgctttcctcaacaggttcatgtgtgcccagctgcccaaccccgtcctggacagcatcagcatcatcgacacccccgggatcctgtctggagagaagcagcggatcagcagaggctatgactttgcagccgtcctggagtggttcgcggagcgtgtggaccgcatcatcctgctcttcgacgcccacaagctggacatctccgatgagttctcggaagtgatcaaggctctgaagaaccatgaggacaagatccgcgtggtgctgaacaaggcagaccagatcgagacgcagcagctgatgcgggtgtacggggccctcatgtggtccctgggcaagatcatcaacacccccgaggtggtcagggtctacatcggctccttctggtcccacccgctcctcatccccgacaaccgcaagctctttgaggccgaggagcaggacctcttcaaggacatccagtcactgccccgaaacgccgccctcaggaagctcaatgacctgatcaagcgggcacggctggccaaggttcacgcctacatcatcagctccctcaagaaagagatgcccaatgtctttggtaaagagagcaaaaagaaagagctggtgaacaacctcggagagatctaccagaagattgagcgcgagcaccagatctcccctggggacttcccgagcctccgcaagatgcaggaactcctgcagacccaggacttcagcaagttccaggcgctgaagcccaagctgctggacacggtggatgacatgctggccaacgacatcgcgcggctgatggtgatggtgcggcaggaggagtccctgatgccttcccaggtggtcaagggcggcgcctttgacggcaccatgaacgggccgttcgggcacggctacggcgagggggccggcgagggcatcgacgacgtggagtgggtggtgggcaaggacaagcccacctacgacgagatcttctacacgctgtcccctgtcaacggcaagatcacgggcgccaacgccaagaaggagatggtgaagtccaagctccccaacaccgtgctagggaagatctggaagctggccgacgtggacaaggacgggctgctggacgacgaggagttcgcgctggccaaccacctcatcaaggtcaagctggagggccacgagctgcctgccgacctgcccccgcacctggtgccgccctcctctgcctggggccattgagcccagcctccagggcccgggcgcgtttgcaggccagtggccactgtccgggctgtgatggcaccaaggcaggtggagcaccaggtaccacacagctgggcttcccaccaggctttcccgcgggggtctcagggagcttctccccagcgctgctcggagtctgcaggaactggccttgttctccttagcccgtcactccatacagtattaggtgaggatggatgcgggcgctgtccttgccgggaagtcactgttgaagttgcagtggcttgttcacacctgtgggaagagaagtgaagactttctccttgcattaaaaagtctgaactgtg

SEQ ID NO: 3272 - protein, 534 aa, Homo sapiens [sequence omitted]

SEQ ID NO: 3273 - DNA, 6299 bp, Homo sapiens
acggggatcgccggcgggcggcaagcggaggcggcccaggcccggcggtctccgagatgtcacgatggctgtggccatggtcaaactgtgtgaaagagcgggtctgccgctacttgctgcaccactacttaggtcacttcttccaagagcacctcagcctggaccagctcagcctcgatctgtacaagggcagcgttgccctgcgagacatccacctggaaatctggtctgtgaacgaggtgctggagtcaatggagtcaccgctggagctggtggaaggcttcgtgggctccatcgaggtggccgtgccctgggctgctctgctcaccgaccactgcacagtgcgcgtgtccggcctccagctcaccttgcagccccgccggggtccagcgccaggggctgccgactcacagagctgggcctcatgcatgaccacaagcctgcagctggcccaggagtgtctgcgggatgggctaccggagccctctgagccaccacagcccctggaggggctggagatgtttgcccagaccattgagactgtgcttcggaggatcaaagtgaccttcctggacactgtcgtgagggtggagcactctccgggtgatggggaacgtggtgtggccgtcgaggtccgtgtgcagagactggagtactgtgatgaggcagtgcgggacccaagccaggcgccgccggtggacgtgcatcagccgcctgccttcctgcacaagctgctgcagctggcaggggtccgcctgcactacgaggagctcccggcacaggaagagcctccagagccccccttgcagatcggcagctgctcagggtacatggagctgatggtgaagttgaagcaaaatgaggccttccctggccccaagttggaggtggcgggacagctgggctccctgcacctgctcctgaccccgaggcagctccagcaacttcaggaactgctcagcgccgtgagccttacagaccacgagggcctggctgacaagctgaacaagagccgcccgctaggtgccgaagacctgtggctgattgagcaggacctgaaccagcagctgcaggcaggggcagtggctgagcccctcagcccagacccccttaccaacccccttctcaacctggataacactgacctcttcttctccatggctggcctcacaagcagtgtggcctcagccctctctgagctctccctctccgatgtagacctggcctcctctgtgcgcagcgacatggcctcccgccggctctctgcccaggcccacccagctggcaagatggcccccaaccccctcctggacaccatgcgccctgactcgctgctgaagatgaccttggggggtgtgaccctgaccttgcttcagacgtctgccccatcttccggaccacctgacctcgccacgcactttttcaccgagtttgatgccaccaaggatgggcccttcggttcccgagacttccatcaccttcgaccacgcttccagagggcctgtccctgtagccatgttcggctaacgggcacagccgtgcagctgtcctgggagctgcggacgggcagtcggggccggcggacaaccagcatggaagtgcacttcgggcagctggaggtgctggagtgtctgtggccccggggcacctctgagcctgagtacacggagatcctgacctttcctggtacgctgggctcccaggcctcagctcggccctgcgcccatctgcgccacacacagatcctgcgccgtgtgcctaagagccgaccccggcgctcagttgcctgccattgccactcagaactggccctggacctggccaacttccaggcggacgtggagctgggggccctggaccggctggccgccctactgcgcctggccaccgtacctgctgagcctccagccggcctgctgacagagcccctgccggcgatggagcagcagacggtatttcggctctctgcaccccgggccacgctgcggctgcgcttccccattgccgacctgcggcctgagccggacccctgggcgggccaggccgtgcgggctgagcagcttcggctggagctgagtgagccccagttccggtcagagcttagcagtgggcctggtcccccagtccccacccacctggaactcacctgctccgacctacatggtatctatgaagatggagggaagccacctgtcccttgcctgcgtgtctccaaagccctggaccccaagagcactgggcgcaagtacttcctgccccaggtagtggtgactgtgaacccccagtccagcagcacacagtgggaggtggccccggagaagggagaggaactggagctgtcagtggagagtccctgtgagctgcgggaacctgagccctcgcccttctcctctaagaggaccatgtatgagacagaggagatggtgatccctggagaccctgaggagatgaggacgttccagagccggaccctggcactgtcccgctgcagcctggaagtgatcctgcccagtgtccacatctttctgcccagcaaggaggtctacgagagcatctacaacaggatcaacaacgacctgctcatgtgggagcctgcagatctgcttcccacccccgaccccgccgcccagccctcgggcttccccggcccctcaggcttctggcacgacagctttaagatgtgcaagtcagccttcaagctggccaactgctttgatctcaccccagactcggactcggatgacgaggatgcccacttcttctcagtgggggcatcaggtggcccacaggccgctgcccctgaggccccaagtcttcacttgcagagcaccttctctacactggtgacagtgctgaaggggcggatcacagccctctgtgagaccaaggatgagggtgggaagcggctggaggctgtgcacggggagctggtgctggacatggagcacggtaccctcttcagcgtctcccagtactgtggccagccaggacttggctacttctgtctggaagctgaaaaggcaacactctaccaccgagcggccgtggatgactacccgctgcccagtcacctggaccttcccagtttcgctcccccggctcagctggccccaaccatctacccatcggaggaaggggtgaccgagcggggagcctcgggccgcaagggccagggccggggaccccacatgttgtccactgctgtgcgcatccacctggacccccacaagaatgtgaaggagttcctggtgacactgcggttgcacaaagccaccttgcgccactacatggccctgcccgagcagagctggcattcccagttgttggagttcctagacgtgctggatgaccctgtgctgggctacctgcccccgacggtcatcaccatcctgcacacacacctgttctcctgctctgtggactataggccactctacctcccagtgcgtgtcctcatcaccgcggagaccttcactctctccagcaacatcatcatggacacctccaccttcctgctcaggttcatcctcgatgactccgccttgtacctgtccgacaagtgtgaggtggagaccctggacctgcggcgagattatgtctgtgttttggatgttgacctcttggaacttgtgattaaaacctggaaagggagcaccgagggcaaactgagccagccactattcgagctgcgctgctccaacaatgtggtacacgtgcacagctgtgccgactcctgtgccctgctggtcaacctgctccagtacgtaatgagcacaggcgatctgcaccccccaccccggccccccagccccacggagatcgccggccagaagctctcggagagtcctgcctctctgccctcgtgccccccagtggagacggccctcatcaaccagcgtgacctggccgacgccctcctggacaccgagcgcagcctacgggagctggcccagccttcaggtggccacctccctcaggcgtcgcccatctccgtctacctattcccaggtgaacggagtggggccccacccccttcaccacctgtcgggggccctgctggcagcttagggtcatgctcagaggagaaggaagatgaaagggaagaggagggcgatggagacaccctggacagtgatgagttctgcatccttgatgctcccggcctgggcatcccgccccgagatggggagcctgtggtgacacagctgcatcccggccccatcgttgtgagggacggttacttctcacggccgatcggcagcacggacttgctgcgggcacctgcccatttcccagtgcccagcactcgggtggtgctacgtgaggtctccctcgtctggcacctctatgggggccgagactttggcccccaccccggccacagggcaagaactggcctctcaggtcccaggagctccccttcccgctgctctggccccaaccggccccagaactcatggcgcacgcaggggggcagcgggcggcagcaccatgtcctcatggagatccagctgagcaaggtaagcttccagcacgaggtgtacccagcggagccagccacaggccctgcggcccccagccaggagctggaggagcgaccgctgtcccgtcaggtgttcatcgtgcaggagctggaggtccgagaccggctcgcctcctcccagatcaacaagttcctgtacctacacacgagtgagcggatgccgcgacgtgcccactctaacatgctcaccatcaaagcgctgcatgtggcccccactaccaacctgggtgggcctgagtgctgtctccgcgtctcgctgatgcccctgcggctcaatgtggaccaggatgccctcttcttcctcaaggacttcttcactagtctggtggccggcatcaaccccgtggtcccaggggagacctccgctgaggctcgccccgagactcgagcccagcccagcagccccctggaagggcaggccgaaggcgtagagaccactggttcgcaggaggccccaggaggtggacacagcccctcccctcctgaccagcagcccatctacttcagagagttccgcttcacgtctgaggtccccatctggctggattaccatggcaagcacgtcacgatggaccaggtgggcacttttgctggcctcctcatcggcctggcccaactcaactgctccgagctgaagctaaagcggctctgttgcaggcacgggctcctgggtgtggacaaggtgctgggctatgccctcaacgagtggctgcaggacatccgcaagaaccagctgcccggcctgctgggaggcgtgggccccatgcactcggttgtccagctcttccaagggttccgggacctgctgtggctgcccattgagcagtacaggaaggatggccgcctcatgcgggggctgcagcgaggggctgcctcctttggctcatccacagcctctgccgccctggaactcagcaaccggttggtacaggctatccaggccacagctgagaccgtgtatgacatcctgtccccggcagcccccgtctcccgctccctgcaggataagcgctctgcgcggaggctgcgcaggggccagcagcctgccgacctgcgggagggtgtggccaaggcctacgacacagtgcgagagggcatcttggatacagctcagaccatctgtgacgtggcatcgcggggccatgagcagaaggggctgacgggcgccgtggggggcgtgatccgccagctgcccccgactgtggtgaagccgctcatcctggccacggaggccacgtccagcctgctcgggggcatgcgcaaccagattgtccccgacgcccacaaggaccacgccctcaagtggcgctcggacagtgcccaagactgagcctggggtgcccggcacccagagggtgctgcccaccatgctcctgagcctcccaagagctgcagcccacgggcccggcccggcctggcccttcaggggatggccactgtgaaggacgccttcccagcctgcccgttgccaatctgctgtgagaggggggcctccctgccttggggccttagccctggctctgcacttttcctccggggagaaaggacactgcccctcccccgacctgggcccacactgctgccttctcccaggacggaggcttttggaccctcggaccccatcccactcagccaagtgtctttctgtgtctggggggaggaggggatgatatccgtgtggttcgatgtattatttttaagctccgtgagtgcgtgggtcagtgtctgcatgaagtggaataaactgcccaccgcc

SEQ ID NO: 3274 - protein, 1938 aa, Homo sapiens
MSRWLWPWSNCVKERVCRYLLHHYLGHFFQEHLSLDQLSLDLYKGSVALRDIHLEIWSVNEVLESMESPLELVEGFVGSIEVAVPWAALLTDHCTVRVSGLQLTLQPRRGPAPGAADSQSWASCMTTSLQLAQECLRDGLPEPSEPPQPLEGLEMFAQTIETVLRRIKVTFLDTVVRVEHSPGDGERGVAVEVRVQRLEYCDEAVRDPSQAPPVDVHQPPAFLHKLLQLAGVRLHYEELPAQEEPPEPPLQIGSCSGYMELMVKLKQNEAFPGPKLEVAGQLGSLHLLLTPRQLQQLQELLSAVSLTDHEGLADKLNKSRPLGAEDLWLIEQDLNQQLQAGAVAEPLSPDPLTNPLLNLDNTDLFFSMAGLTSSVASALSELSLSDVDLASSVRSDMASRRLSAQAHPAGKMAPNPLLDTMRPDSLLKMTLGGVTLTLLQTSAPSSGPPDLATHFFTEFDATKDGPFGSRDFHHLRPRFQRACPCSHVRLTGTAVQLSWELRTGSRGRRTTSMEVHFGQLEVLECLWPRGTSEPEYTEILTFPGTLGSQASARPCAHLRHTQILRRVPKSRPRRSVACHCHSELALDLANFQADVELGALDRLAALLRLATVPAEPPAGLLTEPLPAMEQQTVFRLSAPRATLRLRFPIADLRPEPDPWAGQAVRAEQLRLELSEPQFRSELSSGPGPPVPTHLELTCSDLHGIYEDGGKPPVPCLRVSKALDPKSTGRKYFLPQVVVTVNPQSSSTQWEVAPEKGEELELSVESPCELREPEPSPFSSKRTMYETEEMVIPGDPEEMRTFQSRTLALSRCSLEVILPSVHIFLPSKEVYESIYNRINNDLLMWEPADLLPTPDPAAQPSGFPGPSGFWHDSFKMCKSAFKLANCFDLTPDSDSDDEDAHFFSVGASGGPQAAAPEAPSLHLQSTFSTLVTVLKGRITALCETKDEGGKRLEAVHGELVLDMEHGTLFSVSQYCGQPGLGYFCLEAEKATLYHRAAVDDYPLPSHLDLPSFAPPAQLAPTIYPSEEGVTERGASGRKGQGRGPHMLSTAVRIHLDPHKNVKEFLVTLRLHKATLRHYMALPEQSWHSQLLEFLDVLDDPVLGYLPPTVITILHTHLFSCSVDYRPLYLPVRVLITAETFTLSSNIIMDTSTFLLRFILDDSALYLSDKCEVETLDLRRDYVCVLDVDLLELVIKTWKGSTEGKLSQPLFELRCSNNVVHVHSCADSCALLVNLLQYVMSTGDLHPPPRPPSPTEIAGQKLSESPASLPSCPPVETALINQRDLADALLDTERSLRELAQPSGGHLPQASPISVYLFPGERSGAPPPSPPVGGPAGSLGSCSEEKEDEREEEGDGDTLDSDEFCILDAPGLGIPPRDGEPVVTQLHPGPIVVRDGYFSRPIGSTDLLRAPAHFPVPSTRVVLREVSLVWHLYGGRDFGPHPGHRARTGLSGPRSSPSRCSGPNRPQNSWRTQGGSGRQHHVLMEIQLSKVSFQHEVYPAEPATGPAAPSQELEERPLSRQVFIVQELEVRDRLASSQINKFLYLHTSERMPRRAHSNMLTIKALHVAPTTNLGGPECCLRVSLMPLRLNVDQDALFFLKDFFTSLVAGINPVVPGETSAEARPETRAQPSSPLEGQAEGVETTGSQEAPGGGHSPSPPDQQPIYFREFRFTSEVPIWLDYHGKHVTMDQVGTFAGLLIGLAQLNCSELKLKRLCCRHGLLGVDKVLGYALNEWLQDIRKNQLPGLLGGVGPMHSVVQLFQGFRDLLWLPIEQYRKDGRLMRGLQRGAASFGSSTASAALELSNRLVQAIQATAETVYDILSPAAPVSRSLQDKRSARRLRRGQQPADLREGVAKAYDTVREGILDTAQTICDVASRGHEQKGLTGAVGGVIRQLPPTVVKPLILATEATSSLLGGMRNQIVPDAHKDHALKWRSDSAQD

SEQ ID NO: 3275 - DNA, 3004 bp, Homo sapiens
aaggagagagggagggcggagggcggaggggcggcgggaggagggcggggaggagcgctcttcctggttgggccctgccctgagctgccaccgggaagccagcctcagggactgcagcgacccccaaacacccctcccccaggatgtcggaggagatcatcacgccggtgtactgcactggggtgtcagcccaagtgcagaagcagcgggccagggagctgggcctgggccgccatgagaatgccatcaagtacctgggccaggattatgagcagctgcgggtgcgatgcctgcagagtgggaccctcttccgtgatgaggccttccccccggtaccccagagcctgggttacaaggacctgggtcccaattcctccaagacctatggcatcaagtggaagcgtcccacggaactgctgtcaaacccccagttcattgtggatggagctacccgcacagacatctgccagggagcactgggggactgctggctcttggcggccatcgcctccctcactctcaacgacaccctcctgcaccgagtggttccgcacggccagagcttccagaatggctatgccggcatcttccatttccagctgtggcaatttggggagtgggtggacgtggtcgtggatgacctgctgcccatcaaggacgggaagctagtgttcgtgcactctgccgaaggcaacgagttctggagcgccctgcttgagaaggcctatgccaaggtaaatggcagctacgaggccctgtcagggggcagcacctcagagggctttgaggacttcacaggcggggttaccgagtggtacgagttgcgcaaggctcccagtgacctctaccagatcatcctcaaggcgctggagcggggctcctgctgggctgctccatagacatctccagcgttctagacatggaggccatcactttcaagaagttggtgaagggccatgcctactctgtgaccggggccaagcaggtgaactaccgaggccaggtggtgagcctgatccggatgcggaacccctggggcgaggtggagtggacgggagcctggagcgacagctcctcagagtggaacaacgtggacccatatgaacgggaccagctccgggtcaagatggaggacggggagttctggatgtcattccgagacttcatgcgggagttcacccgcctggagatctgcaacctcacacccgacgccctcaagagccggaccatccgcaaatggaacaccacactctacgaaggcacctggcggcgggggagcaccgcggggggctgccgaaactacccagccaccttctgggtgaaccctcagttcaagatccggctggatgagacggatgacccggacgactacggggaccgcgagtcaggctgcagcttcgtgctcgcccttatgcagaagcaccgtcgccgcgaggccgcttcggccgcgacatggagactattggcttcgcggtctacgaggtccctccggagctggtcgcgagccggccgtacacttgaagcgtgacttcttcctggccaatgcgtctcgggcgcgctcagagcagttcatcaacctgcgagaggtcagcacccgcttccgcctgccacccggggagtatgtggtggtgccctccaccttcgagcccaacaaggagggcgacttcgtgctgcgcttcttctcagagaagagtgctgggactgtggagctggatgaccagatccaggccaatctccccgatgagcaagtgctctcagaagaggagattgacgagaacttcaaggccctcttcaggcagctggcaggggaggacatggagatcagcgtgaaggagttgcggacaatcctcaataggatcatcagcaaacacaaagacctgcggaccaagggcttcagcctagagtcgtgccgcagcatggtgaacctcatggatcgtgatggcaatgggaagctgggcctggtggagttcaacatcctgtggaaccgcatccggaattacctgtccatcttccggaagtttgacctggacaagtcgggcagcatgagtgcctacgagatgcggatggccattgagtcggcaggcttcaagctcaacaagaagctgtacgagctcatcatcacccgctactcggagcccgacctggcggtcgactttgacaatttcgtttgctgcctggtgcggctagagaccatgttccgatttttcaaaactctggacacagatctggatggagttgtgacctttgacttgtttaagtggttgcagctgaccatgtttgcatgaggcagggactcggtcccccttgccgtgctcccctccctcctcgtctgccaagcctcgcctcctaccacaccacaccaggccaccccagctgcaagtgccttccttggagcagagaggcagcctcgtcctcctgtcccctctcctcccagccaccatcgttcatctgctccgggcagaactgtgtggcccctgcctgtgccagccatgggctcgggatggactccctgggccccacccattgccaagccaggaaggcagctttcgcttgttcctgcctcgggacagccccgggtttccccagcatcctgatgtgtcccctctccccacttcagaggccacccactcagcaccaccggcctggccttgcctgcagactataaactataaccactagctcgacacagtctgcagtccaggcgtgtggagccgcctcccggctcggggaggccccggggctgggaacgcctgtgccttcctgcgccgaagccaacgccccctctgtccttccctggccctgctgccgaccaggagctgcccagcctgtgggcggtcggccttccctccttcgctccttttttatattagtgattttaaaggggactcttcagggacttgtgtactggttatgggggtgccagaggcactaggcttggggtggggaggtcccgtgttccatatagaggaaccccaaataataaaaggccccacatctgtctgtg

SEQ ID NO: 3276 - DNA, 1995 bp, Homo sapiens
gtagcaggtaaagatggcagctaccatgttccgggctacgctgcggggatggagaaccggtgtccagcggggctgcgggctacggctgttgagccagacccagggccctccagattaccccaggtttgtggagtctgtggatgaatatcagtttgtggagcgcctgttaccggctaccaggatcccagatcccccaaagcatgaacattatcctacccctagtggctggcagcctcccagagaccccccacccaacctgccttactttgtacgacgctctcggatgcacaacatccccgtctacaaggacatcacgcatggcaaccggcagatgactgtgatccggaaagtggaaggggacatctgggccctgcagaaagacgtggaagattttctgagcccgctgctggggaagacacctgtcacccaggtcaatgaggtgacaggtaccctacggatcaagggctactttgaccaggagcttaaagcctggctcttggagaaaggcttctgaggcccagccgagcagcctgcttgtcagcatgccctgtggatcaagtctagggggcctcaggaggagggaggtgggtgttggagcccctgagacaggggatacagaaactagggctaaaggactttggggtcaggccttgcttgcataaaggagaaaacaactctatgtacatgctgggggagagtgcctaatgtgggagaccaaatagggatcaccaggctaatggggggcgtcagcagctttctctccctcctatcttggcctgttcttttttgttttttgagacggagtctcactctgttgcccagggtggagtgcagtggcatgatcttggctcactgcaacttccacctctgggatcaagggattctcctgcctcagcctcttgagtagctgggattacaggcgcccaccaccacagcctgctaatttttgtatttttagtagagatggggtttcaccatgttggccaggctggtctcaaactcctgactcgaagtgatccgcccaccttggcctcccaaagcgttgggattataggcatgagccatgtgcctggtccaccttggcctgttttgtttttctttccttgggctcagcaattcaaattctagttgttatttggtggaagcagtagcccaaccccagtttaggggaaggtagcacagggcagagccactgggcactttgtttccttggccctccgaagctcactgttgcaaatacccccaagcctttgctctaggccagatcttgtttggtgcaggtgatggagaacacagatgactcgggcatgggtcttggagatcttctgttcaaagtacagtgctggcactggggcacagagtgcccacgttagccccgggctctgatagagaggtaggaggcacgttcttggtcactgttccattgcagaccagacttgctggcctgaccacaagggagtggctgggaactcacagccagcatagggacatccccctgcagccttctgacctgcaatcaaggctggggaggggtttgcaggcaggaatatgctgacctttcaccctgccatcccatcccaaccccagctcactagccttcatatatgccttatacttggagtcacaggggccaaaggcctgagaccccaccctgcccccaaactggctaagacagctttcagttcctgactccccaacttggtctctgccctgaagcagggcactgaactctgggctgcttctctgtgtgtaaaatgggcacatcttcctaatctgttaatggtcagtggtgtccccaaggatagtgctggcttccatggaaaccctcactcctggagattccattccattttcaagtgtacagccacagcaaggagcccgacactgatttgatcgattctgtgacacaaaccccaccaattgttaatgcaagtttttatttggctgtatatacaatttaagctattaaaatttgtacaatatttacaaattaaa

SEQ ID NO: 3277 - protein, 166 aa, Homo sapiens
MAATMFRATLRGWRTGVQRGCGLRLLSQTQGPPDYPRFVESVDEYQFVERLLPATRIPDPPKHEHYPTPSGWQPPRDPPPNLPYFVRRSRMHNIPVYKDITHGNRQMTVIRKVEGDIWALQKDVEDFLSPLLGKTPVTQVNEVTGTLRIKGYFDQELKAWLLEKGF

SEQ ID NO: 3278 - DNA, 1561 bp, Homo sapiens
gtccaggcaggtgcaggcgccgcggggccggatcctccgcgcggccgagtccatctcctgggaaatggggcggacagtgtttccttgactgactattgtgagcgccctctctctccggcggagcggagaccatggcccccactcagggcccccgggccccgctggaattcggagggcccctgggcgccgcggctctgctactgctgctgcccgccaccatgttccacctgctcctggcggcccgttcgggccccgcgcgcctgctgggtccacccgcgtccctgccggggctggaggtgctgtggagcccacgggcgctgctgctgtggctcgcctggctcggcctgcaggcggcgctctacctactgccggcgcgcaaggtggccgaggggcaggaattgaaggacaagagtcgcctgcgctatcctattaacggcttccaggccctggtgctgacagccctgttggtggggctggggatgtcagcggggctgcctctgggggcgctcccggaaatgctcctgcccttggcgtttgtcgccaccctcaccgctttcatcttcagcctctttctctacatgaaggcgcaggtagccccagtttcggccctggcacctggggggaactcaggcaatccgatttacgacttttttctgggacgagagctcaaccctcgtatctgtttcttcgacttcaaatatttctgtgaactgcgacccggcctcatcggctgggtcctcatcaacctggccctgttgatgaaggaggcagagcttcgaggcagtccctcactggccatgtggctggtcaatggcttccagttgctctacgtgggtgatgccctctggcacgaggaggccgtcctcaccaccatggatatcacacatgacgggtttggcttcatgctggcgtttggggacatggcctgggtgcccttcacctacagcctgcaggcccagttcctgctgcaccacccgcagcccctggggttgcccatggcctctgtcatctgcctcatcaatgctactggttactacatcttccgtggggcgaattcccagaaaaacactttccgaaagaatccttctgaccccagagtggctgggcttgagaccatctctacagccacagggcggaaactgctggtgtctgggtggtggggtatggtccgccatcccaactatcttggagacctcatcatggctctggcttggtccttgccctgcggggtgtcacacctgctgccctacttctacctcctctacttcaccgcgctgctggtgcaccgtgaggcccgggatgagcggcagtgcctgcagaagtacggcctggcctggcaggagtactgccggcgtgtgccttaccgcatcatgccctacatctactgaagcggctccaccaccccaggtgggggcatgtgcccactcatccaccagcacacccaggaccaggagcctcgacacacttgggactcaagggcttgcaccccacccagccctgaggatgaacaacctcagagaagaggtggtttagagcaaggaaaaaaatgaaaccagtgacc

SEQ ID NO: 3279 - DNA, 2546 bp, Homo sapiens
ttcctttccagcctcacgcccgtgggctgcagttggaacgatggcggcggcagctgccgccgggcctagcccggggtctggacctggggactccccagaagggcccgagggggaggctccggagcgtcggcggaaggcgcacgggatgctgaagctttactacggcctctcggaaggggaggcggcgggacgccccgcggggcccgaccccctggacccgactgatctgaacggggcgcacttcgacccggaagtttacctagacaagctgcgtagagagtgccctctggcccagttgatggacagtgagacggacatggtgcggcagatccgggctctagacagcgacatgcagaccctggtctatgagaactacaacaagttcatctcagccacagacaccatccggaagatgaagaacgatttccggaagatggaggatgagatggaccggctggccaccaacatggcagtgatcaccgacttcagcgctcgcatcagcgccacgctgcaggaccgccacgagcgcatcaccaagctggcaggggtccacgcgctgctgcggaagctgcagttcctctttgagctgccctcgcgcctcaccaagtgcgtggaactgggcgcctatgggcaggcggtgcgctaccagggccgcgcgcaggccgtgctgcagcagtaccaacacctgccctcgttccgcgccatccaggacgactgccaggtcatcacggcccgcctggcccagcagctgcggcagcgctttagggagggcggctcaggcgccccggagcaggcagagtgcgtggagctgctgctggccctgggcgagcctgcggaggagctgtgcgaggagttcctggcgcacgcccgcggccggctggagaaggagctgagaaacctggaggccgagctggggccctcacctccggctcccgacgtgttagagttcaccgaccatggaggcagtggcttcgtgggcggcctctgccaggtggcggcggcctaccaggagctgtttgcggcccagggcccagcaggtgccgagaagctggcggccttcgcccggcagctgggcagccgctattttgcgctggtggagcggcggctggcgcaggagcagggtggtggtgacaactcactgctggtgcgggcgctggaccgcttccaccggcgcttgcgggctcccggggccctgctggccgctgccgggctcgcagacgctgccacggagatcgtggaacgagtggcccgcgagcgcctgggccaccacctgcagggtctccgggcggccttcctgggctgcctgacagacgtccgccaggcgctggcagcacctcgcgtggctgggaaggagggccctggcctggccgagttgctggccaatgtggccagctccatcctgagccacattaaggcctctctggcagcagtgcaccttttcaccgccaaagaggtgtccttctccaacaagccctacttccggggtgagttctgcagtcagggtgtccgtgagggcctcatcgtgggcttcgtccactctatgtgccagacggctcagagcttctgcgacagccctggggagaaggggggtgccacaccacctgccctgctcctgctgctctcccgcctctgcctggactacgagacggccaccatctcctacatcctcactctcactgatgaacagtttctggtgcaggatcagttcccagtgacgcccgtgagcacgctgtgtgcagaggccagggaaacggcgcggcggctgctgacccactacgtgaaggtgcagggcctggtcatatcacagatgctgcgcaagagcgtggagactcgcgactggctcagcactctggagccccggaatgtgcgggccgtcatgaagcgggtggtggaggataccaccgccatcgacgtgcaggtggggctcctgtacgaagagggtgttcgcaaggcccagagcagcgactccagcaagaggactttctccgtgtacagcagctctcggcagcagggccgctacgcccccagctatacccccagtgccccgatggacaccaacctcttgagcaatatccagaagctattctctgaacgtattgatgtgttcagccctgtggagttcaacaaggtgtcggtgctgaccggcatcatcaagatcagcctgaagacgctgctggagtgtgtgcggctgcgcacctttgggcgcttcgggctgcagcaggtgcaagtggactgccactttctgcagctctacctgtggcgttttgtggccgacgaagaactcgtgcacttgctgctggacgaagtggtggcctctgctgccctgcgctgcccagaccctgtgcccatggagcccagtgtggttgaggtcatctgcgagcgcggctaggcgcagccgctgccatgcaccggtctgtccctgcaccccatggcacccaggatctggtctcggtggtccttccccgcaggcaggtgtcaggaccggcctaataaacatgtgtggcctcctcaaaaaaaaaaaaaaaaaaaaaaaaaaaaaaaaaaaa

SEQ ID NO: 3280 - protein, 782 aa, Homo sapiens
MAAAAAAGPSPGSGPGDSPEGPEGEAPERRRKAHGMLKLYYGLSEGEAAGRPAGPDPLDPTDLNGAHFDPEVYLDKLRRECPLAQLMDSETDMVRQIRALDSDMQTLVYENYNKFISATDTIRKMKNDFRKMEDEMDRLATNMAVITDFSARISATLQDRHERITKLAGVHALLRKLQFLFELPSRLTKCVELGAYGQAVRYQGRAQAVLQQYQHLPSFRAIQDDCQVITARLAQQLRQRFREGGSGAPEQAECVELLLALGEPAEELCEEFLAHARGRLEKELRNLEAELGPSPPAPDVLEFTDHGGSGFVGGLCQVAAAYQELFAAQGPAGAEKLAAFARQLGSRYFALVERRLAQEQGGGDNSLLVRALDRFHRRLRAPGALLAAAGLADAATEIVERVARERLGHHLQGLRAAFLGCLTDVRQALAAPRVAGKEGPGLAELLANVASSILSHIKASLAAVHLFTAKEVSFSNKPYFRGEFCSQGVREGLIVGFVHSMCQTAQSFCDSPGEKGGATPPALLLLLSRLCLDYETATISYILTLTDEQFLVQDQFPVTPVSTLCAEARETARRLLTHYVKVQGLVISQMLRKSVETRDWLSTLEPRNVRAVMKRVVEDTTAIDVQVGLLYEEGVRKAQSSDSSKRTFSVYSSSRQQGRYAPSYTPSAPMDTNLLSNIQKLFSERIDVFSPVEFNKVSVLTGIIKISLKTLLECVRLRTFGRFGLQQVQVDCHFLQLYLWRFVADEELVHLLLDEVVASAALRCPDPVPMEPSVVEVICERG

SEQ ID NO: 3281 - DNA, 1368 bp, Homo sapiens
gagggataatcggggcggccggggctgaagggagaggcgcaggagccctggggagagtggtccctgcccttccgcgcctcgagccatcgctaccgcccttcggaaccagtgcagcggccgatcagtaaacacagagactggggatcgatcatggggctttgtaagtgccccaagagaaaggtgaccaacctgttctgcttcgaacatcgggtcaacgtctgcgagcactgcctggtagccaatcacgccaagtgcatcgtccagtcctacctgcaatggctccaagatagcgactacaaccccaattgccgcctgtgcaacatacccctggccagccgagagacgacccgccttgtctgctatgatctctttcactgggcctgcctcaatgaacgtgctgcccagctaccccgaaacacggcacctgccggctatcagtgccccagctgcaatggccccatcttccccccaaccaacctggctggccccgtggcctccgcactgagagagaagctggccacagtcaactgggcccgggcaggactgggcctccctctgatcgatgaggtggtgagcccagagcccgagcccctcaacacgtctgacttctctgactggtctagttttaatgccagcagtacccctggaccagaggaggtagacagcgcctctgctgccccagccttctacagccaggccccccggcccccagcttccccaggccggcccgagcagcacacagtgatccacatgggcaatcctgagcccttgactcacgcccctaggaaggtgtatgatacgcgggatgatgaccggacaccaggcctccatggagactgtgacgatgacaagtaccgacgtcggccggccttgggttggctggcccggctgctaaggagccgggctgggtctcggaagcggccgctgaccctgctccagcgggcggggctgctgctactcttgggactgctgggcttcctggccctccttgccctcatgtctcgcctaggccgggccgcagctgacagcgatcccaacctggacccactcatgaaccctcacatccgcgtgggcccctcctgagcccccttgcttgtggctaggccagcctaggatgtgggttctgtggaggagaggcggggtaatggggaggctgagggcacctcttcactgcccctctccctcaagcctaagacactaagaccccagacccaaagccaagtccaccagagtggctgcaggccaggcctggagtccccgtgggtcaagcatttgtcttgacttgctttcctcccgggtctccagcctccgacccctcgccccatgaaggagctggcaggtggaaataaacaacaactttattaaaac

SEQ ID NO: 3282 - protein, 310 aa, Homo sapiens
MGLCKCPKRKVTNLFCFEHRVNVCEHCLVANHAKCIVQSYLQWLQDSDYNPNCRLCNIPLASRETTRLVCYDLFHWACLNERAAQLPRNTAPAGYQCPSCNGPIFPPTNLAGPVASALREKLATVNWARAGLGLPLIDEVVSPEPEPLNTSDFSDWSSFNASSTPGPEEVDSASAAPAFYSQAPRPPASPGRPEQHTVIHMGNPEPLTHAPRKVYDTRDDDRTPGLHGDCDDDKYRRRPALGWLARLLRSRAGSRKRPLTLLQRAGLLLLLGLLGFLALLALMSRLGRAAADSDPNLDPLMNPHIRVGPS

SEQ ID NO: 3283 - DNA, 2483 bp, Homo sapiens
gcagcgagtggccttcccggttggcgcgcgcccggggcggcggcgctggaggagctcgagacggagcctaagttatgtctgggaggcgaacgcggtccggaggagccgctcagcgctccgggccaagggccccatctcctactaagcctctgcggaggtcccagcggaaatcaggctctgaactcccgagcatcctccctgaaatctggccgaagacacccagtgcggctgcagtcagaaagcccatcgtcttaaagaggatcgtggcccatgctgtagaggtcccagctgtccaatcacctcgcaggagccctaggatttcctttttcttggagaaagaaaacgagccccctggcagggagcttactaaggaggaccttttcaagacacacagcgtccctgccacccccaccagcactcctgtgccgaaccctgaggccgagtccagctccaaggaaggagagctggacgccagagacttggaaatgtctaagaaagtcaggcgttcctacagccggctggagaccctgggctctgcctctacctccaccccaggccgccggtcctgctttggcttcgaggggctgctgggggcagaagacttgtccggagtctcgccagtggtgtgctccaaactcaccgaggtccccagggtttgtgcaaagccctgggccccagacatgactctccctggaatctccccaccacccgagaaacagaaacgtaagaagaagaaaatgccagagatcttgaaaacggagctggatgagtgggctgcggccatgaatgccgagtttgaagctgctgagcagtttgatctcctggttgaatgagatgcagtggggggtgcacctggccagactctccctcctgtcctgtacatagccacctccctgtggagaggacacttagggtcccctcccctggtcttgttacctgtgtgtgtgctggtgctgcgcatgaggactgtctgcctttgagggcttgggcagcagcggcagccatcttggttttaggaaatggggccgcctgcccagccactcactggtgtcctgtctcttgtcgtcctgtccttcctatctccccaaagtaccatagccagtttccagatgggccacagactggggaggagaatcagtggcccagccagaagttaaagggctgagggttgaggtgagaggcacctctgctcttgttgggaggggtggctgcttggaaataggcccagggctctgccagcctcggcctctccctcctgagttgccttctgttggtggctttcttcttgaacccacctgtgtaaagaggttttcagttccgtgggtttcccctttgattctgtaaatagtcccagagagaattcgtgggctgagggcaattctgtcttggaggaagaagctggacattcagcctgtggagtctgagttttgaaggatgtagggagccttagttgggtctcagaccataagtgtgtactacacagaagctgtgttttctagttctggtctgctgttgagatgtttggtaaatgccaggttgatagggcgctggctgcttggagcaaagggtgcatttcagggtgtggccaccaggtgctgtgagtttctgtggctcatggcctctgggctggtcccttgcacagggcccacgctggagtcttaccactctgctgcaggggtggaaggtggcccctcttgtcacccatacccatttcttacaaaataagttacaccgagtctacttggccctagaagagaaagttgaagagtcccagacctactagcattttgcaactatgcttgtaaagtcctcggaaagtttcctcgcgtaccagacagcggcgggggctgatagcaattttagtttttggcctccctatcctctcacatgagaacactgcctggatgcatctcatgatctctggagaatttccccatctttctcttctttccatcgtgtggattcaatagtgtggatttgaaggctgccctgcccccgactctcctgccgcacccctggccattgtaccttttgatgtttagaagttcgtggaagtagacgctgaggtgtgcagaggagctggtggataacagagaatgccagggaagatgagtgctgggtcagggtacttggatgaaacggtgcaggccaggcgggccctaataaaaccctctgccaggtctgggagtcccaggccatctgctcaacgctctgtggtttgtcagacctgcaagcaagccccctgctggggaagcctaggtgtccttgagctgaaccgcactgaagaactcttgtcctcactggctgatgcagcagaactcttgggaaatgtcttagtcctgcagaatcaggagtcaccagatgatgcagagttgagatcatcattgcaaagttctctgttcctgaggaactaaatttaaggaaaaaatgggattttgttttagagttggaaaaaaagcctgattaaagagtttctgcctgtt

SEQ ID NO: 3284 - DNA, 902 bp, Homo sapiens
ctccggggcccatggggctcctgaccattctgaagaagatgaagcagaaagagcgggagctgcgactgctcatgcttggcctggacaatgctggaaagacaaccatcctgaagaagttcaatggggaggacatcgacaccatctccccaacgctgggcttcaacatcaagaccctggagcaccgaggattcaagctgaacatctgggatgtgggtggccagaagtccctgcggtcctactggcggaactactttgagagcaccgatggcctcatctgggtagtggacagcgcagaccgccagcgcatgcaggactgccagcgggagctccagagcctgctggtggaggagcgcctggccggagcaaccctcctcatctttgctaataagcaggacctgcctggagcactgtcctctaacgccatccgcgaggccctggagctggactccatccgcagccaccactggtgcatccagggctgcagcgccgtcaccggggagaacctgctgccgggcatcgactggctcctggatgacatttccagccgcattttcacagctgactgaaccactccagatgccccccacctagcagtccaggtccctcaaccttcaccaaacactacccatggggggttgggagtcagccggccaaactaacactccccctcctccaccccagcctgctgctgctactgctgccgctgctgctctgtggccacccggctcccatggcgggaggctgtgccctggctgtctctctggctcctgacctggcctttggctaccataccaagaagagagggctgggcggggaggagctgctactgctgctaccgaggctgtgggcctcatccttcactcagttgtgaaataaaccgctccttgccccgaaaaaaaaaa

SEQ ID NO: 3285 - protein, 184 aa, Homo sapiens
MGLLTILKKMKQKERELRLLMLGLDNAGKTTILKKFNGEDIDTISPTLGFNIKTLEHRGFKLNIWDVGGQKSLRSYWRNYFESTDGLIWVVDSADRQRMQDCQRELQSLLVEERLAGATLLIFANKQDLPGALSSNAIREALELDSIRSHHWCIQGCSAVTGENLLPGIDWLLDDISSRIFTAD

SEQ ID NO: 3286 - DNA, 549 bp, Homo sapiens
atgaatgcagcactgagctctgtttgccctctaagcttgtccccagaaaaaacaagatataccctaaatatgcacgatctgattttctggagagatgtgaagaagactgggtttgtctttggcaccacgctgatcatgctgctttccctggcagctttcagtgtcatcagtgtggtttcttacctcatcctggctcttctctctgtcaccatcagcttcaggatctacaagtccgtcatccaagctgtacagaagtcagaagaaggccatccattcaaagcctacctggacgtagacattactctgtcctcagaagctttccataattacatgaatgctgccatggtgcacatcaacagggccctgaaactcattattcgtctctttctggtagaagatctggttgactccttgaagctggctgtcttcatgtggctgatgacctatgttggtgctgtttttaacggaatcacccttctaattcttgctgaactgctcattttcagtgtcccgattgtctatgagaagtacaaggagatgggccactaa

SEQ ID NO: 3287 - DNA, 1711 bp, Homo sapiens
ggcctgagggcgccgcactcgactgcttcgaggtgacgctgaaatgcgaggaaggggaggacgaggaggaggccatggtggtggccgtaattccgcggcccgagccgatgctcagagtgacccaacaggagaagaccccaccgcctagacccagcccgctagaggcaggcagtgatggctgtgaggagccgaagcagcaggtgtcttgggagcaggagttcctggtgggcagcagcccaggaggcagcgggcgggcactgtgcatggtgtgtggcgctgagatccgggcaccctcggccgacacagctcgctcgcacatcttggagcagcaccctcacaccttggacctgagcccttctgagaagagcaatatcctggaggcctggagtgaaggggtggccctcttgcaagacgtgagagctgagcagccgtccccacccaactcagactcgggccaggatgcccacccagacccagacgccaacccagacgctgccagaatgccagccgaaatcgtcgttctccttgactctgaggataacccatccctccctaaaaggagcaggcccaggggactccgccccctcgagcttcctgctgtccctgccacagagccaggaaataagaagccccgtggtcagagatggaaggaacccccaggggaagagccagtcagaaagaaaagaggcagacctatgaccaaaaacctggaccctgacccagagcccccatcgccagactcgcccacggagactttcgcagcaccagccgaggtccgacacttcactgacggcagcttccccgccggcttcgtcttgcagctcttctcccacacccagctcaggggcccagacagcaaggactcacccaaagacagggaagtggcagaaggaggccttccccgggcggagagcccctctccagctccccctccggggctccgcgggacactggatctccaggttatccgcgtgcggatggaggagcccccagcggtcagcctcctgcaagactggtccaggcacccccagggcaccaagcgtgtgggagcaggtgacacctcagactggcccacagttctgtcagaatccagcaccactgtggcagggaagccggaaaaagggaatggagtgtaaattcttgctttcctggggagggagggagggatgaggcagcgtcccccagtggcttataactcagagctgcctggctcacccacctggtggagagagtagaaacaggtgccagggcaggagggggctggggcagcatccactgttatttcggggcactggaaagtgtctgttcctggccaggcctgaggtcggcgagggtggctgaggctgttgtgcagtagggcactgggcctgtggagaacacctaccccagtccttcgctgacccccacctctgtttgtcccccatgacctcctcccaccctccccctgctccccaccattctcccttggcacagtgccttacacaagagtggtcataagggggtttgaactgagtcccactacctcgggggacacctctcctccccacttgttcaggcttctaaaccaggaggcctccattacctcttcctgtcccacccctgcagaggcctgaagctgggcctgggcaccccattcactcccgttctcatttacatctgttttcctgttgtatatatcacctttgttgacaataaattatttttttttatt

SEQ ID NO: 3288 - DNA, 2613 bp, Homo sapiens
gcgcccagccgctgaacggcgtgggcaggtgggcggtggggttccagggcgccccgaggacagggggccccgacttcaggggaaccccaaccctgaggggcgtacatagtaatcacgccccagccgcaccggaccttgcgctcatcccttgcgtcccccacttctgcacaaacttttctgacgccctggctcgtgggggtcgtggagagcgctggggctaccaggtgggctcccaccccgccggaccctagccacgctgacctcctgcctctcctaacctcagtggcgacctctccaggccgggccgggctcggcactcggagcgagtgcggcaaccactgtcgctctccgaaggctcctgcgccccccggggcagctgggcggggtaatgccctcagtgatggagaagccgagcgcgggctctgggatcctgtcccgtagccgggccaagacggtgcccaacggcggacagccccactcggaggatgacagcagcgaggaggagcactcgcacgtcccttctgtggctgcagacagcatgatccgcgttggaaccaattaccaggccgtaattccggagtgcaagcctgagagccccgcacgctacagcaacaaggagctgaaggggatgctggtgtggtcacccaaccactgtgtgtcagatgccaagcttgacaagtacattgcgatggccaaggagaagcatggctacaacattgagcaggcgctgggcatgcttctgtggcataagcacgatgtggagaagtcgctggccgacctggccaacttcaccccattccctgacgagtggacagtagaggacaaggtgctgtttgaacaggcctttggcttccatggcaaatgcttccagcggatccagcagatgctgcctgacaagttgattcccagcctggtgaaatactactactcttggaagaagacccgcagccgaactagtgtgatggacagacaggcccggcggctggggggccgcaaggacaaagaagacagtgatgagctcgaagagggtcgaggaggcgtgagtgagggagagcccgatcctgcagatcccaagagagagcctctaccctctcggcccctgaatgcacgcccaggccctgggaaaaaggaggtccaggtgtctcagtaccgccaccatcccttgcgaacccggcgtcgcccacccaagggcatgtacctgagccctgaaggcctcacggcagtgtcaggaagcccggaccttgccaacctcacgctccgaggtcttgactctcagctcatctccctcaagcgccaggtacagagcatgaagcagacgaacagcagcctgcgccaagccctggagggcggtattgatccactacgccccccggaggccaacaccaagttcaactcccgctggaccacagatgagcagcttttggctgttcaagccatccgtaggtatggcaaagactttggggctattgcagaggtgattgggaacaagactctgacccaggtgaagactttctttgtgagctaccggcgccgcttcaatctggaggaggtgctgcaggaatgggaggctgagcaggatggggcccctggagccccagtccccatggaggaggctaggagaggggctccattgccagccccagccctagaggaagatgatgaggtccagattacatcggtctccacgtccgtgccccgatcagtgccccctgcgccaccaccccctccacctcccacctcgctgtcccagccacccccgctgctgaggccacctttgcccacggctcccactctgctccgacagccacccccactgcagcagggccgcttcctccagccccggctggcccccaaccagcccccaccgcctctcatccgccccgctctggctgccccccgccacagcgcccgccctggccctcagcccccacccaccctgattggaacccctctggagcccccagcaccctcactctgagccctgacgtcctccaccaaccacgggctccaggacccctttgctggccatccccaggcatctctggtgtcactgaggacagaagggactagggctctggcggggtctttgtaagaccagagtttcggacagcccagccccgccctttgggttctgcatgtgttcctggcagctgggcctgtctcctggggccatggccgggctcaggggcctttgagctggcctgagggcactttcgcttcctggccggtactggaatggctgtgtcctagtctgctggggcttggcctctgggtcctgccctttgtgtgtccggggtagtgaccttagcgtggagtggggagagggcagttgggtgtgctggctgttctcattcctctttcccttcttttagcaataagtctggggtgaggtggggagggaggctgcagggggggaggtgggcagaggggccttacagcagcagaggctggaagagaagctctgtcttcaggggccagctgggaaatgctaaggagctgagggtgcccaccaagcccaccttccagaaacttggagaaatgggggttgggaacttatgcagacatggatttatttttcaacattttttaaaaattaaaaaaaataaaatctaa

SEQ ID NO: 3289 - DNA, 2514 bp, Homo sapiens
cctcgtgccgcagttctgccaccgtcactgagaagctcagcggtagcttttgggaagcaggacgttctcaccaggagagcgtcctctcgagatttctgctccctccattcagggcgtttgggagccaccccttcattttttaaaaaaagtatttctctgtgaccgacggccggggccttctgacggtctgaggtcttgcttgggccagtcacctcctgtcacggtccgcggaggggggaaggataagagggcgaggagctcatcgctcgccacccccgtgggcttcttgggcgcaggtcggagctgggtgggccggctccccggcccctggcttgggcgaccatgtccgcatccgcccagcagctggcggaggagctgcagatcttcggcctagactgcgaggaggctctaattgagaaattggtagagctttgtgttcagtatggacagaatgaggagggaatggtaggcgagcttatagccttctgcaccagcacacataaagttggccttacctcagagatcctgaactcttttgagcatgagtttctgagcaaaagattatcgaaagccaggcatagtacctgcaaggacagtggccatgcaggagctagagacattgtttccattcaagagctaattgaagtggaagaagaagaggaaatcctcttgaactcttacaccacaccttcaaagggttctcagaagcgagctatctctaccccagaaacccccctaacaaaaaggagtgtgtcaactcgtagcccccatcagctactctcaccgtcaagtttctctccaagtgctactccctcccagaaatacaactcacgaagtaaccgaggagaagtggttacctccttcggcttagcacagggagtatcttggtctgggagaggaggagctggaaacatcagcctgaaggtcttgggatgtccagaggcactaactgggagctacaaatccatgtttcagaagctcccagacattcgagaagttctgacctgtaagatagaagaacttggcagcgaactcaaggaacattacaagattgaagctttcactcctttgctagccccagcacaggagcctgtcactctgctgggccagattggctgtgatagcaacgggaagctgaacaacaagtcagtgattctcgagggagaccgggaacattcctcgggtgctcaaattccagtggatttatctgagcttaaggaatattctctgtttcctggacaggttgtaattatggaaggaatcaacaccactggtaggaaacttgttgccaccaaactctacgagggtgtgccacttccattttatcagcccactgaagaggatgcagactttgagcaaagcatggtcctggttgcctgtggaccatacaccacatctgacagcatcacgtatgaccccctgcttgacctgattgctgtcatcaaccatgaccggccagatgtctgcatcctgtttggccctttcctggatgctaagcatgaacaggtggagaattgtctactgacaagtccatttgaagacattttcaagcagtgtctacgaacaattattgaaggcacaagaagctccggctcccaccttgtctttgtcccgtcattgagagatgtgcaccatgagcctgtgtacccccagccgcctttcagctactccgatctgtctcgagaggacaaaaagcaagtacagtttgtgtccgagccctgcagcctctccataaacggagtgatcttcggcttgacatccacagatctgcttttccacctgggggccgaggagatcagtagttcttccggaacttcagacagattcagccgaatactcaagcacatcttgacccagaggagctactacccactctacccgccccaagaagacatggccattgactatgagtcgttctatgtttacgcacagctgcctgtcaccccagatgtcctcatcatcccgtcagagctgaggtacttcgtgaaggatgtcctcggctgtgtctgtgtgaaccctgggcgccttaccaaagggcaggtgggaggcaccttcgcccgactctaccttaggaggccggcagcggacggggcagagaggcagagcccatgcattgctgtgcaggtcgtcaggatctgaggcttctgtcctctgctgttctctgctgtgtgggcccttaaagtcttagccaagagccaagacatagccctgtgacaaggtgaacagttgggtgggaaaggagagaggagccagccagggaggggcagctgcagtgaccaggcccagcagggaggacttgtgcagccgggcctgcctctgagtggtgcctctcctggaaggaagctcttgcttctcagtccatgctccgtgtccagaagtaagccagctgtggatcccgcccactcagaaaaggcgagaaggctttgtgattttctacatgaatcaaacacagaaacaacttttggagaaattaaattctgagtgtgaaaaaaaaaaaaaaaaaaaaaaaaaaaa

SEQ ID NO: 3290 - protein, 598 aa, Homo sapiens
MSASAQQLAEELQIFGLDCEEALIEKLVELCVQYGQNEEGMVGELIAFCTSTHKVGLTSEILNSFEHEFLSKRLSKARHSTCKDSGHAGARDIVSIQELIEVEEEEEILLNSYTTPSKGSQKRAISTPETPLTKRSVSTRSPHQLLSPSSFSPSATPSQKYNSRSNRGEVVTSFGLAQGVSWSGRGGAGNISLKVLGCPEALTGSYKSMFQKLPDIREVLTCKIEELGSELKEHYKIEAFTPLLAPAQEPVTLLGQIGCDSNGKLNNKSVILEGDREHSSGAQIPVDLSELKEYSLFPGQVVIMEGINTTGRKLVATKLYEGVPLPFYQPTEEDADFEQSMVLVACGPYTTSDSITYDPLLDLIAVINHDRPDVCILFGPFLDAKHEQVENCLLTSPFEDIFKQCLRTIIEGTRSSGSHLVFVPSLRDVHHEPVYPQPPFSYSDLSREDKKQVQFVSEPCSLSINGVIFGLTSTDLLFHLGAEEISSSSGTSDRFSRILKHILTQRSYYPLYPPQEDMAIDYESFYVYAQLPVTPDVLIIPSELRYFVKDVLGCVCVNPGRLTKGQVGGTFARLYLRRPAADGAERQSPCIAVQVVRI

SEQ ID NO: 3291 - DNA, 12206 bp, Homo sapiens
ggaattctctggggctttggggaatttagtgcgtgggtgagccaagaaaatactaattaataatagtaagttgttagtgttggttaagttgttgcttggaagtgagaagttgcttagaaactttccaaagtgcttagaactttaagtgcaaacagacaaactaacaaacaaaaattgttttgctttgctacaaggtggggaagactgaagaagtgttaactgaaaacaggtgacacagagtcaccagttttccgagaaccaaagggaggggtgtgtgatgccatctcacaggcaggggaaatgtctttaccagcttcctcctggtggccaagacagcctgtttcagagggttgttttgtttggggtgtgggtgttatcaagtgaattagtcacttgaaagatgggcgtcagacttgcatacgcagcagatcagcatccttcgctgccccttagcaacttaggtggttgatttgaaactgtgaaggtgtgattttttcaggagctggaagtcttagaaaagccttgtaaatgcctatattgtgggcttttaacgtatttaagggaccacttaagacgagattagatgggctcttctggatttgttcctcatttgtcacaggtgtcttgtgattgaaaatcatgagcgaagtgaaattgcattgaatttcaagggaatttagtatgtaaatcgtgccttagaaacacatctgttgtcttttctgtgtttggtcgatattaataatggcaaaatttttgcctatctagtatcttcaaattgtagtctttgtaacaaccaaataaccttttgtggtcactgtaaaattaatatttggtagacagaatccatgtacctttgctaaggttagaatgaataatttattgtatttttaatttgaatgtttgtgctttttaaatgagccaagactagaggggaaactatcacctaaaatcagtttggaaaacaagacctaaaaagggaaggggatggggattgtggggagagagtgggcgaggtgcctttactacatgtgtgatctgaaaaccctgcttggttctgagctgcgtctattgaattggtaaagtaataccaatggctttttatcatttccttcttccctttaagtttcacttgaaattttaaaaatcatggttatttttatcgttgggatctttctgtcttctgggttccattttttaaatgtttaaaaatatgttgacatggtagttcagttcttaaccaatgacttggggatgatgcaaacaattactgtcgttgggatttagagtgtattagtcacgcatgtatggggaagtagtctcgggtatgctgttgtgaaattgaaactgtaaaagtagatggttgaaagtactggtatgttgctctgtatggtaagaactaattctgttacgtcatgtacataattactaatcacttttcttcccctttacagcacaaataaagtttgagttctaaactcattagaattgttgtattgctatgttacatttctcgacccctatcacattgccttcataacgactttggatgtatcttcatattgtagatttaggtctagatttgctagctccaagtaattaaggccatgtaggagagcatggtaaccacagatagaactggtattatcccaagtggtctgcagactgctgagtggggatgggatctgctctctgttgagagttggtaatcattggtttgaaatgtgatgaaaccactcaagccaatgaaggtgggtgtgtaggtggggagtactttgccataatattttaaaacattacctggttagagttctaagtggtacttatttttgtttggttaggggaaagcctgaataaaaacagaaatggacacataatatgcatattccatagtctttgggaggctggaatgtgcctgggatttgggtctaagtgtatgcgtaattcttacctcactaaagaatttgccttgtttttttccttttggtgagtgactaaaacgtctgggcttccctgtgtgcgtgctacagtaagcaagcagaggctgtgcaaaggtgtgagcaggatcacgtggaatctggaggatacatcttggcttgcaaactgcctctgtctcctgggtgggactgttctgtccttgcactgctgttctgtgttacctcttggggtgtaaggttttgcttacaggagacaaactttgggcgtagaatggaagccactgccagcctctgtgctgagaaggaaggtgcttgtttcaaagggagcagcaagggaggcttgttctactcacctgggcctgtttgcctgagaaggggagataagggctgaactgggactagccagggggaccaacacaaatggtgggggatcatgacctgaaggattctttccttcccatgagctgcagggctggttgccgtccttgcaactgtgtcttatttgcctgtgccgttatatcttggtgacccctccacgtgtacactactgacaaacgggtggagtgctggggagaagtcactgtgccgcccacctagtaaaccttctgtctgtgctcatggcatctccaagatggggcactgctgtgtgcagaatccagggtcctctttctgcttgcaactcctttccctggatgccccagaaacaatccaggcctcctttcctatcttacccctttgctttgctttttaccccagcacctctataaccgccttctcttcttttcagaactccttgtttctcatcctgttttttatgattacaaaactcttgcttccaccctggaagataactgctatagatgcctgtatgtaaatggtgctgtctccagcaactggcatgctgaagaagaattgattcacggggtataaatgttggggattggaagtggggatgaaatggcacttgttgatacaggagcagagaggtgaggccgactgctgaagacagctcgccaccctccttgcctccactccaatccaggggctggggccacattctttgccttcatttatcctcagatcaggtgagatcgacaggaggtgttgatggcagtgccagcaattattgctaatccgtttgcatccttatgcatagatctgaattcagactttgtgaatttccagaggtgtgggtaatataatagaattcagtgagtgggcatggctgatcttgtgcaaattaaaagttatggggcataagaatagcaaaagttgaacttcttttaaaaaggaaagtaccctgagagccagtattggttgaggctcttcagtatgcccaggttggcagcactgagaaccgcaggaacggcctgttgttacaaaaaggagattgactcagctgcccttggtgcatctgactgactatgactgctgagagattccaaggacccttaatgccagggctaacctctccatgtgcagtgagacctctggaggaagtgtcatcctctggctttgtgtggtactcattatggtgcagtgcgggcatgaaatgaagacacccaaataggcttacagatacgatatgttttaaatgttcgtatttaacaaaaacatactgacactgtttggaaatggcaacaggaagatagcaaaatgaatactaacattacgaaaagatgaacaggtacatgttccaaggcaggtggctgtgaacttcctctgagtgaaggcatcccctccagcacctttcagcctgctagttaggacgacccgccgccaccctccaggacctccagccctgcactgcctttcctctcttttaaataattcttcattgagttctaatatgtaaaaaaaaaaagtttactgtaaagtttgcaaataaggaaattttttttaaaagtcctcagtaatcttaccagtaacaattgttatgggcacatttgcttttggaagatttcttttgtatgcatgggataagtacatttttaaacaaaaatgggattatgccataaattctattttgtgactttaatatatagtgaacaccttttttaatgatgacaggatgttcccttgcatggctgtatcaatttaaacaatcttgtttcaatgggcatacagggtattttctagtttttttttcctcttagaaaataatacttgcgatgactttccttgtagctcagactttttcacgtctgttgttatctctttgggaatgctgaatacatacatttcgagaaggaaatgactgttaaactcttaagacttcaggttcatattgctaaactgcccagcagggagggattttttcaattagtgttctcactggtgaggcaaacctgatgccttcccctcttcctcagaaccggctttatcacattgaaaacctttgctcctccgacggatcgagtctgctttccctgtggatgtgagcattgctttgtctgctggtgactgaacatctctaccatgtgtcaattggccatttgtggtgtgtgtgtgtgtgcgtgtgtgtgtgtgtgtgtgtgtgtatgattttctaattcctagtcatttttctattgattgttttgcaaaagccatttacatcttaaggatattgataatcttttgttatatttgatgcaaatatttttttccagtttataggttgccttttaattttgtgtttcaggtagataaaagttaaacgattttcttaggttagtttatcactgtggtttctgaacttgttatgtgtagatcttttccaccccaagagtacataaatattaatccatactttcttatggaacttgtatggtttcgttttttacatttaaaccttcttccccgtggtgtgtgttgtggaatctgtgtttgtgtgaggaggggcatggtgctctcagaacccacctcctgtggccagagagccctgtcctgtgagggtggttatcacagtggcagggttcaattcagaagaccttgagggcaggctgatgtttcctgaatgggcccctggttgttgcttgtccctgactctccatttccccatctgagtggatttggacctaatagggcactggagctggttcgaatcctgactggactacttggcaactttatgtctgggagcaagttacttaacctccccaagcctgtgtctgtgaaatgcgggtaaatgaatgtagatgtttggcagcagctactccttgttgagctctcacagtgaactctcctgcctctgccctccttccccgcctcccctggtgcctagcgtcaggtctagccacttcctcctgggcccctctcccttttctgtggctggctgcctgcccgcctggcgctggacctttcatgtaacgggaatcagcatgtatattctggtctggtctgtttctacacttaattttgtttccagtagtatttccctgtaccggcagagttcacaaacacatttgaagaggctttttctcaggattcttaaccttcccaaaggaagtcccatggatgggtttctagaagtctataaatgctctgaaattgtatttttctgtggaaagcataactttcatctgcttgttcgtgctcaaaaaagatcatgaatgaatgattgcatgattttatgccattgtgcttatactaaaggatatgtagcccatctcttgagctgttaaactgttttgactactttaaatcgtgcagctgtgagcatctctgtaaatttagtgtacacatgtatcccctggagtggcattgcctcggcagtgagcacttatggttttataactctcttcacagactcaaatgactccagaaagctacacttcctgttgtgagtatatgatatccatttccctacatagccactaacatcaggtttttacaattttatttatttcttgctactttaagaaatttttgtggtgaaatacatataatagaagttgactatctgaatcatttttaagtatacattcagtagtgttaagtatgtcgccattgttgtacaaccaatctccagaactttttcatcttgcaaaacaaactctgtacccattaaataacattaaacattccattccctccagcctcagcaaccccattctactttctgtttctgtgagtttgactattccaagcacttcatatcagttaaatcatgaagtatttgtctgtctgtgactggcttatttctctgagcacagtgtcctcgagatgcgtctatgttgtagcatatgtcagaatttccttcctttttaaaagatccaaataatattcttattttatatcttttttttatccattcatccattagtggacacttgggttgcttttggctattgtaaataatggtgctatgtacaaatatctatattattgtatttacaagtataatgctgtaatgtacacacatctttttgagatcctaccttcagttcttttgagtatatagccagaagtggtattactaaatcttacgatatttctatttttaatttattgaggaaccactgtagtttttcatagcaactgcaccattttacgttctcaccaagagtgcacaagggttccgaggttcccacatcctccccaacacttgttattttctgctttttttagattgcagccatcatagtgggtgtgaggtgacatttcattgtggttttgatttgcatttccctaatgaggagtgatgctgagcatcttttcatatgcttactggtcatttgtatgttgtctttggaaaaatgtctattcaagtcctttgactattttaaaaattgggttattagagttatcgttgttgttgacttgtaggagtttctttctatattctggatattaatcccctatcagatatatgatttgcaaatatcttctcttattccataaggttactttttcactttgttgattgtgttctttgatgtatagaagtttttagttttgaaatagtctaatttatctgtttttacttttgtggtctgtgcttttggtgtcatatccaagaaatccttgccaaatccaacgttataaggtacttttaaggtattttagttgtcttagtctatatttctgtactcacctttctttatccactcatcagttgatgggcatgtaggttggttccatatctttgcaattctgaattgtgctgtgatcaggtgtctttttagtataatgatttactctcctttgggtagatacccagtagtgggattgctggatcgaatggtttttataattttctattttaccacagtttctctctgcatttttcctctttgaccactaaccatgtgaaattctcatattgacctttataatgatcatgaactcttagtatcattgggaaggccacatttgccacttatgattgtaaaccttatcctccatttttcctgttattgttggtgcaaaaagcacctattataccaggactttaaaaatcagtctgataagtctttgataagtctaataataataactgataagtccattgaatttgcttctgattactttttctttagtagctaaacatgtatgtactcctatgattacaatgaacactcctctccatttaaattaattatttacattgatgaaatagcaaaatgttaatgactaaatactgtcttggttttttcgttccaggtcagtcaatattaacttcttataattttcttttttttctttatgtgtgtgtgtgtgtgtatttttttttttttaatttcaatggcttttggggtacaaatggcttttggtcatatagatgaattctacagtagtgaagtctgagattttactgcaccggtcacctgagtagtgtacattgtacccaatatgtggttttttataccttgcccccctcttaccctccccactttgagtctctagtgtccattatgtcactctgtatacctttttgtacccataagttagctctcacttataagtgagaacacacagtatttggttttccattcctgagttgcttcacttagaataatatcctccagctccatccaaaattgctgcaaaaaaaaaaaaaaccacaaacattattttgttcttttttattgctaagtcatattccatggtgtagagataccacattttatttatccactcactggttgatgggttggttccacatctttgcaattgtgacttgtactgccatcaagtgtctttctggtataatgacttcttttcctttgggtagatacccaggagtgggattgctagatcaaatggttcttaacattttctctctggatctatttctggaaattttaggctccagtttttgttgttgttgttaataaaatgcaatggaatgtaatgatcatcacttttcattatgctttaaaatctggtaaatggaggctagaacactcctgtaaggcaagaatattctctctgttggaactcaaatacacagaactgggtaaatctcaatcttaatctttgattcaggacacaacatggctctcttttacttgctttctttaattgttttttaataatgtggtaagcatttctgaatctcctatccaatacaaaaactaggacaatacagacagtaactcctatggttacaatgaacactcctctccacttaaattaattatttacactgatgaaattgaaatagcaaaattttaatgactaaatactgtctttgattttttgttccaggtctgtcaatattaacttcttataattttctttttttttctttatgtgtgtgtgtgtgtgtatatatatatatatttaatttcaatggcttttggggtacaaatggcttttggtcatatatatgagttctacagtagtgaagtctgagattttactacaccttccacttatgtggtcccacaccacccgcctcccctgccgcctcctgccaccccctaggccaaggtaataatcatcctgaatcctgggtttatctctcacttgctttcttttcatataattttgcaaaagaatctgatctaaatgtgtttttcagagtatatatttatattttagctgttcttagagaaaatttattattttgcatgtaatcttatggaacattctcatttaataccatggtaagattcagcccttgcccaggggatagttcatttagtttgtttactggatagagctcatcatgtgactatacctcagttagtttatcagttctcccatccatggtgactaggttgcctctcagcctctcaacaacactgtttctcagtgtccttgtagaagtgatatgtgggtgttttctccttacacagagttgaaaggtgacgacaacaacgttggcactaccaatcccccaccctccagaggggtaaccagtgttaccagtttgctgtgtttcctgctacacctcgccttattcacttccatttgtatctgaaaaacgtgttgcatggtttcttttctatagaagtggtaaaatgctattgtgtcctgtacattattgattactttttttcatttaacagtagggagatgcctgggagtacacagagaactgccctcattgttttcaacttctgcactgtatgtctgtgagtttagccattctgctgttaatggaaatttacagtattctaatcttttgatattacaaacagttctgtgcgatcatcgtcatacacaaccccttgtgcacaatgcatgagtgtttctcagggtaggtaccaagaagtgaaattcctgggtcatagggcgtgagtccgacatttttctccattctgccctgttgccctccagagtgggtgtccagctttgcatacctaagtatgagagtatctgttgttcatatcctctacgacgctccatatatgaaacttaagtttctgctagttgccatctttgatctatcatgtatgcagtgacctactaagactgtaattggtacagtagattcttgtcatctgtgtgtgaatttagcattcatgggcttaatgctgacaaggcccccagggtccaagacatataatcatgtataattttgtcaaggtataattttttaaattgcttttgtcatgtgtctgctggtgatgcccaacccagtgctctgcacccaggtcacactgtggctttgtcctctgcttatgcctgcattgcagcaactgtcctgaagagaccaaaattatgcagatttaggtaagtccatggctaatgttattatattatgtgctattgtaatggatggggctgtggagtgtatgaatttataaatcactggtcttgtaattaaaattcaaacactatagaaaaaggccatgtagaagataaaagttcctctataatcccggacccctaagataactactaatgacaacttcatttatattccttcagacattttctggctgtggatgtactaaaatgtatcctattattctctgccctaaaatggaatcatacaaggtgtactgttatttttatggctctataacatgtcatattgtacgtgttggtatggtcattttaaccatttttctagtgatggctttgaggttatttgcagtttcctagccatctcaaagtgtgctgcggggatctcttttgcatccctctgggtgcagagctgaggcacccagaggcagtgtccagaggaggcagcatctgtaggtgtcttcacctgctctggctcttggcacatctggttggtgacactgttttgtgagatgggttgaaagcacgtgctgccaaaatagaataatgttggtcctctcctcatgtgccgtggaactggggtaaaactgcgtagtggctgcagctgcctgtccataccggaatcgagtataacacggtgcctggcttagcacaaaacagtagtgggtcctgcaggccccagagtctaattcctggtattctttcccctacacagattaaataaaccaaaaacaaactattctaggaaagcgtctgtgacatttgtaaaaagtggtatttaatgatcttttattcacttgtctgtttagtttgttgaaatcttaagtggcatcctggtctgggaaggagtgctgtctgcgcctgccctccgctgggcacagcgtggctgcttcaggggctaagcacacactttctgtcttctaaagggccgccacatgccaggagctcaggtgtgagcccggctctggctcttacctcatagggtcactcataggggcacagggagcagaacattgtacacagcgaggcaccacccggcttggcatctgcctcggtggacttactacctctagaaggaaatacctgagttcctctggcctcagctcctagagtgactggtgtgctgtccctgttactcttctgtcaaggtgacaactgtgtgacccatcatctgtgtgtcaaagcaaggccctgcctgggcctctgctcctgtgctgaccccaaaggcaaatgctttgctagtttccttccagttaatttcacctatgaatagatgtgtgaaaactgttcaaagccatacctgcacatgtttgaacttcaaaccctgtgggtgattcagtggcatctttctctaacccccagcctcccttcccacagaggccaccgtcatggccagttgctgcagtttctttccagagaacctgtgtatgtgtaaagctgtacaggcgtgggtacaccacacagcctgtcttgcactgtggactgttgagttactagtacatctaggtaagcaccgcatatctgtattcatgtctgccttggtcttttcaacatctgtgtggtagccgtgtttgaattacccattccctttttggggaaccattaagttgtttcagcaatttttactgtagataaggctataccgcatatctgtgtacatgggtttttatgtacatgggcaagtatatctgtgagagaaaagtttcctcaggaggaattctgggcacagcatgtgtaaatttctaaatatgatggacacccccagcttccacctcaaggaggttggtcccattgacatttccccacaccttcacccaggctgtgcccttaaacttggttatttgtcaatgtgagaagtggaaaatagtatttaattgtagtttggatttgtatttctattgggttgtatacttactgattaataataagagctctttacatattaaggaaattaacccttttcaaatacattcctatttctcactaatctttaagttttattgtaatattttgctctttagtttatatatatatgtatatatatatatatgtatatatatatatatacatatatatatacatatatatata

SEQ ID NO: 3292 - protein, 137 aa, Homo sapiens
MFGSSYSLLSSHSELSCLCPPSPPPLVPSVRSSHFLLGPSPFSVAGCLPAWRWTFHVTGISMYILVWSVSTLNFVSSSISLYRQSSQTHLKRLFLRILNLPKGSPMDGFLEVYKCSEIVFFCGKHNFHLLVRAQKRS

SEQ ID NO: 3293 - DNA, 2755 bp, Homo sapiens
agcccccccatccccgcccctctcccgcccctcccttgtccccgccccttcccgccccaactcaggttctgccccaccccgccccaattcacgtcctgctccgccccgacgtaggccccgccctggcccccgggccccgcccccgtctgacgcaggccccgccccctctccgccccgccccggctcgggcggccggaggacccggagctaaggcgcccgaacccgcggcggcggtggggacgatgtggttctttgcccgggacccggtccgggactttccgttcgagctcatcccggagcccccagagggcggcctgcccgggccctgggccctgcaccgcggccgcaagaaggccacaggcagccccgtgtccatcttcgtctatgatgtgaagcctggcgcggaagagcagacccaggtggccaaagctgccttcaagcgcttcaaaactctacggcaccccaacatcctggcttacatcgatggactggagacagaaaaatgcctccacgtcgtgacagaggctgtgaccccgttgggaatatacctcaaggcgagagtggaggctggtggcctgaaggagctggagatctcctgggggctacaccagatcgtgaaagccctcagcttcctggtcaacgactgcagcctcatccacaacaatgtctgcatggccgccgtgttcgtggaccgagctggcgagtggaagcttgggggcctggactacatgtattcggcccagggcaacggtgggggacctccccgcaaggggatccccgagcttgagcagtatgaccccccggagttggctgacagcagtggcagagtggtcagagagaagtggtcagcagacatgtggcgcttgggctgcctcatttgggaagtcttcaatgggcccctacctcgggcagcagccctacgcaaccctgggaagatccccaaaacgctggtgccccattactgtgagctggtgggagcaaaccccaaggtgcgtcccaacccagcccgcttcctgcagaactgccgggcacctggtggcttcatgagcaaccgctttgtagaaaccaacctcttcctggaggagattcagatcaaagagccagccgagaagcaaaaattcttccaggagctgagcaagagcctggacgcattccctgaggatttctgtcggcacaaggtgctgccccagctgctgaccgccttcgagttcggcaatgctggggccgttgtcctcacgcccctcttcaaggtgggcaagttcctgagcgctgaggagtatcagcagaagatcatccctgtggtggtcaagatgttctcatccactgaccgggccatgcgcatccgcctcctgcagcagatggagcagttcatccagtaccttgacgagccaacagtcaacacccagatcttcccccacgtcgtacatggcttcctggacaccaaccctgccatccgggagcagacggtcaagtccatgctgctcctggccccaaagctgaacgaggccaacctcaatgtggagctgatgaagcactttgcacggctacaggccaaggatgaacagggccccatccgctgcaacaccacagtctgcctgggcaaaatcggctcctacctcagtgctagcaccagacacagggtccttacctctgccttcagccgagccactagggacccgtttgcaccgtcccgggttgcgggtgtcctgggctttgctgccacccacaacctctactcaatgaacgactgtgcccagaagatcctgcctgtgctctgcggtctcactgtagatcctgagaaatccgtgcgagaccaggccttcaaggccattcggagcttcctgtccaaattggagtctgtgtcggaggacccgacccagctggaggaagtggagaaggatgtccatgcagcctccagccctggcatgggaggagccgcagctagctgggcaggctgggccgtgaccggggtctcctcactcacctccaagctgatccgttcgcacccaaccactgccccaacagaaaccaacattccccaaagacccacgcctgaaggccactgggagacgcaggaggaggacaaggacacagcagaggacagcagcactgctgacagatgggacgacgaagactggggcagcctggagcaggaggccgagtctgtgctggcccagcaggacgactggagcaccgggggccaagtgagccgtgctagtcaggtcagcaactccgaccacaaatcctccaaatccccagagtccgactggagcagctgggaagctgagggctcctgggaacagggctggcaggagccaagctcccaggagccacctcctgacggtacacggctggccagcgagtataactggggtggcccagagtccagcgacaagggcgaccccttcgctaccctgtctgcacgtcccagcacccagccgaggccagactcttggggtgaggacaactgggagggcctcgagactgacagtcgacaggtcaaggctgagctggcccggaagaagcgcgaggagcggcggcgggagatggaggccaaacgcgccgagaggaaggtggccaagggccccatgaagctgggagcccggaagctggactgaaccgtggcggtggcccttcccggctgcggagagcccgccccacagatgtatttattgtacaaaccatgtgagcccggccggcccagccaggccatctcacgtgtacataatcagagccacaataaattctatttcac

SEQ ID NO: 3294 - DNA, 2470 bp, Homo sapiens
cagagactgatgagtgccgactgaaccagaacatctgtggccacggagagtgcgtgccgggcccccctgactactcctgccactgcaaccccggctaccggtcacatccccagcaccgctactgcgtggatgtgaacgagtgcgaggcagagccctgtggcccggggaggggcatctgcatgaacaccggcggctcctacaattgccactgcaaccgcggctaccgcctgcacgtgggcgccggggggcgctcgtgcgtggacctgaacgaatgcgccaagccccacctgtgcggcgacggcggcttctgcatcaactttcccggtcactacaagtgcaactgctaccccggctaccggctcaaagcctcccggcctcctgtgtgcgaagacatcgacgagtgccgggacccaagctcttgcccggatggcaaatgcgagaacaagcccgggagcttcaagtgcatcgcctgtcagcctggctaccgcagccaggggggcggggcctgtcgcgacgtgaacgagtgcgccgagggcagcccctgctcgcctggctggtgcgagaacctcccgggctccttccgctgcacctgtgcccagggctacgcgcccgcgcccgacggccgcagttgcttggatgtggacgagtgtgaggctggggacgtgtgtgacaatggcatctgcagcaacacgccaggatctttccagtgtcagtgcctctctggctaccatctgtccagggaccggagccactgcgaggacattgatgagtgtgacttccctgcagcctgcattgggggtgactgcatcaataccaatggctcctacagatgtctttgcccccaggggcatcggctggtgggtggcaggaaatgccaagacatagatgagtgcagccaggacccgagcctgtgccttccccatggggcctgcaagaaccttcagggctcctatgtgtgtgtctgcgatgagggcttcactcccacccaggaccagcacggttgtgaggaggtggagcagccccaccacaagaaggagtgctacctgaacttcgatgacacagtgttctgcgacagcgtattggccaccaacgtgacccagcaggagtgctgctgctctctgggggccggctggggcgaccactgcgaaatctacccctgcccagtctacagctcagccgagttccacagcctctgcccagacggaaagggctacacccaggacaacaacatcgtcaactacggcatcccagcccaccgtgacatcgacgagtgcatgttgttcgggtcggagatttgcaaggagggcaagtgcgtgaacacgcagcctggctacgagtgctactgcaagcagggcttctactacgacgggaacctgctggaatgcgtggacgtggacgagtgcctggacgagtccaactgccggaacggagtgtgtgagaacacgcgcggcggctaccgctgtgcctgcacgccccctgccgagtacagtcccgcgcagcgccagtgcctgagcccggaagagatggacgtggacgagtgccaggacccggcagcctgccgccctggccgctgcgtcaacctgccgggctcctaccgctgcgagtgtcgcccgccctgggtgcccgggccctccggccgcgattgccagctccccgagagcccggccgagcgtgccccggagcggcgcgacgtgtgctggagccagcgcggagaggacggcatgtgcgctggccccctggccgggcctgccctcaccttcgacgactgctgctgccgccagggccgcggctggggcgcccaatgccgaccgtgcccgccgcgcggcgcggggtcccattgcccgacatcgcagagcgagagcaattccttctgggacacaagccccctgctgttggggaagcccccaagagatgaggacagttcagaggaggattcagacgagtgtcgctgcgtgagtggccgctgcgtgccgcggccgggcggcgccgtgtgcgagtgtcccggcggcttccagctcgacgcctcccgcgcccgctgcgtggatatcgacgagtgccgagagctgaaccagcgcgggctgctgtgcaagagcgagcgctgcgtgaacaccagcggctccttccgctgcgtctgcaaagccggcttcgcgcgcagccgcccgcacggggcctgcgttccccagcgccgccgctgacgccgccgacgccgccctcggcccagacctcggtgatcactgagggatttccgcgagctcggcctcacttctgccccgacttgtggctcggacccagggaccttcagggcccgcagaccctcccggcgccttgagacccgaggcgcccctaccggcccccctccccggttagcgggcggttgtaaggtctccggcgggcgctgcctgccttcctcccagagggtgtttcctagaaactgataaatcagatcgtgcctctttacccttggctttcg

SEQ ID NO: 3295 - DNA, 2839 bp, Homo sapiens
ctcccaaagcagaattgcagctgccgccgccgccacctccaggccactatggcgcctggggctgcccaggagcttcaggccaagttggcagagatcggagctccgatccagggtaatcgcgaggagctggtggagcggctgcagagctacacccgccagactggcatcgtgctgaatcggccggttttgagaggggaagatggggacaaagccgctccacctcccatgtcggcacagctccctggaattcccatgccaccaccacctttgggactcccccctctgcagcctcctccgccacccccaccacctccaccaggccttggccttggctttcctatggcccacccaccaaatttggggcccccgcctcctctccgtgtgggtgagccagtggcactgtcagaggaggagcggctgaagttggctcagcagcaggcggcattgctgatgcagcaggaggagcgtgccaagcagcagggagatcattcgctgaaggaacatgagctcttggagcagcagaagcgggcagctgtgttactggagcaggaacgacagcaggagattgccaagatgggcaccccagtccctcggcccccacaagacatgggccagattggtgtgcgcactcctctgggtcctcgagtagctgctccagtgggcccagtgggccccactcctacagttttgcccatgggagcccctgttccccggcctcgtggtcccccaccgccccctggagatgagaacagagagatggatgacccctctgtgggccccaagatcccccaggctttggagaagatcctgcagctgaaggagagccgccaggaagagatgaattctcagcaggaggaagaggaaatggaaacagatgctcgctcgtccctgggccagtcagcgtcagagactgaggaggacacagtgtccgtatctaaaaaggagaaaaaccggaagcgtaggaaccgaaagaagaagaaaaagccccagcgggtgcgaggggtgtcctctgagagctctggggaccgggagaaagactcaacccggtcccgtggctctgattccccagcagctgatgttgagattgagtatgtgactgaagaacctgaaatttacgagcccaactttatcttctttaagaggatctttgaggcttttaagctcactgatgatgtgaagaaggagaaagagaaagagccagagaaacttgacaaactggagaactctgcagcccccaagaagaagggatttgaagaggagcacaaggacagtgatgatgacagcagtgatgacgagcaggaaaagaagccagaagcccccaagctgtccaagaagaagttgcgccgaatgaaccgcttcactgtggctgaactcaagcagctggtggctcggcccgatgtcgtggagatgcacgatgtgacagcgcaggaccctaagctcttggttcacctcaaggccactcggaactctgtgcctgtgccacgccactggtgttttaagcgcaaatacctgcagggcaaacggggcattgagaagccccccttcgagctgccagacttcatcaaacgcacaggcatccaggagatgcgagaggccctgcaggagaaggaagaacagaagaccatgaagtcaaaaatgcgagagaaagttcggcctaagatgggcaaaattgacatcgactaccagaaactgcatgatgccttcttcaagtggcagaccaagccaaagctgaccatccatggggacctgtactatgaggggaaggagttcgagacacgactgaaggagaagaagccaggagatctgtctgatgagctaaggatttccttggggatgccagtaggaccaaatgcccacaaggtccctcccccatggctgattgccatgcagcgatatggaccacccccatcgtatcccaacctgaaaatccctgggctgaactcgcccatccctgagagctgttcctttgggtaccatgctggtggctggggcaaacctccagtggatgagactgggaaaccgctctatggggacgtgtttggaaccaatgctgctgaatttcagaccaagactgaggaagaagagattgatcggaccccttggggggaactggaaccatctgatgaagaatcctcagaagaagaggaagaggaagaaagtgatgaagacaaaccagatgagacaggctttattacccctgcagacagtggccttatcactcctggaggcttttcatcagtgcctgctggaatggagacccctgaactcattgagctgaggaagaagaagattgaggaggcgatggacggaagtgagacacctcagctcttcactgtgttgccagagaagagaacagccactgttggaggggccatgatgggatcaacccacatttatgacatgtccacggttatgagccggaagggcccggctcctgagctgcaaggtgtggaagtggcgctggcgcctgaagagttggagctggatcctatggccatgacccagaagtatgaggagcatgtgcgggagcagcaggctcaagtagagaaggaggacttcagtgacatggtggctgagcacgctgccaaacagaagcaaaaaaaacggaaagctcagccccaggacagccgtgggggcagcaagaaatataaggagttcaagttttaggtcccctcacactagccctttttttggccctacgtctggatgcctgggcttcacacaagaaccacctctcccgcagttcccaaggacttgtcatttcatgttcttattttagacctgttttgtaaataaagctgtttcccaaggaaagagatgaaaaaaaaaaaaaaaaaaa

SEQ ID NO: 3296 - protein, 872 aa, Homo sapiens
MAPGAAQELQAKLAEIGAPIQGNREELVERLQSYTRQTGIVLNRPVLRGEDGDKAAPPPMSAQLPGIPMPPPPLGLPPLQPPPPPPPPPPGLGLGFPMAHPPNLGPPPPLRVGEPVALSEEERLKLAQQQAALLMQQEERAKQQGDHSLKEHELLEQQKRAAVLLEQERQQEIAKMGTPVPRPPQDMGQIGVRTPLGPRVAAPVGPVGPTPTVLPMGAPVPRPRGPPPPPGDENREMDDPSVGPKIPQALEKILQLKESRQEEMNSQQEEEEMETDARSSLGQSASETEEDTVSVSKKEKNRKRRNRKKKKKPQRVRGVSSESSGDREKDSTRSRGSDSPAADVEIEYVTEEPEIYEPNFIFFKRIFEAFKLTDDVKKEKEKEPEKLDKLENSAAPKKKGFEEEHKDSDDDSSDDEQEKKPEAPKLSKKKLRRMNRFTVAELKQLVARPDVVEMHDVTAQDPKLLVHLKATRNSVPVPRHWCFKRKYLQGKRGIEKPPFELPDFIKRTGIQEMREALQEKEEQKTMKSKMREKVRPKMGKIDIDYQKLHDAFFKWQTKPKLTIHGDLYYEGKEFETRLKEKKPGDLSDELRISLGMPVGPNAHKVPPPWLIAMQRYGPPPSYPNLKIPGLNSPIPESCSFGYHAGGWGKPPVDETGKPLYGDVFGTNAAEFQTKTEEEEIDRTPWGELEPSDEESSEEEEEEESDEDKPDETGFITPADSGLITPGGFSSVPAGMETPELIELRKKKIEEAMDGSETPQLFTVLPEKRTATVGGAMMGSTHIYDMSTVMSRKGPAPELQGVEVALAPEELELDPMAMTQKYEEHVREQQAQVEKEDFSDMVAEHAAKQKQKKRKAQPQDSRGGSKKYKEFKF

SEQ ID NO: 3297 - DNA, 737 bp, Mus musculus
ggagtttcgccgccgcagtcttcgccaccatgccgccctacaccgtggtctatttcccagttcgaggccgctgcgcggccctgcgcatgctgctggcagatcagggccagagctggaaggaggaggtggtgaccgtggagacgtggcaggagggctcactcaaagcctcctgcctatacgggcagctccccaagttccaggacggagacctcaccctgtaccagtccaataccatcctgcgtcacctgggccgcacccttgggctctatgggaaggaccagcaggaggcagccctggtggacatggtgaatgacggcgtggaggacctccgctgcaaatacatctccctcatctacaccaactatgaggcgggcaaggatgactatgtgaaggcactgcccgggcaactgaagccttttgagaccctgctgtcccagaaccagggaggcaagaccttcattgtgggagaccagatctccttcgctgactacaacctgctggacttgctgctgatccatgaggtcctagcccctggctgcctggatgcgttccccctgctctcagcatatgtggggcgcctcagcgcccggcccaagctcaaggccttcctggcctcccctgagtacgtgaacctccccatcaatggcaacgggaaacagtgagggttggggggactctgagcgggaggcagagtttgccttcctttctccaggaccaataaaatttctaagagagct

SEQ ID NO: 3298 - protein, 210 aa, Mus musculus
MPPYTVVYFPVRGRCAALRMLLADQGQSWKEEVVTVETWQEGSLKASCLYGQLPKFQDGDLTLYQSNTILRHLGRTLGLYGKDQQEAALVDMVNDGVEDLRCKYISLIYTNYEAGKDDYVKALPGQLKPFETLLSQNQGGKTFIVGDQISFADYNLLDLLLIHEVLAPGCLDAFPLLSAYVGRLSARPKLKAFLASPEYVNLPINGNGKQ

SEQ ID NO: 3299 - DNA, 1566 bp, Homo sapiens
atcgcgccagttcctcagcctcagtgctatgaaggtgacagcgtgaggtgacccatctggcccgccgcgatgctggcaacacggcggctgctcggctggtcgcttcccgcgcgggtatctgtgcgtttcagcggcgacacgacagcacccaagaaaacctcatttggctcgctgaaggatgaagaccggattttcaccaacctgtacggccgccatgactggaggctgaaaggttccctgagtcgaggtgactggtacaagacaaaggagatcctgctgaaggggcccgactggatcctgggcgagatcaagacatcgggtttgaggggccgtggaggcgctggcttccccactggcctcaagtggagcttcatgaataagccctcagatggcaggcccaagtatctggtggtgaacgcagacgagggggagccgggcacctgcaaggaccgggagatcttacgccatgatcctcacaagctgctggaaggctgcctggtggggggccgggccatgggcgcccgcgctgcctatatctacatccgaggggaattctacaatgaggcctccaatctgcaggtggccatccgagaggcctatgaggcaggtctgattggcaagaatgcttgtggctctggctatgattttgacgtgtttgtggtgcgcggggctggggcctacatctgtggagaggagacagcgctcatcgagtccattgagggcaagcagggcaagccccgcctgaagccccccttccccgcagacgtgggagtgtttggctgccccacaactgtggccaacgtggagacagtggcagtgtcccccacaatctgccgccgtggaggtacctggtttgctggctttggcagagaacgcaactcaggcaccaaactattcaacatctctggccatgtcaaccacccttgcactgtggaggaggagatgtctgtgcccttgaaagaactgattgagaagcatgctgggggtgtcacgggcggctgggacaacctccttgctgtgatccctggcggctcgtctaccccactgatccccaagtctgtgtgtgagacggtgctgatggacttcgatgcgctggtgcaggcacagacaggcctgggcacagctgcggtgatcgtcatggaccgctcgacggacatcgtgaaagccatcgcccgcctcattgagttctataagcacgagagctgtggccagtgtaccccatgccgtgagggtgtggactggatgaacaaggtgatggcacgtttcgtgaggggggatgcccggccggccgagatcgactccctgtgggagatcagcaagcagatagaaggccatacgatttgtgctctgggtgacggggccgcctggcctgtgcagggtctgatccgccactttcggccggagctcgaggagcggatgcagcggtttgcccagcagcatcaggcccggcaggctgcctcttagcccaccaccctggcctgctgtcctgcgtctatccatgtggaatgctggacaataaagcgagtgctgcccaccctccaaaaaaaaaaaaaaaaaaaaaaaaaa

SEQ ID NO: 3300 - protein, 464 aa, Homo sapiens
MLATRRLLGWSLPARVSVRFSGDTTAPKKTSFGSLKDEDRIFTNLYGRHDWRLKGSLSRGDWYKTKEILLKGPDWILGEIKTSGLRGRGGAGFPTGLKWSFMNKPSDGRPKYLVVNADEGEPGTCKDREILRHDPHKLLEGCLVGGRAMGARAAYIYIRGEFYNEASNLQVAIREAYEAGLIGKNACGSGYDFDVFVVRGAGAYICGEETALIESIEGKQGKPRLKPPFPADVGVFGCPTTVANVETVAVSPTICRRGGTWFAGFGRERNSGTKLFNISGHVNHPCTVEEEMSVPLKELIEKHAGGVTGGWDNLLAVIPGGSSTPLIPKSVCETVLMDFDALVQAQTGLGTAAVIVMDRSTDIVKAIARLIEFYKHESCGQCTPCREGVDWMNKVMARFVRGDARPAEIDSLWEISKQIEGHTICALGDGAAWPVQGLIRHFRPELEERMQRFAQQHQARQAAS

SEQ ID NO: 3301 - DNA, 1406 bp, Homo sapiens
ggcacgagggcgcgcaaggcaccggtggcagcggcgacggcagctgcgacagcaacccctgctgggccgaaactgggcagagcggagcagacgtctgaagcagcgcgagtgaggcgcgagggtagcgcccgcgcccgggaagacccctcggcgcgaaccggcagcccagccccgggtcccggttcccaaggccccgcctctagggcctggggactaatcggattgagagcgcgccggcccgggccgcgaactcgccaattgcggagggcggtggccaccgcccaatccggagcagacaggtgcgaggtccggaaggcggaggccaatcggcggcggttgcgacctgctggggcaggtctcggccaataaggaggctcgagtgacatcttcgcgcaccaatcgggagtgagggagcattcgtgcccgctcgcccttccggccagacctctatttaccaggggcgtgcagcccgcttgccaatcagagcgcggctgagcggccccgcagccaacccccgaggagcggccggctggcgtccgccgcgcccaggagttggggatgtcctacaaacccatcgcccctgctcccagcagcacccctggctccagcacccctgggccgggcaccccggtccctacaggaagcgtcccgtcgccgtcgggctcagtgccaggagccggcgctcctttcagaccgctgtttaacgactttggaccgccttccatgggctacgtgcaggcgatgaagccacccggcgcccagggctcccagagcacctacacggacctgctgtcagtcatagaggagatgggcaaagagatccggcctacctatgctggcagcaagagcgccatggagcgcctgaagagaggtatcatccatgcccgggccctagtcagagagtgcctggcagagacagagcggaacgcccgcacgtaacaggaagcgcctcggcctcagcgtctggacctatccggccactgcagagcacccgcttctccctggccttcatcccgagttgcactaaccatcctgggcttcctgtcctgtgtcccttggtgggtcccctccaggaaccaaggagtggccctccaggtggcagcactaaggacacccccccacaacaagagttagcagcgaggtccccatgagtcccacccatgacctgccgacagtgttgcccaccggaacttttgtggcccctaccgctcagcccttcccagcacttctcccactttgtcccgagcctccttctcccccagcaggggcacaggcctggcacctccctgccttgtgtcctgagccatagtgactcttttatctgtgtgtcttttgctaaatatgccctttttatattaataaaagatgatttggagttgtgctctcaaaaaaaaaaaaaaaaaaaa

SEQ ID NO: 3302 - protein, 126 aa, Homo sapiens
MSYKPIAPAPSSTPGSSTPGPGTPVPTGSVPSPSGSVPGAGAPFRPLFNDFGPPSMGYVQAMKPPGAQGSQSTYTDLLSVIEEMGKEIRPTYAGSKSAMERLKRGIIHARALVRECLAETERNART

SEQ ID NO: 3303 - DNA, 3580 bp, Homo sapiens
cgcgggcggcggtgctaggctcgcctctgcctccctcgtggcgggcccggacatggggtcccgtggcctgagtccctcggccggcgcgcagggctcgggccgcgcgcagcctccccgcactgactgtcgcgccgtgccctgcgccaggaggagcggaggccgcgcgcccgccgagcgccttcaggatgctcatcaaggaataccacattctgctgcccatgagcctggacgagtaccaggtggcccagctctacatgatccagaaaaagagccgggaggagtctagtggtgagggcagcggcgtggagatcctggccaaccggccctacacggatgggcccgggggcagcgggcaatacacacacaaggtgtaccacgtgggctcccacatcccaggctggttccggcactgctgcccaaggctgccctgcaggtagaagaggaatcctggaatgcctacccctacacccgaacccggtacacctgccctttcgtggagaaattctccattgaaattgagacctattacctgcctgatggggggcagcagccaaacgtcttcaacctgagcggggccgagaggagacagcgcatcctggacaccatcgacatcgtgcgggatgcagtggccccaggcgagtacaaagcagaagaggacccccggctttatcactcggtcaagacgggccgagggccactgtctgatgactgggcacggacggcggcacagacggggccccttatgtgtgcctataagctgtgcaaggttgagttccgctactggggcatgcaagccaagatcgagcagttcatccatgatgtaggtactgcgtcgggtgatgctgcggcccaccgccaggcctggtgctggcaggatgagtggacagagctgagcatggctgacatccgggcactggaagaggagactgctcgcatgctggcccagcgcatggccaagtgcaacacaggcagtgagggtccgagcccagccccccgggaaaccgagcaccgaggcccggtctgcggcagcaacactggcacccccgatgggcctgagcccccccaggcccagatgcctcccccgatgccagctttgggaagcagtggtcctcatcctcccgttcctcctactcatcccaacatggaggggctgtgtctccccagagcttgtctgagtggcgcatgcagaacattgcccgagactctgagaacagctccgaggaagagttctttgatgcccacgaaggcttctcggacagtgaggaggtcttccccaaggagatgaccaagtggaactccaatgacttcattgatgcctttgcctccccagtggaggcagagggaacgccagagcctggagccgaggcagctaaaggcattgaggatggggcccaagcacccagggactcagagggcctggatggagccggggagctgggggctgaggcatgcgcagtccacgccctcttccttatcctgcacagcggcaacatcctggactcaggccctggagacgccaactccaagcaggcggatgtgcagacgctgagctccgccttcgaggccgtcacccgcatccacttccctgaggccttgggccacgtggcgctgcgactggtgccctgtccacccatctgcgccgccgcctatgcccttgtctccaacctgagcccttacagccacgatggggacagcctgtctcgctcccaagaccacattccactggctgccctgccactgctggccacctcatcctcccgctaccagggcgccgtggccaccgtcattgcccgcaccaaccaggcctactcagccttcctgcgctcacctgagggtgccggcttctgtgggcaggtcgcactgattggagatggtgttggtggcatcctgggctttgatgcactctgccacagtgctaacgcgggcaccgggagtcggggcagcagccgccgtgggagcatgaacaatgagctgctctctccggagtttggcccagtgcgggaccccctggcagatggtgtggaaggcctgggtcggggcagcccagaaccctcggccttgcctccccagcgcatccccagcgacatggccagtcctgagcccgagggctctcagaacagccttcaggcagcccccgcaaccacctcctcctgggagccccggcgggcaagcacggccttctgcccacccgctgccagttccgaggcacctgacggccccagcagcactgcccgccttgacttcaaggtctctggcttcttcctcttcggctccccactgggcctggtgctggctctgcgcaaaactgtgatgcccgccctggaggcagcccagatgcgcccagcctgtgaacagatctacaacctcttccacgcggctgacccctgcgcctcacgcctcgagcccctgctggccccgaagttccaggccatcgccccactgaccgtgccccgctaccagaagttccccctgggagatggctcatccctgctgctggccgacactctgcagacgcactccagcctctttctggaggagctggagatgctggtgccctcaacacccacctctactagcggtgccttctggaagggcagtgagttggccactgaccccccggcccagccagccgcccccagcaccaccagtgaggtggttaagatcctggagcgctggtgggggaccaagcggatcgactactcgctgtactgccccgaggcgctcaccgcctttcccaccgtcacgctgccccacctcttccacgccagctactgggagtccgccgacgtggtggcgttcatcctgcgccaggtgatcgagaaggagcaggccacagctggcggaatgcgaggagccgtccatctacagcccggccttccccaggcagaagtggcagcgaaaacgcacgcaggtcaagatccgggtagaactgaacatcgtggccggttatgggtctcccaaagatgtggctgtatacgcggcgctggggctgtccccgagccagacctacatcgtgggccgtgccgtgcggaagctacaggcgcagtgccagttcctgtcagacggctatgtggcccacctgggccagctggaagcgggctcgcactcgcatgcctcctcgggacccccgagagctgccttgggcaagagcagctatggtgtggctgcccccgtggacttcctgcgcaaacagagccagctgcttcgctcgaggggccccagccaggcggagcgtgagggcccgggaacaccacccaccaccctggcacggggcaaagcacggagcatcagcctgaagctggacagcgaggagtgaggcccacaccagcctggacctgggttatttattgacacacccaaggggcccgaggggctgcgtgtgggaggctggggacccagacttttggccccagcgctggcccccccagccccacaccctatatctccgtgtgctcctcggtgttacttccctttcatatgaggggacccagcgccggggggagggaggagggcgtgggcatgggcgcagaggcttttccagtgtgtataaatccatgaaaataaacgccacctgcacccc

SEQ ID NO: 3304 - DNA, 2700 bp, Homo sapiens
gcggcgcctagtcccgggctggcgggagtgcagttctgagtcccgcccggcgtgcgcggagcggggcagccagcagcggaggcgcggcgcgcagcacacccggggaccatgggctccatgttccggagcgaggaggtggccctggtccagctctttctgcccacagcggctgcctacacctgcgtgagtcggctgggcgagctgggcctcgtggagttcagagacctcaacgcctcggtgagcgccttccagagacgctttgtggttgatgttcggcgctgtgaggagctggagaagaccttcaccttcctgcaggaggaggtgcggcgggctgggctggtcctgcccccgccaaaggggaggctgccggcacccccaccccgggacctgctgcgcatccaggaggagacggagcgcctggcccaggagctgcgggatgtgcggggcaaccagcaggccctgcgggcccagctgcaccagctgcagctccacgccgccgtgctacgccagggccatgaacctcagctggcagccgcccacacagatggggcctcagagaggacgcccctgctccaggcccccggggggccgcaccaggacctgagggtcaactttgtggcaggtgccgtggagccccacaaggcccctgccctagagcgcctgctctggagggcctgccgcggcttcctcattgccagcttcagggagctggagcagccgctggagcaccccgtgacgggcgagccagccacgtggatgaccttcctcatctcctactggggtgagcagatcggacagaagatccgcaagatcacggactgcttccactgccacgtcttcccgtttctgcagcaggaggaggcccgcctcggggccctgcagcagctgcaacagcagagccaggagctgcaggaggtcctcggggagacagagcggttcctgagccaggtgctaggccgggtgctgcagctgctgccgccagggcaggtgcaggtccacaagatgaaggccgtgtacctggccctgaaccagtgcagcgtgagcaccacgcacaagtgcctcattgccgaggcctggtgctctgtgcgagacctgcccgccctgcaggaggccctgcgggacagctcgatggaggagggagtgagtgccgtggctcaccgcatcccctgccgggacatgccccccacactcatccgcaccaaccgcttcacggccagcttccagggcatcgtggatgcctacggcgtgggccgctaccaggaggtcaaccccgctccctacaccatcatcaccttccccttcctgtttgctgtgatgttcggggatgtgggccacgggctgctcatgttcctcttcgccctggccatggtccttgcggagaaccgaccggctgtgaaggccgcgcagaacgagatctggcagactttcttcaggggccgctacctgctcctgcttatgggcctgttctccatctacaccggcttcatctacaacgagtgcttcagtcgcgccaccagcatcttcccctcgggctggagtgtggccgccatggccaaccagtctggctggagtgatgcattcctggcccagcacacgatgcttaccctggatcccaacgtcaccggtgtcttcctgggaccctacccctttggcatcgatcctatttggagcctggctgccaaccacttgagcttcctcaactccttcaagatgaagatgtccgtcatcctgggcgtcgtgcacatggcctttggggtggtcctcggagtcttcaaccacgtgcactttggccagaggcaccggctgctgctggagacgctgccggagctcaccttcctgctgggactcttcggttacctcgtgttcctagtcatctacaagtggctgtgtgtctgggctgccagggccgcctcggcccccagcatcctcatccacttcatcaacatgttcctcttctcccacagccccagcaacaggctgctctacccccggcaggaggtggtccaggccacgctggtggtcctggccttggccatggtgcccatcctgctgcttggcacacccctgcacctgctgcaccgccaccgccgccgcctgcggaggaggcccgctgaccgacaggaggaaaacaaggccgggttgctggacctgcctgacgcatctgtgaatggctggagctccgatgaggaaaaggcagggggcctggatgatgaagaggaggccgagctcgtcccctccgaggtgctcatgcaccaggccatccacaccatcgagttctgcctgggctgcgtctccaacaccgcctcctacctgcgcctgtgggccctgagcctggcccacgcccagctgtccgaggttctgtgggccatggtgatgcgcataggcctgggcctgggccgggaggtgggcgtggcggctgtggtgctggtccccatctttgccgcctttgccgtgatgaccgtggctatcctgctggtgatggagggactctcagccttcctgcacgccctgcggctgcactgggtggaattccagaacaagttctactcaggcacgggctacaagctgagtcccttcaccttcgctgccacagatgactagggcccactgcaggtcctgccagacctccttcctgacctctgaggcaggagaggaataaagacggtccgccctggcagtgaaaaaaaaaaaaaaaaaaaa

SEQ ID NO: 3305 - protein, 830 aa, Homo sapiens
MGSMFRSEEVALVQLFLPTAAAYTCVSRLGELGLVEFRDLNASVSAFQRRFVVDVRRCEELEKTFTFLQEEVRRAGLVLPPPKGRLPAPPPRDLLRIQEETERLAQELRDVRGNQQALRAQLHQLQLHAAVLRQGHEPQLAAAHTDGASERTPLLQAPGGPHQDLRVNFVAGAVEPHKAPALERLLWRACRGFLIASFRELEQPLEHPVTGEPATWMTFLISYWGEQIGQKIRKITDCFHCHVFPFLQQEEARLGALQQLQQQSQELQEVLGETERFLSQVLGRVLQLLPPGQVQVHKMKAVYLALNQCSVSTTHKCLIAEAWCSVRDLPALQEALRDSSMEEGVSAVAHRIPCRDMPPTLIRTNRFTASFQGIVDAYGVGRYQEVNPAPYTIITFPFLFAVMFGDVGHGLLMFLFALAMVLAENRPAVKAAQNEIWQTFFRGRYLLLLMGLFSIYTGFIYNECFSRATSIFPSGWSVAAMANQSGWSDAFLAQHTMLTLDPNVTGVFLGPYPFGIDPIWSLAANHLSFLNSFKMKMSVILGVVHMAFGVVLGVFNHVHFGQRHRLLLETLPELTFLLGLFGYLVFLVIYKWLCVWAARAASAPSILIHFINMFLFSHSPSNRLLYPRQEVVQATLVVLALAMVPILLLGTPLHLLHRHRRRLRRRPADRQEENKAGLLDLPDASVNGWSSDEEKAGGLDDEEEAELVPSEVLMHQAIHTIEFCLGCVSNTASYLRLWALSLAHAQLSEVLWAMVMRIGLGLGREVGVAAVVLVPIFAAFAVMTVAILLVMEGLSAFLHALRLHWVEFQNKFYSGTGYKLSPFTFAATDD

SEQ ID NO: 3306 - DNA, 2480 bp, Homo sapiens
ggacgcccctgctccaggcccccggggggccgcaccaggacctgagggtcaagtgagtgagggatgacctcatgccctttctggccagcccagaacccctggccagtcgctgggctgggccaggctgagctccgactccttgtccagtgctctccccaggctggccccgcctcctccttcaggcccggaacttcccacagtcccaagccctagccctagggggttctcctcttctggtcctgcccgggaggcctcctgccttcccctgtgggcagggccagtgtgcccaattgcccgattgcccgtgctgggcagggtcctgcccggggggcctggtgggggaggcagggcaggaggttggagcagccctgcccagccccgtggccgccagctttgtggcaggtgccgtggagccccacaaggcccctgccctagagcgcctgctctggagggcctgccgcggcttcctcattgccagcttcagggagctggagcagccgctggagcaccccgtgacgggcgagccagccacgtggatgaccttcctcatctcctactggggtgagcagatcggacagaagatccgcaagatcacggactgcttccactgccacgtcttcccgtttctgcagcaggaggaggcccgcctcggggccctgcagcagctgcaacagcagagccaggagctgcaggaggtcctcggggagacagagcggttcctgagccaggtgctaggccgggtgctgcagctgctgccgccagggcaggtgcaggtccacaagatgaaggccgtgtacctggccctgaaccagtgcagcgtgagcaccacgcacaagtgcctcattgccgaggcctggtgctctgtgcgagacctgcccgccctgcaggaggccctgcgggacagctcgatggaggagggagtgagtgccgtggctcaccgcatcccctgccgggacatgccccccacactcatccgcaccaaccgcttcacggccagcttccagggcatcgtggatgcctacggcgtgggccgctaccaggaggtcaaccccgctccctacaccatcatcaccttccccttcctgtttgctgtgatgttcggggatgtgggccacgggctgctcatgttcctcttcgccctggccatggtccttgcggagaaccgaccggctgtgaaggccgcgcagaacgagatctggcagactttcttcaggggccgctacctgctcctgcttatgggcctgttctccatctacaccggcttcatctacaacgagtgcttcagtcgcgccaccagcatcttcccctcgggctggagtgtggccgccatggccaaccagtctggctggagtgatgcattcctggcccagcacacgatgcttaccctggatcccaacgtcaccggtgtcttcctgggaccctacccctttggcatcgatcctatttggagcctggctgccaaccacttgagcttcctcaactccttcaagatgaagatgtccgtcatcctgggcgtcgtgcacatggcctttggggtggtcctcggagtcttcaaccacgtgcactttggccagaggcaccggctgctgctggagacgctgccggagctcaccttcctgctgggactcttcggttacctcgtgttcctagtcatctacaagtggctgtgtgtctgggctgccagggccgcctcggcccccagcatcctcatccacttcatcaacatgttcctcttctcccacagccccagcaacaggctgctctacccccggcaggaggtggtccaggccacgctggtggtcctggccttggccatggtgcccatcctgctgcttggcacacccctgcacctgctgcaccgccaccgccgccgcctgcggaggaggcccgctgaccgacaggaggaaaacaaggccgggttgctggacctgcctgacgcatctgtgaatggctggagctccgatgaggaaaaggcagggggcctggatgatgaagaggaggccgagctcgtcccctccgaggtgctcatgcaccaggccatccacaccatcgagttctgcctgggctgcgtctccaacaccgcctcctacctgcgcctgtgggccctgagcctggcccacgcccagctgtccgaggttctgtgggccatggtgatgcgcataggcctgggcctgggccgggaggtgggcgtggcggctgtggtgctggtccccatctttgccgcctttgccgtgatgaccgtggctatcctgctggtgatggagggactctcagccttcctgcacgccctgcggctgcactgggtggaattccagaacaagttctactcaggcacgggctacaagctgagtcccttcaccttcgctgccacagatgactagggcccactgcaggtcctgccagacctccttcctgacctctgaggcaggagaggaataaagacggtccgccctggcagtgaaaaaaaaaaaaaaaaaaaa

SEQ ID NO: 3307 - protein, 614 aa, Homo sapiens
MTFLISYWGEQIGQKIRKITDCFHCHVFPFLQQEEARLGALQQLQQQSQELQEVLGETERFLSQVLGRVLQLLPPGQVQVHKMKAVYLALNQCSVSTTHKCLIAEAWCSVRDLPALQEALRDSSMEEGVSAVAHRIPCRDMPPTLIRTNRFTASFQGIVDAYGVGRYQEVNPAPYTIITFPFLFAVMFGDVGHGLLMFLFALAMVLAENRPAVKAAQNEIWQTFFRGRYLLLLMGLFSIYTGFIYNECFSRATSIFPSGWSVAAMANQSGWSDAFLAQHTMLTLDPNVTGVFLGPYPFGIDPIWSLAANHLSFLNSFKMKMSVILGVVHMAFGVVLGVFNHVHFGQRHRLLLETLPELTFLLGLFGYLVFLVIYKWLCVWAARAASAPSILIHFINMFLFSHSPSNRLLYPRQEVVQATLVVLALAMVPILLLGTPLHLLHRHRRRLRRRPADRQEENKAGLLDLPDASVNGWSSDEEKAGGLDDEEEAELVPSEVLMHQAIHTIEFCLGCVSNTASYLRLWALSLAHAQLSEVLWAMVMRIGLGLGREVGVAAVVLVPIFAAFAVMTVAILLVMEGLSAFLHALRLHWVEFQNKFYSGTGYKLSPFTFAATDD

SEQ ID NO: 3308 - DNA, 768 bp, Homo sapiens
cggccgaggctgcggccatggcagcatcttccctgacggtcaccttagggcggctggcgtccgcgtgcagccacagcatcctgagaccttcggggcccggagcagcctccctttggtctgcttctcgaaggttcaattcacagagcacttcatatctaccaggatatgttcctaaaacatccctgagttcaccaccttggccagaagttgttctgccagacccagttgaggagaccagacaccatgcagaggtcgtgaagaaggtgaatgagatgatcgtcacggggcagtatggcaggctctttgccgtggtgcactttgccagccgccagtggaaggtgacctctgaagacctgatcttaattggaaatgaactagaccttgcgtgtggagagagaattcgactggagaaggtcctgctggttggggcagacaacttcacgctgcttggcaagccactcctcgggtaatggctgtgaagtgctgggctttgtctggggctccagggctggacatgcagacagtggtcacagtgcaattaggccagaaaggatcttgttcgagtagaagccacagtcattgaaaagacagaatcatggccaagaatcattatgagattcaggaaaaggaaaaacttcaagaagaaaagaatcgtcacgaccccgcagactgtcctccggataaacagcattgagattgctccgtgtttgttgtgattaccgagttaatacttacaaaaggataaaaataaactcctgcttcccaagg

SEQ ID NO: 3309 - protein, 150 aa, Homo sapiens
MAASSLTVTLGRLASACSHSILRPSGPGAASLWSASRRFNSQSTSYLPGYVPKTSLSSPPWPEVVLPDPVEETRHHAEVVKKVNEMIVTGQYGRLFAVVHFASRQWKVTSEDLILIGNELDLACGERIRLEKVLLVGADNFTLLGKPLLG

SEQ ID NO: 3310 - DNA, 3339 bp, Homo sapiens
ggcgcagaagcgggacgtcggcttctaggggcccaggccggcggcggcgatggcctcggcagctgtggagagcttcgtgaccaagcaactggacctgctggagcttgagagagacgcggaggtggaggagcgcaggtcctggcaggagaacatctctctgaaagagctccagagccgaggcgtgtgtttgctgaagctgcaggtatccagccagcgcactgggctgtacggacggctgctggtcacctttgagcccaggcgatacgggtccgcggcagctcttcccagtaacagctttacttctggtgatatcgtgggcctgtacgatgctgctaatgagggcagtcagctggccactgggatcttgacccgggtcacccagaagtcggtcacggtggcctttgatgagtcccacgatttccagttgagcttggaccgagagaattcctacagactgttaaaacttgccaatgatgtcacttacaggcgactgaaaaaagccctgattgctctaaagaagtatcattctggcccagcctcctcactcatagaagtgctctttggcagatctgctcccagtcctgccagtgaaatacacccgctgacattcttcaacacctgcctggacacctcccagaaagaagcggtttcatttgcgctgtctcagaaagaacttgccatcatccatggacctcctggcactgggaaaaccacgactgtggttgagatcattcttcaagctgtgaaacaaggcttaaaggttctgtgctgcgccccctccaacatcgccgtggacaatctggtggagcgcctggctctgtgtaagcagcggattctgcgcctgggacaccctgcccgcctcctggagtccattcagcagcactccctggatgcggttttagcgcggagcgacagtgcccagattgttgcagatatcaggaaggacatcgaccaggtctttgtgaaaaacaaaaagacccaggataagagagagaaaagtaattttcgaaatgaaattaagctgttaagaaaagaactgaaggagagggaagaagcagctatgctcgagagcctcacttcggcaaacgtggtccttgcaacaaacacaggtgcgtctgccgatggccccctgaagttgctgcccgagagctacttcgacgtggtggtcattgacgagtgtgcccaggccctcgaggcgagctgctggatccccctgctgaaggccagaaagtgcatcctggcgggcgatcacaagcagctgccccccaccacagtctctcacaaggctgcgctggcaggactgtcactcagcctgatggaacgcctggctgaggagtacggcgcgagggtggtgcggacactgacggtgcagtaccgcatgcaccaggctatcatgcgctgggcctcagacaccatgtaccttgggcagctcacagcccactcttccgtggcaaggcacctcctgagggacctcccaggtgtggctgccacagaagagacgggtgtgcccctgctcttggtggacaccgccggctgcgggctgtttgagctggaggaggaggacgaacagtcgaaagggaaccctggcgaagtccgcctcgtcagtttgcacatccaggctctggtggacgctggtgttccagcccgtgacattgctgtggtctcgccatacaacctccaggtggacctgctcagacagagccttgtgcacaggcaccctgagcttgaaatcaagtctgtcgatggcttccaaggccgagagaaggaggccgtgatactgtccttcgtcagatccaacaggaaaggtgaagttggttttcttgctgaggaccggaggatcaacgtggctgtcacccgtgcccgacgccacgtggcggtcatctgtgactcccgtactgtcaacaaccatgcatttttgaagaccctggtggagtatttcacacagcatggggaagtacgcacggcctttgagtatcttgacgatattgtcccagaaaactattcccatgagaactcccagggttccagccacgctgccaccaagccccagggacctgctacgtccaccaggaccggaagccagcggcaggagggaggccaggaggctgcagcacctgccagacagggccggaagaagccggctgggaagtctctggcctctgaagctccatctcagcccagcctcaacggaggcagcccagagggagtggagagccaagatggcgtggaccacttccgggccatgatagtggagttcatggccagcaagaagatgcagttggagtttcctccttccctcaattcccacgacaggctgcgggtccaccaaatagccgaggagcacgggctgaggcacgacagttccggggaagggaagaggaggttcatcactgtgagcaagagggccccgcgaccccgagcagccctgggacccccagcagggaccggtggcccagcccctctccagccagtgccccctacccctgcgcagacagagcagcctcccagggagcagcgtggcccagaccagcctgatctgaggacgctgcacctggagagactgcagagggtcaggagcgcgcaggggcagcccgccagcaaggagcagcaggcctcagggcagcagaaacttccagaaaagaaaaagaaaaaagccaaaggacatccggccacagatctgcccacggaggaggactttgaggccctggtttctgccgccgttaaggctgataacacctgcggctttgccaagtgcacagccggcgtcacaaccctgggccagttctgccagctctgcagccgccgctactgcctcagccaccacctgcccgagatccatggctgcggtgagagggctcgcgcccatgcccggcagagaatcagccgggaaggggtcctctatgccggcagcgggaccaagaacggatccctggacccagccaagagggcccagctgcagaggaggctggataagaagctgagtgagctcagcaaccagaggaccagccggaggaaggagagggggacgtgaccggccgcatccttgcacgccccgcggagctctctccatggtagcccagggcgctggcagaccatgctccgcctccaccagggccacagaggagcggaggggcctatgggggaggagcggagggccctgttggggaaggttgggtttttggaccccagggataagcttttccgatgtcacaatgtggaggaaagcacctgggggacaacagtgctcgtgcaggtggggcttgggaaatgcacgtcccttccccttactccccgccaaacccacatcccagcctctggatcctggggaagttccagtcc

SEQ ID NO: 3311 - DNA, 4306 bp, Homo sapiens
cacacggactacaggggagttttgttgaagttgcaaagtcctggagcctccagagggctgtcggcgcagtagcagcgagcagcagagtccgcacgctccggcgaggggcagaagagcgcgagggagcgcggggcagcagaagcgagagccgagcgcggacccagccaggacccacagccctccccagctgcccaggaagagccccagccatggaacaccagctcctgtgctgcgaagtggaaaccatccgccgcgcgtaccccgatgccaacctcctcaacgaccgggtgctgcgggccatgctgaaggcggaggagacctgcgcgccctcggtgtcctacttcaaatgtgtgcagaaggaggtcctgccgtccatgcggaagatcgtcgccacctggatgctggaggtctgcgaggaacagaagtgcgaggaggaggtcttcccgctggccatgaactacctggaccgcttcctgtcgctggagcccgtgaaaaagagccgcctgcagctgctgggggccacttgcatgttcgtggcctctaagatgaaggagaccatccccctgacggccgagaagctgtgcatctacaccgacaactccatccggcccgaggagctgctgcaaatggagctgctcctggtgaacaagctcaagtggaacctggccgcaatgaccccgcacgatttcattgaacacttcctctccaaaatgccagaggcggaggagaacaaacagatcatccgcaaacacgcgcagaccttcgttgccctctgtgccacagatgtgaagttcatttccaatccgccctccatggtggcagcggggagcgtggtggccgcagtgcaaggcctgaacctgaggagccccaacaacttcctgtcctactaccgcctcacacgcttcctctccagagtgatcaagtgtgacccagactgcctccgggcctgccaggagcagatcgaagccctgctggagtcaagcctgcgccaggcccagcagaacatggaccccaaggccgccgaggaggaggaagaggaggaggaggaggtggacctggcttgcacacccaccgacgtgcgggacgtggacatctgagggcgccaggcaggcgggcgccaccgccacccgcagcgagggcggagccggccccaggtgctcccctgacagtccctcctctccggagcattttgataccagaagggaaagcttcattctccttgttgttggttgttttttcctttgctctttcccccttccatctctgacttaagcaaaagaaaaagattacccaaaaactgtctttaaaagagagagagagaaaaaaaaaatagtatttgcataaccctgagcggtgggggaggagggttgtgctacagatgatagaggattttataccccaataatcaactcgtttttatattaatgtacttgtttctctgttgtaagaataggcattaacacaaaggaggcgtctcgggagaggattaggttccatcctttacgtgtttaaaaaaaagcataaaaacattttaaaaacatagaaaaattcagcaaaccatttttaaagtagaagagggttttaggtagaaaaacatattcttgtgcttttcctgataaagcacagctgtagtggggttctaggcatctctgtactttgcttgctcatatgcatgtagtcactttataagtcattgtatgttattatattccgtaggtagatgtgtaacctcttcaccttattcatggctgaagtcacctcttggttacagtagcgtagcgtggccgtgtgcatgtcctttgcgcctgtgaccaccaccccaacaaaccatccagtgacaaaccatccagtggaggtttgtcgggcaccagccagcgtagcagggtcgggaaaggccacctgtcccactcctacgatacgctactataaagagaagacgaaatagtgacataatatattctatttttatactcttcctatttttgtagtgacctgtttatgagatgctggttttctacccaacggccctgcagccagctcacgtccaggttcaacccacagctacttggtttgtgttcttcttcatattctaaaaccattccatttccaagcactttcagtccaataggtgtaggaaatagcgctgtttttgttgtgtgtgcagggagggcagttttctaatggaatggtttgggaatatccatgtacttgtttgcaagcaggactttgaggcaagtgtgggccactgtggtggcagtggaggtggggtgtttgggaggctgcgtgccagtcaagaagaaaaaggtttgcattctcacattgccaggatgataagttcctttccttttctttaaagaagttgaagtttaggaatcctttggtgccaactggtgtttgaaagtagggacctcagaggtttacctagagaacaggtggtttttaagggttatcttagatgtttcacaccggaaggtttttaaacactaaaatatataatttatagttaaggctaaaaagtatatttattgcagaggatgttcataaggccagtatgatttataaatgcaatctccccttgatttaaacacacagatacacacacacacacacacacacacacaaaccttctgcctttgatgttacagatttaatacagtttatttttaaagatagatccttttataggtgagaaaaaaacaatctggaagaaaaaaaccacacaaagacattgattcagcctgtttggcgtttcccagagtcatctgattggacaggcatgggtgcaaggaaaattagggtactcaacctaagttcggttccgatgaattcttatcccctgccccttcctttaaaaaacttagtgacaaaatagacaatttgcacatcttggctatgtaattcttgtaatttttatttaggaagtgttgaagggaggtggcaagagtgtggaggctgacgtgtgagggaggacaggcgggaggaggtgtgaggaggaggctcccgaggggaaggggcggtgcccacaccggggacaggccgcagctccattttcttattgcgctgctaccgttgacttccaggcacggtttggaaatattcacatcgcttctgtgtatctctttcacattgtttgctgctattggaggatcagttttttgttttacaatgtcatatactgccatgtactagttttagttttctcttagaacattgtattacagatgccttttttgtagttttttttttttttatgtgatcaattttgacttaatgtgattactgctctattccaaaaaggttgctgtttcacaatacctcatgcttcacttagccatggtggacccagcgggcaggttctgcctgctttggcgggcagacacgcgggcgcgatcccacacaggctggcgggggccggccccgaggccgcgtgcgtgagaaccgcgccggtgtccccagagaccaggctgtgtccctcttctcttccctgcgcctgtgatgctgggcacttcatctgatcgggggcgtagcatcatagtagtttttacagctgtgttattctttgcgtgtagctatggaagttgcataattattattattattattataacaagtgtgtcttacgtgccaccacggcgttgtacctgtaggactctcattcgggatgattggaatagcttctggaatttgttcaagttttgggtatgtttaatctgttatgtactagtgttctgtttgttattgttttgttaattacaccataatgctaatttaaagagactccaaatctcaatgaagccagctcacagtgctgtgtgccccggtcacctagcaagctgccgaaccaaaagaatttgcaccccgctgcgggcccacgtggttggggccctgccctggcagggtcatcctgtgctcggaggccatctcgggcacaggcccaccccgccccacccctccagaacacggctcacgcttacctcaaccatcctggctgcggcgtctgtctgaaccacgcgggggccttgagggacgctttgtctgtcgtgatggggcaagggcacaagtcctggatgttgtgtgtatcgagaggccaaaggctggtggcaagtgcacggggcacagcggagtctgtcctgtgacgcgcaagtctgagggtctgggcggcgggcggctgggtctgtgcatttctggttgcaccgcggcgcttcccagcaccaacatgtaaccggcatgtttccagcagaagacaaaaagacaaacatgaaagtctagaaataaaactggtaaaaccccaaaaaaaaaaaaaaaa

SEQ ID NO: 3312 - protein, 295 aa, Homo sapiens
MEHQLLCCEVETIRRAYPDANLLNDRVLRAMLKAEETCAPSVSYFKCVQKEVLPSMRKIVATWMLEVCEEQKCEEEVFPLAMNYLDRFLSLEPVKKSRLQLLGATCMFVASKMKETIPLTAEKLCIYTDNSIRPEELLQMELLLVNKLKWNLAAMTPHDFIEHFLSKMPEAEENKQIIRKHAQTFVALCATDVKFISNPPSMVAAGSVVAAVQGLNLRSPNNFLSYYRLTRFLSRVIKCDPDCLRACQEQIEALLESSLRQAQQNMDPKAAEEEEEEEEEVDLACTPTDVRDVDI

SEQ ID NO: 3313 - DNA, 1642 bp, Homo sapiens
ctctaaaggttcgggggtggaatccttgggccgctgggcaagcggcgagacctggccagggccagcgagccgaggacagagggcgcacggagggccgggccgcagccccggccgcttgcagaccccgccatggacccgttcctggtgctgctgcactcggtgtcgtccagcctgtcgagcagcgagctgaccgagctcaagttcctatgcctcgggcgcgtgggcaagcgcaagctggagcgcgtgcagagcggcctagacctcttctccatgctgctggagcagaacgacctggagcccgggcacaccgagctcctgcgcgagctgctcgcctccctgcggcgccacgacctgctgcggcgcgtcgacgacttcgaggcgggggcggcggccggggccgcgcctggggaagaagacctgtgtgcagcatttaacgtcatatgtgataatgtggggaaagattggagaaggctggctcgtcagctcaaagtctcagacaccaagatcgacagcatcgaggacagatacccccgcaacctgacagagcgtgtgcgggagtcactgagaatctggaagaacacagagaaggagaacgcaacagtggcccacctggtgggggctctcaggtcctgccagatgaacctggtggctgacctggtacaagaggttcagcaggcccgtgacctccagaacaggagtggggccatgtccccgatgtcatggaactcagacgcatctacctccgaagcgtcctgatgggccgctgctttgcgctggtggaccacaggcatctacacagcctggactttggttctctccaggaaggtagcccagcactgtgaagacccagcaggaagccaggctgagtgagccacagaccacctgcttctgaactcaagctgcgtttattaatgcctctcccgcaccaggccgggcttgggccctgcacagatatttccatttcttcctcactatgacactgagcaagatcttgtctccactaaatgagctcctgcgggagtagttggaaagttggaaccgtgtccagcacagaaggaatctgtgcagatgagcagtcacactgttactccacagcggaggagaccagctcagaggcccaggaatcggagcgaagcagagaggtggagaactgggatttgaacccccgccatccttcaccagagcccatgctcaaccactgtggcgttctgctgcccctgcagttggcagaaaggatgttttgtcccatttccttggaggccaccgggacagacctggacactagggtcaggcggggtgctgtggtggggagaggcatggctggggtgggggtggggagacctggttggccgtggtccagctcttggcccctgtgtgagttgagtctcctctctgagactgctaagtaggggcagtgatggttgccaggacgaattgagataatatctgtgaggtgctgatgagtgattgacacacagcactctctaaatcttccttgtgaggattatgggtcctgcaattctacagtttcttactgttttgtatcaaaatcactatctttctgataacagaattgccaaggcagcgggatctcgtatctttaaaaagcagtcctcttattcctaaggtaatcctattaaaa

SEQ ID NO: 3314 - protein, 208 aa, Homo sapiens
MDPFLVLLHSVSSSLSSSELTELKFLCLGRVGKRKLERVQSGLDLFSMLLEQNDLEPGHTELLRELLASLRRHDLLRRVDDFEAGAAAGAAPGEEDLCAAFNVICDNVGKDWRRLARQLKVSDTKIDSIEDRYPRNLTERVRESLRIWKNTEKENATVAHLVGALRSCQMNLVADLVQEVQQARDLQNRSGAMSPMSWNSDASTSEAS

SEQ ID NO: 3315 - DNA, 716 bp, Homo sapiens
gaagccaggctgagtgagccacagaccacctgcttctgaactcaagctgcgtttattaatgcctctcccgcaccaggccgggcttgggccctgcacagatatttccatttcttcctcactatgacactgagcaagatcttgtctccactaaatgagctcctgcgggagtagttggaaagttggaaccgtgtccagcacagaaggaatctgtgcagatgagcagtcacactgttactccacagcggaggagaccagctcagaggcccaggaatcggagcgaagcagagaggtggagaactgggatttgaacccccgccatccttcaccagagcccatgctcaaccactgtggcgttctgctgcccctgcagttggcagaaaggatgttttgtcccatttccttggtccagctcttggcccctgtgtgagttgagtctcctctctgagactgctaagtaggggcagtgatggttgccaggacgaattgagataatatctgtgaggtgctgatgagtgattgacacacagcactctctaaatcttccttgtgaggattatgggtcctgcaattctacagtttcttactgttttgtatcaaaatcactatctttctgataacagaattgccaaggcagcgggatctcgtatctttaaaaagcagtcctcttattcctaaggtaatcctattaaaacacagctttacaacttccatactac

SEQ ID NO: 3316 - DNA, 4313 bp, Homo sapiens
gaattccgggcccccggccgtccctcttaaggctcttcctccgctccgccagtgtccggccgcgggccggccttagtgactggggcggcgggccccggggccgcggcgtggggcgggcaggcggacgccggccgcgggctgctttcgtcggctcccaagctctcccggagcgagcagccgcccgcgagccgccgcggagcctcctcgcccgctcccgccggcgagcaagatgatgtgcgaggtgatgccgaccatcagcgaagcagaaggcccccctggaggaggtggaggccatggttccggctccccttcacagccagatgcagattcacattttgaacagttgatggtctccatgctagaagaaagggaccgccttcttgatacactgagagagactcaagaaacgctggccttaacccaggggaagttacacgaggttggtcatgaaagagattccttgcagagacagctcaacacggcacttccacaggagttcgcagcacttactaaagaactcaatgtatgcagggaacagctccttgaaagggaagaagaaattgctgaactgaaagcagaaaggaataacaccaggctgctgttagagcatttggaatgccttgtctccaggcatgagcggtctcttaggatgaccgtggtgaagagacaagcgcagtctccagcaggcgtgtccagcgaagtggaagtgctgaaagcactgaagtccttatttgaacaccacaaagctctggatgaaaaggtgagagagcgattacgagtagcacttgaaagatgtagtttgttagaagaggaattaggtgccacacacaaagagctaatgattcttaaagaacagaataatcagaaaaaaactctaacagatggagtgctggacataaaccatgaacaagaaaatacaccaagcacgagtggaaagagatcttctgatggttctttaagccacgaggaagaccttgctaaagtaattgagctccaagaaatcataagtaagcagtcaagggaacagagccaaatgaaagaacgcctggcttccctttccagtcatgtgacagaactggaagaggatctggacacggctagaaaagatctcatcaaatctgaagaaatgaacacaaaattgcaacgagatgtccgtgaagccatggcccaaaaggaagatatggaagagagaatcactactcttgaaaaacgctacctcgctgcacagcgtgaagccacatctgtgcatgacctcaatgataaacttgaaaatgaaattgcaaataaagattctatgcatcgacagactgaagataaaaaccgccagttacaggagcgcttggaattggcagagcaaaagctgcaacagacactgaggaaggcagagacgctcccggaggtggaggcggagctggcccagagggtggcagcgctttccaaggctgaagagagacacggcaacattgaagaaaggttacgacagatggaagcacagttggaggagaagaatcaagaactgcagcgggcaaggcaaagagaaaaaatgaacgaagaacataataaacgtttatcagacactgttgacaagctgctttcagaatctaatgagaggcttcaacttcatcttaaagagagaatggctgctttggaagataagaactctcttttaagagaagttgaaagtgcaaaaaagcagttagaagaaacacaacacgataaggatcagcttgtcctaaacattgaagcactgagggctgaactagaccacatgagactaagaggtgcttcacttcatcatggccgaccccacttgggcagtgtcccagatttcaggttccccatggcagacggccacacagactcctacagcaccagtgcagtgctgcggcgcccacagaaaggccggctggcagccctgcgagatgagccttccaaggtacaaactcttaatgagcaggattgggaacgtgcccagcaagctagtgtcttggcaaatgtagcacaagcattcgagagtgatgctgacgtgtctgatggtgaagatgacagggacactctcctcagctcagttgacctgctatcgcccagcgggcaggccgacgcgcacacactagccatgatgcttcaggagcagctggacgccatcaacaaagagatcaggttgattcaggaagaaaaagaaaatacagagcagcgggcagaggagattgaaagtcgagttggcagtggaagtctagacaatcttggtcgttttagatcaatgagctccattcccccctaccctgcttcctcgcttgctagctcctcccctccgggcagtgggcgctccaccccacgaaggatccctcacagcccagctcgggaagtggacagactgggcgtcatgacccttttgccaccttccagagaagaggtacgagatgacaagacaaccataaagtgtgaaacctccccgccttcctccccgagagcccttcggttagaccggctgcacaaaggggcgctgcacaccgtcagccacgaggacatcagggacataaggaactccacaggctcccaggatggtcccgtgagcaaccccagcagtagcaacagtagccaggactcgctccacaaagccccaaagaagaaaggcattaagtcctccattggccgcttgtttggcaagaaagaaaagggccgacctggacaaactggcaaagaagcattaggacaagctggtgtttccgagacggataactcatctcaggatgccttgggacttagcaaattggggggacaggctgaaaaaaatcgtaaacttcaaaaaaagcatgaattgctggaggaagcccggagacaaggtttaccttttgcccaatgggacgggccaacggttgtggtctggctagagctctgggttgggatgccagcctggtatgtggctgcctgccgagcaaacgtgaaaagcggggccatcatgtcggccctgtccgacacagagatccagcgtgagattggcatcagcaaccccctgcacaggctgaagctgaggctggccatccaggagatcatgtcgctgaccagcccgtctgccccgcccacatctagaacgacactcgcctatggggacatgaaccacgagtggatcggcaacgagtggctccccagcctgggcctcccccagtaccgcagctacttcatggagtgccttgtagacgccaggatgctggaccacttgaccaagaaagaccttcgagggcagctgaaaatggtcgacagttttcacagaaacagtttccagtgtggaattatgtgcctgagaaggttaaattatgaccggaaagaactggaaagaaaaagagaagaaagtcagagtgaaataaaagacgtgcttgtttggagcaatgatcgagtgattcgctggatcctgtcaattggccttaaagaatatgcaaacaatcttatagagagtggtgttcacggagcacttctggccttagatgaaaccttcgacttcagtgcactggcactgctgttacagatcccgacgcagaacacacaggctcgtgctgtcttggaaagagaatttaacaaccttttggtcatggggactgatagaaggtttgatgaagatgatgataaaagctttaggagagcaccttcatggagaaaaaagtttagaccaaaggacattcgtggcttagctgctgggtcagcagagactctccctgcaaacttccgggtgacttcttctatgtcttccccctctatgcagccaaagaagatgcagatggacggcaatgtatcaggaacacagaggttggattctgctacagtcaggacttactcctgctaaagtctcctgttgtttacccacactacttctacagatgattatgcagcatttgaatccaacaaagactacattttggaaccagtggaatctttaatcttgttaatacttgttatatggaccctaagatattttattacagagtttttaattagtgaaaaattcatgaataccatagagaaaatattttagaatttaatgtttcttatatttatgtaaacttatgactcttcatttatatagttacttactttttcatgtatatccaggctataaatatcctttcaaatcatgttcttatacctaattttagtctttcaaatgaatgtactgtaatgcttgtatgtataaatcctatgaatagagggcttttgtaaattatgcatttattgtaattatcattaattttttaatgataaaccatgacaaaggattttacgtttataaaattatgacagaagccatgtgccccgaattc

SEQ ID NO: 3317 - protein, 1202 aa, Homo sapiens
MMCEVMPTISEAEGPPGGGGGHGSGSPSQPDADSHFEQLMVSMLEERDRLLDTLRETQETLALTQGKLHEVGHERDSLQRQLNTALPQEFAALTKELNVCREQLLEREEEIAELKAERNNTRLLLEHLECLVSRHERSLRMTVVKRQAQSPAGVSSEVEVLKALKSLFEHHKALDEKVRERLRVALERCSLLEEELGATHKELMILKEQNNQKKTLTDGVLDINHEQENTPSTSGKRSSDGSLSHEEDLAKVIELQEIISKQSREQSQMKERLASLSSHVTELEEDLDTARKDLIKSEEMNTKLQRDVREAMAQKEDMEERITTLEKRYLAAQREATSVHDLNDKLENEIANKDSMHRQTEDKNRQLQERLELAEQKLQQTLRKAETLPEVEAELAQRVAALSKAEERHGNIEERLRQMEAQLEEKNQELQRARQREKMNEEHNKRLSDTVDKLLSESNERLQLHLKERMAALEDKNSLLREVESAKKQLEETQHDKDQLVLNIEALRAELDHMRLRGASLHHGRPHLGSVPDFRFPMADGHTDSYSTSAVLRRPQKGRLAALRDEPSKVQTLNEQDWERAQQASVLANVAQAFESDADVSDGEDDRDTLLSSVDLLSPSGQADAHTLAMMLQEQLDAINKEIRLIQEEKENTEQRAEEIESRVGSGSLDNLGRFRSMSSIPPYPASSLASSSPPGSGRSTPRRIPHSPAREVDRLGVMTLLPPSREEVRDDKTTIKCETSPPSSPRALRLDRLHKGALHTVSHEDIRDIRNSTGSQDGPVSNPSSSNSSQDSLHKAPKKKGIKSSIGRLFGKKEKGRPGQTGKEALGQAGVSETDNSSQDALGLSKLGGQAEKNRKLQKKHELLEEARRQGLPFAQWDGPTVVVWLELWVGMPAWYVAACRANVKSGAIMSALSDTEIQREIGISNPLHRLKLRLAIQEIMSLTSPSAPPTSRTTLAYGDMNHEWIGNEWLPSLGLPQYRSYFMECLVDARMLDHLTKKDLRGQLKMVDSFHRNSFQCGIMCLRRLNYDRKELERKREESQSEIKDVLVWSNDRVIRWILSIGLKEYANNLIESGVHGALLALDETFDFSALALLLQIPTQNTQARAVLEREFNNLLVMGTDRRFDEDDDKSFRRAPSWRKKFRPKDIRGLAAGSAETLPANFRVTSSMSSPSMQPKKMQMDGNVSGTQRLDSATVRTYSC

SEQ ID NO: 3318 - DNA, 7165 bp, Homo sapiens
acgaagaggtacgattccggagaatcgcgaggcagagcgggagcgcgcagccaggtggaaactaattctaagccagactgctggagatcaccctgttctagtgtgtggaggcttccaccaggaggcgcattggagtgactgtctggcatcaccaagatgacactccacgccacccggggggctgcactcctctcttgggtgaacagtctacacgtggctgaccctgtggaggctgtgctgcagctccaggactgcagcatcttcatcaagatcattgacagaatccatggcactgaagagggacagcaaatcttgaagcagccggtgtcagagagactggactttgtgtgcagttttctgcagaaaatcgaaaacatccctcttccccagaatgcctggtatctgcacagaaggtgctagagggatcagagctggaactggcgaagatgaccatgctgctcttataccactctaccatgagctccaaaagtcccagggactgggaacagtttgaatataaaattcaggctgagttggctgtcattcttaaatttgtgctggaccatgaggacgggctaaaccttaatgaggacctagagaacttcctacagaaagctcctgtgccttctacctgttctagcacattccctgaagagctctccccacctagccaccaggccaagagggagattcgcttcctagagctacagaaggttgcctcctcttccagtgggaacaactttctctcaggttctccagcttctcccatgggtgatatcctgcagaccccacagttccagatgagacggctgaagaagcagcttgctgatgagagaagtaatagggatgagctggagctggagctagctgagaaccgcaagctcctcaccgagaaggatgcacagatagccatgatgcagcagcgcattgaccgcctagccctgctgaatgagaagcaggcggccagcccactggagcccaaggagcttgaggagctgcgtgacaagaatgagagccttaccatgcggctgcatgaaaccctgaagcagtgccaggacctgaagacagagaagagccagatggatcgcaaaatcaaccagctttcggaggagaatggagacctttcctttaagctgcgggagtttgccagtcatctgcagcagctacaggatgccctcaatgagctgacggaggagcacagcaaggccactcaggagtggctagagaagcaggcccagctggagaaggagctcagcgcagccctgcaggacaagaaatgccttgaagagaagaacgaaatccttcagggaaaactttcacagctggaagaacacttgtcccagctgcaggataacccaccccaggagaagggcgaggtgctgggtgatgtcttgcagctggaaaccttgaagcaagaggcagccactcttgctgcaaacaacacacagctccaagccagggtagagatgctggagactgagcgaggccagcaggaagccaagctgcttgctgagcggggccacttcgaagaagaaaagcagcagctgtctagcctgatcactgacctgcagagctccatctccaacctcagccaggccaaggaagagctggagcaggcctcccaggctcatggggcccggttgactgcccaggtggcctctctgacctctgagctcaccacactcaatgccaccatccagcaacaggatcaagaactggctggcctgaagcagcaggccaaagagaagcaggcccagctagcacagaccctccaacagcaagaacaggcctcccagggcctccgccaccaggtggagcagctaagcagtagcctgaagcagaaggagcagcagttgaaggaggtagcggagaagcaggaggcaactaggcaggaccatgcccagcaactggccactgctgcagaggagcgagaggcctccttaagggagcgggatgcggctctcaagcagctggaggcactggagaaggagaaggctgccaagctggagattctgcagcagcaacttcaggtggctaatgaagcccgggacagtgcccagacctcagtgacacaggcccagcgggagaaggcagagctgagccggaaggtggaggaactccaggcctgtgttgagacagcccgccaggaacagcatgaggcccaggcccaggttgcagagctagagttgcagctgcggtctgagcagcaaaaagcaactgagaaagaaagggtggcccaggagaaggaccagctccaggagcagctccaggccctcaaagagtccttgaaggtcaccaagggcagccttgaagaggagaagcgcagggctgcagatgccctggaagagcagcagcgttgtatctctgagctgaaggcagagacccgaagcctggtggagcagcataagcgggaacgaaaggagctggaagaagagagggctgggcgcaaggggctggaggctcgattacagcagcttggggaggcccatcaggctgagactgaagtcctgcggcgggagctggcagaggccatggctgcccagcacacagctgagagtgagtgtgagcagctcgtcaaagaagtagctgcctggcgtgagcggtatgaggatagccagcaagaggaggcacagtatggcgccatgttccaggaacagctgatgactttgaaggaggaatgtgagaaggcccgccaggagctgcaggaggcaaaggagaaggtggcaggcatagaatcccacagcgagctccagataagccggcagcagaacgaactagctgagctccatgccaacctggccagagcactccagcaggtccaagagaaggaagtcagggcccagaagcttgcagatgacctctccactctgcaggaaaagatggctgccaccagcaaagaggtggcccgcttggagaccttggtgcgcaaggcaggtgagcagcaggaaacagcctcccgggagttagtcaaggagcctgcgagggcaggagacagacagcccgagtggctggaagagcaacagggacgccagttctgcagcacacaggcagcgctgcaggctatggagcgggaggcagagcagatgggcaatgagctggaacggctgcgggccgcgctgatggagagccaggggcagcagcaggaggagcgtgggcagcaggaaagggaggtggcgcggctgacccaggagcggggccgtgcccaggctgaccttgccctggagaaggcggccagagcagagcttgagatgcggctgcagaacgccctcaacgagcagcgtgtggagttcgctaccctgcaagaggcactggctcatgccctgacggaaaaggaaggcaaggaccaggagttggccaagcttcgtggtctggaggcagcccagataaaagagctggaggaacttcggcaaaccgtgaagcaactgaaggaacagctggctaagaaagaaaaggagcacgcatctggctcaggagcccaatctgaggctgctggcaggacagagccaacaggccccaagctggaggcactgcgggcagaggtgagcaagctggaacagcaatgccagaagcagcaggagcaggctgacagcctggaacgcagcctcgaggctgagcgggcctcccgggctgagcgggacagtgctctggagactctgcagggccagttagaggagaaggcccaggagctagggcacagtcagagtgccttagcctcggcccaacgggagttggctgccttccgcaccaaggtacaagaccacagcaaggctgaagatgagtggaaggcccaggtggcccggggccggcaagaggctgagaggaaaaatagcctcatcagcagcttggaggaggaggtgtccatcctgaatcgccaggtcctggagaaggagggggagagcaaggagttgaagcggctggtgatggccgagtcagagaagagccagaagctggaggagaggctgcgcctgctgcaggcagagacagccagcaacagtgccagagctgcagaacgcagctctgctctgcgggaggaggtgcagagcctccgggaggaggctgagaaacagcgggtggcttcagagaacctgcggcaggagctgacctcacaggctgagcgtgcggaggagctgggccaagaattgaaggcgtggcaggagaagttcttccagaaagagcaggccctctccaccctgcagctcgagcacaccagcacacaggccctggtgagtgagctgctgccagctaagcacctctgccagcagctgcaggccgagcaggccgctgccgagaaacgccaccgtgaggagctggagcagagcaagcaggccgctgggggactgcgggcagagctgctgcgggcccagcgggagcttggggagctgattcctctgcggcagaaggtggcagagcaggagcgaacagctcagcagctgcgggcagagaaggccagctatgcagagcagctgagcatgctgaagaaggcgcatggcctgctggcagaggagaaccgggggctgggtgagcgggccaaccttggccggcagtttctggaagtggagttggaccaggcccgggagaagtatgtccaagagttggcagccgtacgtgctgatgctgagacccgtctggctgaggtgcagcgagaagcacagagcactgcccgggagctggaggtgatgactgccaagtatgagggtgccaaggtcaaggtcctggaggagaggcagcggttccaggaagagaggcagaaactcactgcccaggtggagcagctagaggtatttcagagagagcaaactaagcaggtggaagaactgagtaagaaactggctgactctgaccaagccagcaaggtgcagcagcagaagctgaaggctgtccaggctcagggaggcgagagccagcaggaggcccagcgcctccaggcccagctgaatgaactgcaagcccagttgagccagaaggagcaggcagctgagcactataagctgcagatggagaaagccaaaacacattatgatgccaagaagcagcagaaccaagagctgcaggagcagctgcggagcctggagcagctgcagaaggaaaacaaagagctgcgagctgaagctgaacggctgggccatgagctacagcaggctgggctgaagaccaaggaggctgaacagacctgccgccaccttactgcccaggtgcgcagcctggaggcacaggttgcccatgcagaccagcagcttcgagacctgggcaaattccaggtggcaactgatgctttaaagagccgtgagccccaggctaagccccagctggacttgagtattgacagcctggatctgagctgcgaggaggggaccccactcagtatcaccagcaagctgcctcgtacccagccagacggcaccagcgtccctggagaaccagcctcacctatctcccagcgcctgccccccaaggtagaatccctggagagtctctacttcactcccatccctgctcggagtcaggcccccctggagagcagcctggactccctgggagacgtcttcctggactcgggtcgtaagacccgctccgctcgtcggcgcaccacgcagatcatcaacatcaccatgaccaagaagctagatgtggaagagccagacagcgccaactcatcgttctacagcacgcggtctgctcctgcttcccaggctagcctgcgagccacctcctctactcagtctctagctcgcctgggttctcccgattatggcaactcagccctgctcagcttgcctggctaccgccccaccactcgcagttctgctcgtcgttcccaggccggggtgtccagtggggcccctccaggaaggaacagcttctacatgggcacttgccaggatgagcctgagcagctggatgactggaaccgcattgcagagctgcagcagcgcaatcgagtgtgccccccacatctgaagacctgctatcccctggagtccaggccttccctgagcctgggcaccatcacagatgaggagatgaaaactggagacccccaagagaccctgcgccgagccagcatgcagccaatccagatagccgagggcactggcatcaccacccggcagcagcgcaaacgggtctccctagagccccaccagggccctggaactcctgagtctaagaaggccaccagctgtttcccacgccccatgactccccgagaccgacatgaagggcgcaaacagagcactactgaggcccagaagaaagcagctccagcttctactaaacaggctgaccggcgccagtcgatggccttcagcatcctcaacacacccaagaagctagggaacagccttctgcggcggggagcctcaaagaaggccctgtccaaggcttcccccaacactcgcagtggaacccgccgttctccgcgcattgccaccaccacagccagcgccgccactgctgccgccattggtgccacccctcgagccaagggcaaggcaaagcactaaagggccagtaccagtgagtggccccacctgtgtccccgatgctgacctcacctggtcctccgcctactgtccctctcagtgccttctctcagctcccaggccaacagtagccaaacccctagagacagtgatgcctgcccgcaccctggcctggtccctggtccttcactggcgccttctcggagctggcccagggggcctggagcatggacagtgtgggcgctctccctaccttgcctccttttttcttaaagcaaagtcacttctccatcacaaccagatttgaggctggttttgatggctgggtccttgggcctggccagtcttcctcttagcctctggatctagaagggaccataagaggagtaggccctggttcctgctgtcctggtggctgggcccagcaggggccctcactcttgaagtccaggactgggtctgacctggtgggagcacctgccagaggatgctctttcccaggacggatgggccctatgtctcaggagtggggttgggggacagccttcagcagcagctcacaccctaccttccccagacttgcactggggtgggatttggagtgatgggaaggtttttaagggccggggatggatcttttctaaatgttattacttgtaaataaagtctatttttctcccgtg

SEQ ID NO: 3319 - protein, 2018 aa, Homo sapiens [sequence omitted]

SEQ ID NO: 3320 - DNA, 902 bp, Homo sapiens
gggggggagcggggaaaacaaaaggagacgaaggacgcatgcgtttggtgagtcccggattctggtgggttcttccgctcaggctgggtgaagcgcttccgggtcgccgccggcagcagcctcccggcgcgatgaagacactgaggctcagagaggttaagtgactcagccaaggtcaaacagctagtaagtggtggagccaggactcaaagccagtctaggagccatgtccactttgttcccctcactcttccctcgtgtgactgagactctgtggtttaatctggatcgaccctgtgtggaagagacagagctgcagcagcaggaacagcagcatcaggcctggctccaaagcatcgcggagaaagacaacaacctggttcctattggcaagccagcctcagagcactatgatgacgaggaagaagaggatgatgaagatgatgaggatagtgaagaggactcagaggatgatgaggatatgcaggacatggacgagatgaatgactacaatgagtcaccggatgatggagaggtcaatgaggtggacatggaaggcaacgaacaggatcaggaccagtggatgatctaggtagacaaggcagggtggcctcagggagattccaggccagcccaaactaccctgcatcccaacccccaacccctgcccacagaaccagctgatggccccagtgcctgaaagtgcccttgggcacctcctcagctgctgccaggatctggtctctttggcccctcccaggccatcagtctgcacttgaaatccccagggcctgaaacctactccaccttcctggccagtacctcaccccttgattgccaggtctggtctaagtttctttaataaagacaaaggagtgattttcaaaaaaaaaaaaaaaaaa

SEQ ID NO: 3321 - protein, 121 aa, Homo sapiens
MSTLFPSLFPRVTETLWFNLDRPCVEETELQQQEQQHQAWLQSIAEKDNNLVPIGKPASEHYDDEEEEDDEDDEDSEEDSEDDEDMQDMDEMNDYNESPDDGEVNEVDMEGNEQDQDQWMI

SEQ ID NO: 3322 - DNA, 4737 bp, Homo sapiens
ctgaggccggcgctgcaggcagcggcggctgcgcggtgaacgaggcggcctgcgcggcggagtgctgagtcccgatccccggctctgtccggcccacggatcctcaagcccgggccccgggcccggccccagcctcagccctgagcgtctcggggcggatggcgcggggcggcgggggcgggcggtgctgagccctgcgcgggccatggcctcggcctgcggggcgccgggcccggggggcgccctgggcagccaggccccctcctggtaccaccgcgacctgagccgggcggccgcggaggagctgctggcccgggcgggccgcgatggcagcttcctggtccgagacagcgagagcgtggcgggggccttcgcgctctgcgtcctgtatcagaagcatgtgcacacgtatcgcattctgcctgatggagaagatttcttggctgtgcagacctcgcagggtgtgcctgtgcgccgcttccagaccctgggtgagctcatcggcctgtacgcccagcccaaccagggccttgtgtgcgccctgcttcttcctgtagagggtgagcgagagccggacccaccggatgaccgggatgcctcagatggggaggatgagaagcccccgctgcccccgcgctctggctccaccagcatttctgcccccactgggcccagcagtcccctgccagctcctgagactcccacagctccagctgctgagagtgctcccaatgggctgagcaccgtctcgcacgactacctgaaaggcagctatgggctggacctggaagctgtgaggggtggagccagccacctgccccacctcacccgtaccctcgctacctcatgccggaggctgcacagtgaggtggacaaggtcctgtcaggcctggagatcctgtccaaggtgtttgaccagcagagctcgcccatggtgacccgccttttgcagcagcagaacctgccacagacaggggagcaggaactagagagcctggtgctgaagctgtcagtgctaaaggacttcctgtcaggcatccagaagaaggccctgaaggccctacaggacatgagctccacagcacccccagctccgcagccatccacacgtaaggccaagaccatccccgtgcaggcctttgaggtgaagctagatgtgaccctgggtgacctgaccaagattgggaagtcacagaagttcacgctgagcgtggatgtggagggtgggcggctggtgctgctgcggagacagcgggactcccaggaggactggaccaccttcacgcacgaccgcatccgccagctcattaagtcccagcgtgtccagaacaagctgggtgttgtgtttgagaaggagaaggaccggactcagcgcaaggacttcatctttgtcagtgcccggaagcgggaggccttctgccagctgttgcagctcatgaagaacaagcactccaagcaggacgagcccgacatgatctcagtcttcataggcacctggaacatgggaagtgtaccacctccaaaaaacgtgacatcctggttcacatcgaagggtctggggaagaccctggacgaggtcacagtgaccataccccatgacatctatgtctttgggacccaggagaactcagtgggcgaccgcgagtggctggacctactgcgcgggggcctcaaggagcttacggatctggattaccgcccgattgccatgcaatcactgtggaatatcaaggtggcagtgctggtcaagccagagcacgagaaccgtatcagccatgtcagtacgtccagtgtgaagactggcatcgccaacaccctggggaacaagggggctgtgggcgtctccttcatgtttaatggcacctcatttggctttgtgaattgtcacctcacctcgggaaatgagaagacggctcggaggaaccaaaactacttggacatcctgcggctgctctcgctgggcgaccggcagctcaatgcctttgacatctctctgcgtttcacacacctcttctggtttggggacctcaactaccgcctggacatggatatccaggagatcctgaactacatcagcaggaaagagtttgagcccctcctcagggtggaccagctcaacctggagcgggagaagcacaaggtcttccttcgattcagtgaggaggagatctccttcccacccacctaccgctatgagcggggttcccgggacacatatgcctggcacaagcagaagccaactggggtccggaccaatgtgccctcatggtgtgaccggattctgtggaaatcctaccctgaaactcacatcatctgcaattcttatggttgcactgatgacatcgtcaccagcgaccattcccccgtgtttgggacatttgaggttggagttacctcccagttcatctccaagaaagggctctcaaagacttcagaccaggcctacattgagtttgagagcatcgaggccattgtgaagacagccagccgcaccaagttcttcatcgagttctactctacctgcctggaggaatacaagaagagctttgagaatgatgcccagagcagtgacaacatcaacttcctcaaagtgcagtggtcttcacgccagctgcccacgctcaaaccaattctggctgatatcgagtacctgcaggaccagcacctcctgctcacagtcaagtccatggatggctatgaatcctatggggagtgtgtggttgcactcaaatccatgatcggcagcacggcccaacagttcctgaccttcctatcccaccgtggcgaggagacaggcaatatcagaggctccatgaaggtgcgggtgcccacggagcgcctgggcacccgtgagcggctctacgagtggatcagcattgataaggatgaggcaggagcaaagagcaaagccccctctgtgtcccgagggagccaggagcccaggtcagggagccgcaagccagccttcacagaggcctcctgcccgctctccaggttatttgaagaaccagagaaaccgccaccaacggggaggcccccagccccaccccgagcagctccccgggaggagcccttgacccccaggttgaagccagagggagctcctgaaccagaaggggtggcggcccccccacccaagaacagcttcaataaccctgcctactacgtccttgaaggggtcccgcaccagctgctgcccccggagccaccctcgcctgccagggcccctgtcccatctgccaccaagaacaaagtggccattacagtgcctgctccacagcttgggcaccaccggcaccctcgtgtgggagaggggagttcttcagatgaggagtctggaggcacactgccccctccagactttccacctccaccactgccggactcagccatcttcctgccccccagcctggatcctttaccagggccagtggtccggggccgtggtggggctgaggcccgtggcccaccacctcccaaggcccatccaaggcctccactgcccccaggcccctcaccagccagcactttcctgggggaagtgggcagtggggatgaccggtcctgctcggtgctgcagatggccaagacgctgagcgaggtggactatgcccctgctgggcctgcacgctcagcgctcctcccaggccccctggagctgcagcccccccggggactgccctcggactatggccggcccctcagcttccctccaccccgcatccgggagagcatccaggaagacctggcagaggaggctccgtgcctgcagggcgggcgggccagcgggctgggcgaggcaggcatgagtgcctggctgcgggccatcggcttggagcgctatgaggagggcctggtgcataatggctgggacgacctggagtttctcagtgacatcaccgaggaggacttggaggaggctggggtgcaggacccggctcacaagcgcctccttctggacaccctgcagctcagcaagtgatagcggaggcaccacgaagctgtgaactcagagcccctccctgctaccaaggcccagctatggccccagggttgaaaagttatgagggtcagggcagtatctctctgcctatttattggggtgcctatttattggggatctgcattccccgctgcccaatcatttgcaatgccctaattagggcatcctgcccctcgccttttaggctcaggacggaaggtcagttgccatggttaccgaggaccctggttactctggtgctgtcctgttttactggaccccgcctcccagccccaggggtgcctgtgggggtccatttgggtacgtctgggcccccactttcaccagtttctgcggccttccaccgggcctgaaccacagcggaggagctccgctaagacctccccacccccgctgggggtgggggcgggtgtccgtccggaaatgaaggaatagcccgaggaccgggctggggtttatttaaactgttctgtgtgggtctggggagggagagcaccttaatattattggggttggttggggtggggcaggatctcagccataaagtgccagtttgcttagttctcactgtctcctggtctgtgctgccctgctctggggatgcacggcggcagggtgggggagggaggttcctcgcaggtctcagcccgggacagggtcttgcaagcagcctcctgggcagtcgtaagggttgcggcgtgatgtcttcaataaattaagttttatttggaaaa

SEQ ID NO: 3323 - protein, 1258 aa, Homo sapiens
MASACGAPGPGGALGSQAPSWYHRDLSRAAAEELLARAGRDGSFLVRDSESVAGAFALCVLYQKHVHTYRILPDGEDFLAVQTSQGVPVRRFQTLGELIGLYAQPNQGLVCALLLPVEGEREPDPPDDRDASDGEDEKPPLPPRSGSTSISAPTGPSSPLPAPETPTAPAAESAPNGLSTVSHDYLKGSYGLDLEAVRGGASHLPHLTRTLATSCRRLHSEVDKVLSGLEILSKVFDQQSSPMVTRLLQQQNLPQTGEQELESLVLKLSVLKDFLSGIQKKALKALQDMSSTAPPAPQPSTRKAKTIPVQAFEVKLDVTLGDLTKIGKSQKFTLSVDVEGGRLVLLRRQRDSQEDWTTFTHDRIRQLIKSQRVQNKLGVVFEKEKDRTQRKDFIFVSARKREAFCQLLQLMKNKHSKQDEPDMISVFIGTWNMGSVPPPKNVTSWFTSKGLGKTLDEVTVTIPHDIYVFGTQENSVGDREWLDLLRGGLKELTDLDYRPIAMQSLWNIKVAVLVKPEHENRISHVSTSSVKTGIANTLGNKGAVGVSFMFNGTSFGFVNCHLTSGNEKTARRNQNYLDILRLLSLGDRQLNAFDISLRFTHLFWFGDLNYRLDMDIQEILNYISRKEFEPLLRVDQLNLEREKHKVFLRFSEEEISFPPTYRYERGSRDTYAWHKQKPTGVRTNVPSWCDRILWKSYPETHIICNSYGCTDDIVTSDHSPVFGTFEVGVTSQFISKKGLSKTSDQAYIEFESIEAIVKTASRTKFFIEFYSTCLEEYKKSFENDAQSSDNINFLKVQWSSRQLPTLKPILADIEYLQDQHLLLTVKSMDGYESYGECVVALKSMIGSTAQQFLTFLSHRGEETGNIRGSMKVRVPTERLGTRERLYEWISIDKDEAGAKSKAPSVSRGSQEPRSGSRKPAFTEASCPLSRLFEEPEKPPPTGRPPAPPRAAPREEPLTPRLKPEGAPEPEGVAAPPPKNSFNNPAYYVLEGVPHQLLPPEPPSPARAPVPSATKNKVAITVPAPQLGHHRHPRVGEGSSSDEESGGTLPPPDFPPPPLPDSAIFLPPSLDPLPGPVVRGRGGAEARGPPPPKAHPRPPLPPGPSPASTFLGEVGSGDDRSCSVLQMAKTLSEVDYAPAGPARSALLPGPLELQPPRGLPSDYGRPLSFPPPRIRESIQEDLAEEAPCLQGGRASGLGEAGMSAWLRAIGLERYEEGLVHNGWDDLEFLSDITEEDLEEAGVQDPAHKRLLLDTLQLSK

SEQ ID NO: 3324 - DNA, 1026 bp, Homo sapiens
cttgcgttgcacccgggctgagtgcggccgcgacggggcgggcggactctcgggcgctcagagctggcctcgggtcctcggagcctggcgctcgaacctcccttccgacctccacccggaccccgaccccgacccggcctggcccggcccccgcccccgccccccgggccgatggactactcctacctcaattcgtacgactcgtgcgtggcggccatggaggcgtccgcctacggcgactttggcgcctgcagccagcccggcggcttccaatacagccccctgcggcccgctttccccgcggcagggccgccctgccccgcgctcggctcctccaactgcgcacttggcgccctacgcgaccaccagcccgcgccctactcggcagtgccctacaagttcttcccagagccatccggcctgcacgagaagcgcaagcagcggcgcatccgcaccacgttcaccagcgcgcagctcaaggagctggagcgcgttttcgctgagacccactaccccgacatttacacgcgtgaggagctggcgctcaagatcgacctcactgaggctcgcgtgcaggtctggttccagaaccgccgggccaagttccgcaaacaggagcgcgcggccagcgccaagggcgcggcgggcgcggcgggcgccaaaaagggcgaggcgcgctgctcctccgaggacgacgattccaaggagtccacgtgcagccccacgcccgatagcaccgcctcgctgccgccgccgcctgcgcccggcctggccagcccgcgcctgagccccagcccgctgcccgtcgcactgggctccgggccgggacctgggccggggccacagccgctcaagggcgcactgtgggccggtgtggcgggcggtgggggcggcgggcctggcgcgggagcggccgaactacttaaggcttggcagccggcggagtccggccccgggcccttctccggggttctgtcctcctttcaccggaagcccggccccgccctgaagaccaatctcttctag

SEQ ID NO: 3325 - DNA, 1408 bp, Homo sapiens
gataacaagacctctgccagaagaaccatggctttggaaggcggagttcaggctgaggagatgggtgcggtcctcagtgagcccctgcctccctgaacataggaaacccacctgggcagccatggaatgggacaatggcacaggccaggctctgggcttgccacccaccacctgtgtctaccgcgagaacttcaagcaactgctgctgccacctgtgtattcggcggtgctggcggctggcctgccgctgaacatctgtgtcattacccagatctgcacgtcccgccgggccctgacccgcacggccgtgtacaccctaaaccttgctctggctgacctgctatatgcctgctccctgcccctgctcatctacaactatgcccaaggtgatcactggccctttggcgacttcgcctgccgcctggtccgcttcctcttctatgccaacctgcacggcagcatcctcttcctcacctgcatcagcttccagcgctacctgggcatctgccacccgctggccccctggcacaaacgtgggggccgccgggctgcctggctagtgtgtgtagccgtgtggctggccgtgacaacccagtgcctgcccacagccatcttcgctgccacaggcatccagcgtaaccgcactgtctgctatgacctcagcccgcctgccctggccacccactatatgccctatggcatggctctcactgtcatcggcttcctgctgccctttgctgccctgctggcctgctactgtctcctggcctgccgcctgtgccgccaggatggcccggcagagcctgtggcccaggagcggcgtggcaaggcggcccgcatggccgtggtggtggctgctgcctttgccatcagcttcctgccttttcacatcaccaagacagcctacctggcagtgcgctcgacgccgggcgtcccctgcactgtattggaggcctttgcagcggcctacaaaggcacgcggccgtttgccagtgccaacagcgtgctggaccccatcctcttctacttcacccagaagaagttccgccggcgaccacatgagctcctacagaaactcacagccaaatggcagaggcagggtcgctgagtcctccaggtcctgggcagccttcatatttgccattgtgtccggggcaccaggagccccaccaaccccaaaccatgcggagaattagagttcagctcagctgggcatggagttaagatccctcacaggacccagaagctcaccaaaaactatttcttcagccccttctctggcccagaccctgtgggcatggagatggacagacctgggcctggctcttgagaggtcccagtcagccatggagagctggggaaaccacattaaggtgctcacaaaaatacagtgtgacgtgtactgtca

SEQ ID NO: 3326 - DNA, 2732 bp, Homo sapiens
cgcgtcctgtcccggcgccttccgcgcaccggccaccgccagtctccgagccccgtgacctgcaggtcctccggccgcgactccgggccggccctgcgtggtggctgtcggggggcgcgcggggaagcagcggaacttgcggtgtgaggggccggcggggcccggagcggtccccggcccgggaaacttggaccgagaccaggccggcgaccaccaggggcctgaggatgaagccaagtctgctgtgccggcccctgtcctgcttccttatgctgctgccctggcctctcgccaccctgacatcaacaaccctttggcagtgcccacctggggaggagcccgacctggacccagggcagggcacattatgcaggccctgccccccaggcaccttctcagctgcatggggctccagcccatgccagccccatgcccgttgcagcctttggaggaggctggaggcccaggtgggcatggcaactcgagatacactctgtggagactgctggcctgggtggtttgggccttggggggttccccgcgttccatgtcaaccatgttcctgggcacctctgggtactcatggctgtgatgagtgggggcggcgggcccgacgtggcgtggaggtggcagcaggggccagcagcggtggtgagacacggcagcctgggaacggcacccgggcaggtggcccagaggagacagccgcccagtacgcggtcatcgccatcgtccctgtcttctgcctcatggggctgttgggcatcctggtgtgcaacctcctcaagcggaagggctaccactgcacggcgcacaaggaggtcgggcccggccctggaggtggaggcagtggaatcaaccctgcctaccggactgaggatgccaatgaggacaccattggggtcctggtgcgcttgatcacagagaagaaagagaatgctgcggccctggaggagctgctgaaagagtaccacagcaaacagctggtgcagacgagccacaggcctgtgtccaagctgccgccagcgcccccgaacgtgccacacatctgcccgcaccgccaccatctccacaccgtgcagggcctggcctcgctctctggcccctgctgctcccgctgtagccagaagaagtggcccgaggtgctgctgtcccctgaggctgtagccgccactactcctgttcccagccttctgcctaacccgaccagggttcccaaggccggggccaaggcagggcgtcagggcgagatcaccatcttgtctgtgggcaggttccgcgtggctcgaattcctgagcagcggacaagttcaatggtgtctgaggtgaagaccatcacggaggctgggccctcgtggggtgatctccctgactccccacagcctggcctcccccctgagcagcaggccctgctaggaagtggcggaagccgtacaaagtggctgaagcccccagcagagaacaaggccgaggagaaccgctatgtggtccggctaagtgagagcaacctggtcatctgaggggcggtctagtctaaggacactgcggccctgccctgggaggttccgaaggcttcctggaggaggtggagctgcagctgggactgtgaggaccgagaagcaatggcccagcagacgagacagcaaagaccaaggcctggaggtgggagcgtctgccccagtgaggaggcaggtggccggcgggcactgtgtacaggagcaggctgagccccgcccctggccctgctgccatgttgctcccctgaaggatgccccgacccccgtgcctgccctggctggatcctaggagcccacgggattctctgtatcatcagaggctgggcttggcagaggggaggggcctgtgcccgtcacccctggccccattccttggtaattagccacacccttgcctctktacagggccctaagarcagatgtkcgtycccctcctyttycagcaggtctataaagggaaaggggtagcagaaaagtcctgggctargagagtgagtccctgggttctaatcttgggcacatctgtgsccatcrctgggtccatttttctsactgtgaagtaaggagagamgtctcagtacccagggcctcttcagctctttgtaggttctgggctgggttgtgggggactggggagctgggcttctaccaatcccctccccaattagtagcttttatcccagcccccgttttttgctgctttccagggccttctgccttcaaggcccccatggggcttgtcccatccatggctctgcctacggaaggggcttaatgcatgtgcctgcccctcccccagctgtttttaatgaaactgaaaaaatagacttgatcccggcaggactgtgatacagagccctagccctgcccagcccagccccaagatctcaggagctttagggagaagacttggtggggctggagcacaccttgggccttcagtggtttctgtgtccctgtggtgccagtgcttctgggcagtgcaggcggctgccaggcccagccctgacttccactctggctcagcaacctggttatttatgtggggccgtgcaggcatgggcccactgcctgtccatcctgtttctcttatttattgaaactcaccattgccctatccttgtgtctccacccccttccatgtgttgaataataaaaggtgggaaagtgcaaaaaaaaaaaaaaaaaaaaaaaaaaaaaaaaaaaaaaaaaaaa

SEQ ID NO: 3327 - protein, 430 aa, Homo sapiens
MKPSLLCRPLSCFLMLLPWPLATLTSTTLWQCPPGEEPDLDPGQGTLCRPCPPGTFSAAWGSSPCQPHARCSLWRRLEAQVGMATRDTLCGDCWPGWFGPWGVPRVPCQPCSWAPLGTHGCDEWGRRARRGVEVAAGASSGGETRQPGNGTRAGGPEETAAQYAVIAIVPVFCLMGLLGILVCNLLKRKGYHCTAHKEVGPGPGGGGSGINPAYRTEDANEDTIGVLVRLITEKKENAAALEELLKEYHSKQLVQTSHRPVSKLPPAPPNVPHICPHRHHLHTVQGLASLSGPCCSRCSQKKWPEVLLSPEAVAATTPVPSLLPNPTRVPKAGAKAGRQGEITILSVGRFRVARIPEQRTSSMVSEVKTITEAGPSWGDLPDSPQPGLPPEQQALLGSGGSRTKWLKPPAENKAEENRYVVRLSESNLVI

SEQ ID NO: 3328 - DNA, 500 bp, Homo sapiens
ctttccctcctgccgccgagtcgcgcggaggcggaggcttgggtgcgttcaagattcaggttcacccgtaacccactgccatggccgaggaaggcattgctgctggaggtgtaatggaggttaatactgctttacaagaggtgctgaagaccgccctcatccacgatggcctagcacgtggaattcgcgaagctgccaaagtcttagacaagcgccaagcccatctttgtgtgcttgcatccaactgtgatgagcctatgtatgtcaagttggtggaggccctttgtgctgaacaccaaatcaacctaattaaggttgatgacaacaagaaactaggagaatgggtaggcctctgtaaaattgacagagaggggaaaccccataaagtggttggttacagttgtgtagtagttaaggactatggcaaggagtctcaggccaaggatgtcatcgaagagtatttcaaatgcaagaaatgaagaaataaatctttggctcac

SEQ ID NO: 3329 - DNA, 1370 bp, Homo sapiens
ggcggcggcagctgtacagggcgggagaagcggtggtagcggaggctgtagtggggctggtggtgcttccaactgcgggacaggaagtggccgtagcggcttgttggataagtggaagatagatgataagcctgtaaaaattgacaagtgggatggatcagctgtgaaaaactctttggatgattctgccaaaaaggtacttctggaaaaatacaaatatgtggagaattttggtctaattgatggtcgcctcaccatctgtacaatctcctgtttctttgccatagtggctttgatttgggattatatgcacccctttccagagtccaaacccgttttggctttgtgtgtcatatcctattttgtgatgatggggattctgaccatttatacctcatataaggagaagagcatctttctcgtggcccacaggaaagatcctacaggaatggatcctgatgatatttggcagctgtcctccagtcttaaaaggtttgatgacaaatacaccttgaagctgaccttcatcagtgggagaacaaagcagcagcgggaagccgagttcacaaagtccattgctaagttttttgaccacagtgggacactggtcatggatgcatatgagcctgaaatatccaggctccatgacagtcttgccatagaaagaaaaataaagtagccaattctaaaagtagccctctttctcctggatcttgctgaattagtggcttggggggtgggggagataaaaagaacttaaaatgggtaaagtaagaaatgttaaaaagtccctgttttgtcctgaaattttagtctattctgggtaaataggattttctgacacagatatgagaagttgtagctctgatgtctagctgtagtctccttgatctgctgattgcattattttaatttgcttttctgggaaagcagttttgctaaaagctgtacagactttttcttttgtacctagcagtactttatatagtatagctttgggccatgtagcattttaagactcaattttaaaaaattattaatctgttgctgactcttaattcctatttcaatatgtgtttccttgaagaattcaggatacaacttcttgtgtatgacagctttccttcacacactatttttgtgggtgtgtatatatctgatttgggaagaatttaaaaaacacatagctttttaatttgtttgaaacagactttctgcctgttacatttttgcttttaaccaattaaagaagccaatggcattttagttttatattgtgttttccactagtatatccctgttgatttgtttgtgccttttattaactgccattttctaaaatttttttcaataaaaggaaggaagatgtg

SEQ ID NO: 3330 - protein, 123 aa, Homo sapiens
MHPFPESKPVLALCVISYFVMMGILTIYTSYKEKSIFLVAHRKDPTGMDPDDIWQLSSSLKRFDDKYTLKLTFISGRTKQQREAEFTKSIAKFFDHSGTLVMDAYEPEISRLHDSLAIERKIK

SEQ ID NO: 3331 - DNA, 843 bp, Homo sapiens
gcggagcgcggcggcaagatggcagtgcaaatatccaagaagaggaagtttgtcgctgatggcatcttcaaagctgaactgaatgagtttcttactcgggagctggctgaagatggctactctggagttgaggtgcgagttacaccaaccaggacagaaatcattatcttagccaccagaacacagaatgttcttggtgagaagggccggcggattcgggaactgactgctgtagttcagaagaggtttggctttccagagggcagtgtagagctttatgctgaaaaggtggccactagaggtctgtgtgccattgcccaggcagagtctctgcgttacaaactcctaggagggcttgctgtgcggagggcctgctatggtgtgctgcggttcatcatggagagtggggccaaaggctgcgaggttgtggtgtctgggaaactccgaggacagagggctaaatccatgaagtttgtggatggcctgatgatccacagcggagaccctgttaactactacgttgacactgctgtgcgccacgtgttgctcagacagggtgtgctgggcatcaaggtgaagatcatgctgccctgggacccaactggtaagattggccctaagaagcccctgcctgaccacgtgagcattgtggaacccaaagatgagatactgcccaccacccccatctcagaacagaagggtgggaagccagagccgcctgccatgccccagccagtccccacagcataacagggtctccttggcagctgtattctggagtctggatgttgctctctaaagacctttaataaaattttgtacaaagacaaaaaaaaaaaaaaa

SEQ ID NO: 3332 - protein, 243 aa, Homo sapiens
MAVQISKKRKFVADGIFKAELNEFLTRELAEDGYSGVEVRVTPTRTEIIILATRTQNVLGEKGRRIRELTAVVQKRFGFPEGSVELYAEKVATRGLCAIAQAESLRYKLLGGLAVRRACYGVLRFIMESGAKGCEVVVSGKLRGQRAKSMKFVDGLMIHSGDPVNYYVDTAVRHVLLRQGVLGIKVKIMLPWDPTGKIGPKKPLPDHVSIVEPKDEILPTTPISEQKGGKPEPPAMPQPVPTA

SEQ ID NO: 3333 - DNA, 2047 bp, Homo sapiens
gtcgcggctcgagagcgagagtcacgtcccggcgctagcccagcccgacccaggcccaccgtggtgcacgcaaaccacttcctggccatgcgctccctcctgcttctcagcgccttctgcctcctggaggcggccctggccgccgaggtgaagaaacctgcagccgcagcagctcctggcactgcggagaagttgagccccaaggcggccacgcttgccgagcgcagcgccggcctggccttcagcttgtaccaggccatggccaaggaccaggcagtggagaacatcctggtgtcacccgtggtggtggcctcgtcgctggggctcgtgtcgctgggcggcaaggcgaccacggcgtcgcaggccaaggcagtgctgagcgccgagcagctgcgcgacgaggaggtgcacgccggcctgggcgagctgctgcgctcactcagcaactccacggcgcgcaacgtgacctggaagctgggcagccgactgtacggacccagctcagtgagcttcgctgatgacttcgtgcgcagcagcaagcagcactacaactgcgagcactccaagatcaacttccgcgacaagcgcaggccgctgcagtccatcaacgagtgggccgcgcagaccaccgacggcaagctgcccgaggtcaccaaggacgtggagcgcacggacggcgccctgttagtcaacgccatgttcttcaagccacactgggatgagaaattccaccacaagatggtggacaaccgtggcttcatggtgactcggtcctataccgtgggtgtcatgatgatgcaccggacaggcctctacaactactacgacgacgagaaggaaaagctgcaaatcgtggagatgcccctggcccacaagctctccagcctcatcatcctcatgccccatcacgtggagcctctcgagcgccttgaaaagctgctaaccaaagagcagctgaagatctggatggggaagatgcagaagaaggctgttgccatctccttgcccaagggtgtggtggaggtgacccatgacctgcagaaacacctggctgggctgggcctgactgaggccattgacaagaacaaggccgacttgtcacgcatgtcaggcaagaaggacctgtacctggccagcgtgttccacgccaccgcctttgagttggacacagatggcaacccctttgaccaggacatctacgggcgcgaggagctgcgcagccccaagctgttctacgccgaccaccccttcatcttcctagtgcgggacacccaaagcggctccctgctattcattgggcgcctggtccggcctaagggtgacaagatgcgagacgagttatagggcctcagggtgcacacaggatggcaggaggcatccaaaggctcctgagacacatgggtgctattggggttgggggggaggtgaggtaccagccttggatactccatggggtgggggtggaaaagcagaccggggttcccgtgtgcctgagcggaccttcccagctagaattcactccacttggacatgggccccagataccatgatgctgagcccggaaactccacatcctgtgggacctgggccatagtcattctgcctgccctgaaagtcccagatcaagcctgcctcaatcagtattcatatttatagccaggtaccttctcacctgtgagaccaaattgagctaggggggtcagccagccctcttctgacactaaaacacctcagctgcctccccagctctatcccaacctctcccaactataaaactaggtgctgcagcccctgggaccaggcacccccagaatgacctggccgcagtgaggcggattgagaaggagctcccaggaggggcttctgggcagactctggtcaagaagcatcgtgtctggcgttgtggggatgaactttttgttttgtttcttccttttttagttcttcaaagatagggagggaagggggaacatgagcctttgttgctatcaatccaagaacttatttgtacattttttttttcaataaaacttttccaatgacattt

SEQ ID NO: 3334 - protein, 418 aa, Homo sapiens [sequence omitted]

SEQ ID NO: 3335 - DNA, 4156 bp, Homo sapiens
ttgatttggtatagtgggaacatttgctttggagacagatgaactggattctgatcgtgaccctgctattttctccttgtgtgactttggagccatgagaccccagatcctgctgctcctggccctgctgaccctaggcctggctgcacaacaccaagacaaagtgccctgtaagatggtggacaagaaggtctcgtgccaggttctgggcctgctccaggtcccctcggtgctcccgccagacactgagacccttgatctatctgggaaccagctgcggagtatcctggcctcacccctgggcttctacacagcacttcgtcacctggacctgagcaccaatgagatcagcttcctccagccaggagccttccaggccctgacccacctggagcacctcagcctggctcacaaccggctggcgatggccactgcgctgagtgctggtggcctgggccccctgccacgcgtgacctccctggacctgtctgggaacagcctgtacagcggcctgctggagcggctgctgggggaggcacccagcctgcataccctctcactggcggagaacagtctgactcgcctcacccgccacaccttccgggacatgcctgcgctggagcagcttgacctgcatagcaacgtgctgatggacatcgaggatggcgccttcgagggtctgccccgcctgacccatctcaacctctccaggaattccctcacctgcatctccgacttcagcctccagcagctgcgggtgctagacctgagctgcaacagcatcgaggcctttcagacggcctcccagccccaggctgagttccagctcacctggcttgacctgcgggagaacaaactgctccatttccccgacctggccgcgctcccgagactcatctacctgaacttgtccaacaacctcatccggctccccacagggccaccccaggacagcaagggcatccacgcaccttccgagggctggtcagccctgcccctctcagcccccagcgggaatgccagcggccgccccctttcccagctcttgaatctggatttgagctacaatgagattgagctcatccccgacagctttcttgagcacctgacctccctgtgcttcctgaacctcagcagaaactgcttgcggacctttgaggcccggcgcttaggctccctgccctgcctgatgctccttgacttaagccacaatgccctggagacactggaactgggcgccagagccctggggtctctgcggacgctgctcctacagggcaatgccctgcgggacctgcccccatacacctttgccaatctggccagcctgcagcggctcaacctgcaggggaaccgagtcagcccctgtggggggccagatgagcctggcccctccggctgtgtggccttctccggcatcacctccctccgcagcctgagcctggtggataatgagatagagctgctcagggcaggggccttcctccacaccccactgactgagctggacctttcttccaatcctgggctggaggtggccacgggggccttgggaggcctggaggcctccttggaggtcctggcactgcagggcaacgggctgatggtcctgcaggtggacctgccctgcttcatctgcctcaagcggctcaatcttgccgagaaccgcctgagccaccttcccgcctggacacaggctgtgtcactggaggtgctggacctgcgaaacaacagcttcagcctcctgccaggcagtgccatgggtggcctggagaccagcctccggcgcctctacctgcaggggaatccactcagctgctgcggcaatggctggctggcagcccagctgcaccagggccgtgtggacgtggacgccacccaggacctgatctgccgcttcagctcccaggaggaggtgtccctgagccacgtgcgtcctgaggactgtgagaaggggggactgaagaacatcaacctcatcatcatcctcaccttcatactggtctctgccatcctcctcaccacgctggccgcctgctgctgcgtccgccggcagaagtttaaccaacagtataaagcctaaagaagccgggagacactctaggtcagtgggggagcctgaggtacagagaagagtgaggactgactcaaggtcacacagtgatccgggatcccagaactctggtctccaaattacagcccaggacacctttctctgccgcctgctgcatcagtgggtgacccccttcccgggctgcactttgggtccagctgtggaagccagaagttgggcggtttcagggacagccgagaataatgttgacctgtcagatcaacaaatcttcactgagcatgtattttgtgccacaccctgctctgggcactgggaatgctgggaaatgagatacattcccgccctcaagaatctcccagtctggtaggagagagtgctgcagagccacgtggccgccacgcagtgtgcttagggcctgaggtgtgaaagcccagggctccagagctcggcaggccccgctggtttggtgcggtgagtcctgccccggctgtgccagggtgagggagggccaagcccaggaggatttgtctgagacatttccaagcagactgtttgtcacgtcttctgagaatgactttcagtctctctgaaaatgaaaagcttaggaccagaagagagaattggagctgtacgagtgtgtctcggatctggtgttgttaggtgggccacggcggctccagcagggtctggttaaggggtccagcccagcactggaccattccgtctcctgctctggacttgccctctcccttcctggcactctcatgttgcataccctgaccccagtgctgctctaagcaccgtccctgcccagccccacttctccatcgcagccccaccttggctgctgagccaggagctaaaaccttagatatctggttctgttttgcacccagcttggcagatgtggatttgaatccaagccttgtgtctgcccctatgtgacagctctatattttatccccgttttataaaagaggaaactgaagttctgaaaatctccttccagggccccagctaactaatgccataggtgagattcaaaccttcatccttctgtctccagggcctgatctttaccactgcaggggctgcaggccgttaagtggacaggaagtggccccacatagcccgagcagggtctggaagcatcctgtgctgtgcacacctgctctctcctctctcccaggcaggcagctgcaggcgctctcctccttctctgcctgtttccctcctcccttcctttccaccctggtgtgggttctcctgttctctctgtgctcttgcattctctcattcccttttcctctattgagcagagcctggagtttgagactatggaatccaacctccccattgcacagatggggaaactgaggcttaggaagagaatgaaacttgtggagagcttatacagagcctctgggggaaaaaagagcccttatttgtggggtgagattgggggttggaccagagtgatgtcctctctcagctatcacatcacaagataatgctggctccaaacttcctttctgtgcctcatcatgcaaggatcttttttccctcttacaaaaacaggtaaaaagcctcacccagatgacccccatccctcataccatggagtcatgagctgtctgggaagaatggacgtgctgggaccaactcaagaccttgttttgctgtcttcatcatcttacctgtgcttggcccacagtctggctcatgatgtgggctcagtaatgtgcgagaaagtgaaaatgccactctctccaccccattttacagaggagaacaccaaggcccagaggaagttaagggagagtcaatgggcagagccagggctaggccctggtggtgtgtggagcacccaggcagacccagtcctggttgggatcacacccacgggtgctactgcacgtaacactcctccttaggcctggaggccaaggtgtgggtccccacgcctgatctttgaaaacactacacagggctgctgtcacttcccagggcccaggcctcagcccaggcctcgggaccaactctttgtataacctacctgaatgtattaaaaactaattttgg

SEQ ID NO: 3336 - DNA, 2023 bp, Homo sapiens
atggatagaatggtgctatctgagctgttataatgttggcctcatgcctagctttatattgcagcacgtctgaggcattggtttttcatccttccaaacttttggtctacagagactattagaagattaagtagctgctgctggtggtgacaatgtcaaataacggcctagacattcaagacaaacccccagcccctccgatgagaaataccagcactatgattggagccggcagcaaagatgctggaaccctaaaccatggttctaaacctctgcctccaaacccagaggagaagaaaaagaaggaccgattttaccgatccattttacctggagataaaacaaataaaaagaaagagaaagagcggccagagatttctctcccttcagattttgaacacacaattcatgtcggttttgatgctgtcacaggggagtttacgggaatgccagagcagtgggcccgcttgcttcagacatcaaatatcactaagtcggagcagaagaaaaacccgcaggctgttctggatgtgttggagttttacaactcgaagaagacatccaacagccagaaatacatgagctttacagataagtcagctgaggattacaattcttctaatgccttgaatgtgaaggctgtgtctgagactcctgcagtgccaccagtttcagaagatgaggatgatgatgatgatgatgctaccccaccaccagtgattgctccacgcccagagcacacaaaatctgtatacacacggtctgtgattgaaccacttcctgtcactccaactcgggacgtggctacatctcccatttcacctactgaaaataacaccactccaccagatgctttgacccggaatactgagaagcagaagaagaagcctaaaatgtctgatgaggagatcttggagaaattacgaagcatagtgagtgtgggcgatcctaagaagaaatatacacggtttgagaagattggacaaggtgcttcaggcaccgtgtacacagcaatggatgtggccacaggacaggaggtggccattaagcagatgaatcttcagcagcagcccaagaaagagctgattattaatgagatcctggtcatgagggaaaacaagaacccaaacattgtgaattacttggacagttacctcgtgggagatgagctgtgggttgttatggaatacttggctggaggctccttgacagatgtggtgacagaaacttgcatggatgaaggccaaattgcagctgtgtgccgtgagtgtctgcaggctctggagttcttgcattcgaaccaggtcattcacagagacatcaagagtgacaatattctgttgggaatggatggctctgtcaagctaactgactttggattctgtgcacagataaccccagagcagagcaaacggagcaccatggtaggaaccccatactggatggcaccagaggttgtgacacgaaaggcctatgggcccaaggttgacatctggtccctgggcatcatggccatcgaaatgattgaaggggagcctccatacctcaatgaaaaccctctgagagccttgtacctcattgccaccaatgggaccccagaacttcagaacccagagaagctgtcagctatcttccgggactttctgaaccgctgtctcgagatggatgtggagaagagaggttcagctaaagagctgctacaggtgagaaaactgaggtttcaagtgtttagtaacttttccatgatagctgcatcaattcctgaagattgccaagcccctctccagcctcactccactgattgctgcagctaaggaggcaacaaagaacaatcactaaaaccacactcaccccagcctcattgtgccaagccttctgtgagataaatgcacatttcagaaattccaactcctgatgccctcttctccttgccttgcttctcccatttcctgatctagcactcctcaagactttgatccttggaaaccgtgtgtccagcattgaagagaactgcaactgaatg

SEQ ID NO: 3337 - DNA, 1368 bp, Homo sapiens
gtgactgcctcttccagggcgggcggtgtggtgcacgcattgctgtgctccaactccctcagggcctgtgttgccgcactctgctgctatgagcttcctcaaaagtttcccgccgcctgggccagcggaggggctcctgcggcagcagccagacactgaggctgtgctgaacgggaagggcctcggcactggtaccctttacatcgctgagagccgcctgtcttggttagatggctctggattaggattctcactggaataccccaccattagtttacatgcattatccagggaccgaagtgactgtctaggagagcatttgtatgttatggtgaatgccaaatttgaagaagaatcaaaagaacctgttgctgatgaagaagaggaagacagtgatgatgatgttgaacctattactgaatttagatttgtgcctagtgataaatcagcgttggaggcaatgttcactgcaatgtgcgaatgccaggccttgcatccagatcctgaggatgaggattcagatgactacgatggagaagaatatgatgtggaagcacatgaacaaggacagggggacatccctacattttacacctatgaagaaggattatcccatctaacagcagaaggccaagccacactggagagattagaaggaatgctttctcagtctgtgagcagccagtataatatggctggggtcaggacagaagattcaataagagattatgaagatgggatggaggtggataccacaccaacagttgctggacagtttgaggatgcagatgttgatcactgaaaatgatttatgcaagtttaagattctgctcctaagtgtaggagagaacttggtgcctcttccactctggagtgaagttaatgaaagtctttttccttttccaaaacccaacctgaaccagttctttcttgagacagactatactgagacaacaagttgtcaccagcagaagatagataatatgacctttattaacttgatgaattaacttaaccaagagggtatttgtagtttactatttaccctaaaactttctgtgtctgggtaccctctgagtaggcctataattcctaccttgactgtgtgcatcatttgtaagctagcagatctatgtggtgaaaatgcacaggagcttggtagactgcgggggaaagagagagctcctttcgccatgttttaccagtctgctgttataacctcttaggttgtatcctttaatttccagccttttaggttagtttctgtaacagaacaagtgagtctgggatgaagtcctcaaagtacttcaaatggtaattgttttgtttttgtaatagcttaacaaataaacctaggttttctataaa

SEQ ID NO: 3338 - protein, 237 aa, Homo sapiens
MSFLKSFPPPGPAEGLLRQQPDTEAVLNGKGLGTGTLYIAESRLSWLDGSGLGFSLEYPTISLHALSRDRSDCLGEHLYVMVNAKFEEESKEPVADEEEEDSDDDVEPITEFRFVPSDKSALEAMFTAMCECQALHPDPEDEDSDDYDGEEYDVEAHEQGQGDIPTFYTYEEGLSHLTAEGQATLERLEGMLSQSVSSQYNMAGVRTEDSIRDYEDGMEVDTTPTVAGQFEDADVDH

SEQ ID NO: 3339 - DNA, 848 bp, Homo sapiens
cgttctttgccgagagtcgtcggggtttcctgcttcaacagtgcttggacggaacccggtgctcgtcccccaccccagccggccgccgccacctctccttagtcgccgccatgaggaccacgtccacctcacaggtgcgccagaactaccaccaggactcagaggccgccatcaaccgccagatcaacctagagctctgtgcctcctacgtttacctgtccatgtcttactgctttgaccgtgatgatgtggctttgaagaactttgccaaatactttcttcaccaatctcatgaggagagggagcatgctgagaaactgatgaagctgcagaaccaacgaggtggccgaatcttccttcaggatatcaaaaaaccagactgtgatgactgggagagcgggctgaatgtgatggagtgtgcattacatttggaaaaaaatgtgaatcagtcactactggaactgcacaaattggccactgacaaaaatgacccccatttgtgtgacttcattgagacacattacctgaatgagcaggtgaaagccatcaaagaattggatgaccatgtgaccaacttgcacaagatgggagcactcgaatctggcttggcagaatatctctttgacaagcacaccctgggagacagtgataatgaaagctaagcctcggctaatttccccgtagccgtggggtgacttccctggtcaccaaggcagtgcatgcatgttggggtttcctttaccttttctataagttgtaccaaaacatccacctaagttctttgatttgtgccattccttcagatgaagaaatttggtacccccccccaaaaaaaaaaaaaaaaaatc

SEQ ID NO: 3340 - protein, 183 aa, Homo sapiens
MTTASTSQVRQNYHQDSEAAINRQINLELYASYVYLSMSYYFDRDDVALKNFAKYFLHQSHEEREHAEKLMKLQNQRGGRIFLQDIKKPDCDDWESGLNAMECALHLEKNVNQSLLELHKLATDKNDPHLCDFIETHYLNEQVKAIKELGDHVTNLRKMGAPESGLAEYLFDKHTLGDSDNES

SEQ ID NO: 3341 - DNA, 555 bp, Homo sapiens
gtcgtcgtggttttccttgtagttcgtggtctgagaccaggcctcaagtggaaacggcgtcaccatgatcgcacggcggaacccagaacccttacggtttctgccggatgaggcccggagcctgcccccgcccaagctgaccgacccgcggctcctctacatcggcttcttgggctactgctccggcctgattgataacctaatccggcggaggccgatcgcgacggctggtttgcatcgccagcttctatatattacggcctttttttttgctggatattatcttgtaaaacgtgaagactacctgtatgctgtgagggaccgtgaaatgtttggatatatgaaattacatccagaggattttcctgaagaagataagaaaacatatggtgaaatttttgaaaaattccatccaatacgttgaagtcttcaaaatgcttgctccagtttcactgatacctgctgtttctgaatttgatggaacatgtttcttatgacagttgaagcttatgctaatctgtatgttgacaccttgtaattaaaatacgtaccatg

SEQ ID NO: 3342 - DNA, 6007 bp, Homo sapiens
atgagcggcggcggcgacgtggtgtgcaccggctggctgaggaaatcgcctcccgagaagaagttgaggcgctatgcctggaagaaacgctggtttatcctgcggagtggccggatgagcggtgacccagatgttctggaatactacaagaacgatcactccaagaagcctctgcggatcatcaacctgaacttctgtgagcaggtagatgcaggcctgacctttaacaagaaggagctgcaggatagttttgtgtttgacatcaagaccagtgaacgcaccttttacctggtggctgagacagaagaggacatgaataagtgggtccagagcatctgccagatctgtggcttcaatcaggctgaggagagcacagactccctgagaaatgtttcctcagccggtcatggcccccgctcttctccagctgagctcagcagctctagccagcaccttctccgagagcgcaagtcctcagccccatcacactccagccagccaactctgttcacgtttgaaccccctgtgtcaaaccacatgcagcccaccttgtccaccagcgcacctcaggagtatctctacttgcaccagtgcataagccgaagagcagaaaatgcaaggagtgccagcttctctcagggcaccagagcctcttttctcatgaggagtgacacagctgtacaaaaacttgcccagggcaatggacactgtgtcaacgggatcagtggtcaagtccatggcttctatagccttcccaagccgagccggcacaatacagaattcagagacagtacctacgacctcccccgcagcctggcctcccatggccacaccaagggcagcctcacaggctccgagacagataatgaggatgtgtacaccttcaagacgcccagcaacaccctgtgcagggagttcggggacctcctggtagacaatatggatgttccggccaccccactctcagcctaccagatccctaggacattcactctggacaaaaaccacaatgccatgacagtggccactcctggggactcagccatagctcccccaccccgcccccccaagccaagtcaggcagaaacacctcgatggggcagtcctcagcagagaccgccaatcagtgaaaatagcagatctgtcgctgccaccatccccagacgcaacaccctccctgcaatggacaacagccgacttcaccgagcttcttcctgtgagacctacgagtacccacagcgtggtggagagagtgcaggccggtctgctgaatccatgagtgatggagttggctctttcctgccagggaaaatgattgtgggccgatcggacagcaccaattctgaagacaactatgtgcccatgaatccaggttcttccaccctgttggccatggaacgagcaggtgataattcccagagcgtctacatcccaatgagcccaggggcccatcactttgactcacttggctacccatcaacaacccttcctgtgcaccgaggccccagcagaggaagtgagattcagccaccccctgtcaaccgcaacctcaaacctgatcggaaagcaaagccaacaccacttgacctgaggaacaacaccgtcatcgatgaactccccttcaagtcacctatcaccaagtcttggtctagggccaaccacaccttcaactccagctcctcccagtactgccgccccatctccacccagagcatcaccagcacagactcaggagacagcgaagagaactatgtccctatgcaaaacccagtgtctgcatctcccgttcccagtggcacgaacagtcctgcccctaagaagagcaccggcagcgttgattatctggccctggacttccagccgagctccccaagcccccaccgcaagccatctacttcatccgtcacctctgatgagaaggtggactacgttcaggtggacaaggagaagacccaggccctgcagaacaccatgcaggagtggacagacgtgcggcagtcctcagagccttccaagggtgccaagctgtgatgagagggccaccgcagagcccaggaggcagcatctccagagctggcccttcccatctcccctctcccctctcccgttcttcctcccatccacctcctctctactctgccagtctcagccttcaaagcacttgacatcagggaccctgaacccttcccctgggaggtgagggcctgatcaaggcacctcctctgcccactcggggcccagctgtgatttttatcagtaatggccatgcctccacccaccttagttaggagctacttccaaaaagcatccttcagcctcttcctgtcctttagacctgactctctaccagatgtttggagggaagggctggggctctgagccagattccacacctcacgttcagtcacagccctcagctatcttccctccggccactgggctacctctccttcagtcccagaagacaagtctcaccaacccagggagtcaaggaccagcaaaccaaagtggataatggactttttcattcctgtttttcttggcaggagagaagcaaggccactaaaagaggagatggtggagacggaggctcagcagtggtcttgaggggtaaaggacttagatgcccagatgaagagggaaagctgacatctgcagggaacccactttgaggctgaggccatggcaggacagctgctgtggggtgcagaggcagaagatgaaggacaaaaggaagggaaaactgatggccaacctagagcagcaaggagcagggcttggagctcgggtggtggagatgacaaggacactgtggggtctgggtccccagaactctggagctacaggccactctaggcccaagggctagtcctcttccccagtcccctcagaggcccccgccagccccaccttgaaagcagcatacaggggaaggcttggaccaagctgggcgaccaagcacatggggcaggaacacatggtaaaggggtggggaatatgggagggagtgtggtgtggatgggggtgatgcagggactgaggggaaccctgggacaggcacaggctgggcagaggcacagggcagtgcaggggactctgcagtggggtcgggaagtgagtttctttgcagtgagcagtgcagtggaagtcgggcacagaggtagcagacagatgtgaagcagtggtgaaggccatgtagcaagtggggaaatacatccaaagggcctgggagttggggggtgcccaacgcaatccttgggggtgcagggtggagcagaaagtgaaggagggacacgtgcaagagtggtgtgcatggtggtgtgacatgaggaccgttcctaggatgggacagtgggtcaggcaggacaaggagaaagcagggcagaatgatgcctagaggaccacatcaggcatggctgacagcttgtgcccatgggctgtggcgtatgtcagatcgcagggtaggaacgagtctggcctggtgccggcccagtgtttcctcagctcatccgccctctgttgctccctagcattccaggagccatcttggactctcctccccaggtttgaaaggccatcagattagcagggacggggtgtagggcatcacccaaggttccttctcttaaactaagggtgggggatctgaatgtttttatgttgactgttcttgactaaattttcaagagtttcagaagcaacaggacagaccagacgtttcattctaccctggggcgaacagaacttcttcctcccaaacaatgacttcctgccatgtttgatggggacagctaccactgtcctctgcccccattcccctttcagctcccatgagcatgcatagttcaccagaccaatggcctagccattctctaagtcccatcctggaagaagttatttcttcaagagctgcacctctcctcctagcattagtttagatcaactcaaggagtatttattaatggctgctgtctccagtttctggggttaagcactaaggacacaagaatcaatcagaccttctccctgaacttaagatagccacaatcagaaaaaggacaaggacatgagacagtggtgatggccatcagacagagacttcaaatgctgatggagggcagaggaagtacttagggaggttggtgtcagaggcaggagtgggggatcagggaaggtggattctaggaaaagggagtgcctgaggtaggccttagaaggggatgagtcagatttttacagaggaggagggcagggcttgggtccagtggaggaagaaggaaggagaggcttggaaagccttgtgtcttgggaaaaaaaggcctttgagcatatgggtccagccactcagaagtgcaggggccatgccttggtgttccaataagtgaatggaagcagtggtggtagctacactgggcagagttggcagggtgctggttcactctgcccagccctgaatgtgtgccttaaaggccccctacaaggggccccatacgacagagcttttaactggtgccttccctgtacccgcagcagccacaagtgggcccagactattgcagcctcccataaacatgtgagcatgttctgagtgtgccatgatgtgagtggacctggctggaatcttcggagagcgactgaggtgttcaaatcgaatctcccaggaggcttccttccagccccctattctggtaactaccaggaggcttccttccagccccctattctggtaactaccaaaatccctcgggtgcaagtgtaggggtagagatggaaggatgagaggtgaaattgaccttttgaaagcaaagctctggctcacaggccccaaactaccagccgtatctagcatatccccaccctccacccactacctcctccaacaaaggagtcaactcagttgaaaaaactggtcctttggcctatccatgggtcaaagtccacctctcctgggggcctggagaggactgagcctacggaaaggggataccttcccactcagcactgcttcacacaggccccctgcctggggctctccaaggagccttcttcacccacttccagctccacttctgcaaggttaagtcaagtgagaacgatgagaaatagggagatggtgtctccttaagtccttgatctgcctgtctgtggaatgggaggttggattagctgcgctgaggtcccatccacagctggtgctcagctgcttgaaggggagactccctcctctgtaacttctttctgggggattggggtgggcagtacctatccccagtcccctcctagcttgactttagtggtttccaatgtagaagttaacaaagtatgccccattcctgtgacaaaagcacaaccattctgaagttactggagcatgggctcagctcatcctccctctggccccttctcccatggggacatctcggcccagcacccctatcccatttccagagttcttccttccccatctgggccttcataaaatgcaggggaagccagactggtctcaggagcgctaaagcccttccgtggggggtcgtctttctgggactagccctgctgtttaggacctgggaccacaatggggtacctgccgagggggtccccaagagatccaggctgtcatgtgatttatggtggcatgtgttgtgtatttgttggctacttgtgtcttgaaatctagaattatttcacgcagaattgtcactgtttgtcaggaagagaaaatgggctagtggaagcccagtcttgagttcttgtcttgttaccatttaaaattgacatttaattttcaaatcactgttggtgcctaatcacttaagttattaatttattctgttgtattcttttttttaaattgtaacatatttatccggtgggtgggacaggagtgtgttcaagtgggtcatgtttttgctgtggtgacacatggtacaggcttggagcttgcaggtccctttctactgtggtgttggagcaggacaataaagtccactagaaatgcacccca

SEQ ID NO: 3343 - protein, 676 aa, Homo sapiens
MSGGGDVVCTGWLRKSPPEKKLRRYAWKKRWFILRSGRMSGDPDVLEYYKNDHSKKPLRIINLNFCEQVDAGLTFNKKELQDSFVFDIKTSERTFYLVAETEEDMNKWVQSICQICGFNQAEESTDSLRNVSSAGHGPRSSPAELSSSSQHLLRERKSSAPSHSSQPTLFTFEPPVSNHMQPTLSTSAPQEYLYLHQCISRRAENARSASFSQGTRASFLMRSDTAVQKLAQGNGHCVNGISGQVHGFYSLPKPSRHNTEFRDSTYDLPRSLASHGHTKGSLTGSETDNEDVYTFKTPSNTLCREFGDLLVDNMDVPATPLSAYQIPRTFTLDKNHNAMTVATPGDSAIAPPPRPPKPSQAETPRWGSPQQRPPISENSRSVAATIPRRNTLPAMDNSRLHRASSCETYEYPQRGGESAGRSAESMSDGVGSFLPGKMIVGRSDSTNSEDNYVPMNPGSSTLLAMERAGDNSQSVYIPMSPGAHHFDSLGYPSTTLPVHRGPSRGSEIQPPPVNRNLKPDRKAKPTPLDLRNNTVIDELPFKSPITKSWSRANHTFNSSSSQYCRPISTQSITSTDSGDSEENYVPMQNPVSASPVPSGTNSPAPKKSTGSVDYLALDFQPSSPSPHRKPSTSSVTSDEKVDYVQVDKEKTQALQNTMQEWTDVRQSSEPSKGAKL

SEQ ID NO: 3344 - DNA, 6053 bp, Homo sapiens
gaaattttgagaagtggtgggatgaagaagatccctgaagagaggagtaactgagacaaaggcgaggctagcaatagagagacaagtgagggaattagacctttggtatcatcatgaaaaggcctggaagaaacgctggtttatcctgcggagtggccggatgagcggtgacccagatgttctggaatactacaagaacgatcactccaagaagcctctgcggatcatcaacctgaacttctgtgagcaggtagatgcaggcctgacctttaacaagaaggagctgcaggatagttttgtgtttgacatcaagaccagtgaacgcaccttttacctggtggctgagacagaagaggacatgaataagtgggtccagagcatctgccagatctgtggcttcaatcaggctgaggagagcacagactccctgagaaatgtttcctcagccggtcatggcccccgctcttctccagctgagctcagcagctctagccagcaccttctccgagagcgcaagtcctcagccccatcacactccagccagccaactctgttcacgtttgaaccccctgtgtcaaaccacatgcagcccaccttgtccaccagcgcacctcaggagtatctctacttgcaccagtgcataagccgaagagcagaaaatgcaaggagtgccagcttctctcagggcaccagagcctcttttctcatgaggagtgacacagctgtacaaaaacttgcccagggcaatggacactgtgtcaacgggatcagtggtcaagtccatggcttctatagccttcccaagccgagccggcacaatacagaattcagagacagtacctacgacctcccccgcagcctggcctcccatggccacaccaagggcagcctcacaggctccgagacagataatgaggatgtgtacaccttcaagacgcccagcaacaccctgtgcagggagttcggggacctcctggtagacaatatggatgttccggccaccccactctcagcctaccagatccctaggacattcactctggacaaaaaccacaatgccatgacagtggccactcctggggactcagccatagctcccccaccccgcccccccaagccaagtcaggcagaaacacctcgatggggcagtcctcagcagagaccgccaatcagtgaaaatagcagatctgtcgctgccaccatccccagacgcaacaccctccctgcaatggacaacagccgacttcaccgagcttcttcctgtgagacctacgagtacccacagcgtggtggagagagtgcaggccggtctgctgaatccatgagtgatggagttggctctttcctgccagggaaaatgattgtgggccgatcggacagcaccaattctgaagacaactatgtgcccatgaatccaggttcttccaccctgttggccatggaacgagcaggtgataattcccagagcgtctacatcccaatgagcccaggggcccatcactttgactcacttggctacccatcaacaacccttcctgtgcaccgaggccccagcagaggaagtgagattcagccaccccctgtcaaccgcaacctcaaacctgatcggaaagcaaagccaacaccacttgacctgaggaacaacaccgtcatcgatgaactccccttcaagtcacctatcaccaagtcttggtctagggccaaccacaccttcaactccagctcctcccagtactgccgccccatctccacccagagcatcaccagcacagactcaggagacagcgaagagaactatgtccctatgcaaaacccagtgtctgcatctcccgttcccagtggcacgaacagtcctgcccctaagaagagcaccggcagcgttgattatctggccctggacttccagccgagctccccaagcccccaccgcaagccatctacttcatccgtcacctctgatgagaaggtggactacgttcaggtggacaaggagaagacccaggccctgcagaacaccatgcaggagtggacagacgtgcggcagtcctcagagccttccaagggtgccaagctgtgatgagagggccaccgcagagcccaggaggcagcatctccagagctggcccttcccatctcccctctcccctctcccgttcttcctcccatccacctcctctctactctgccagtctcagccttcaaagcacttgacatcagggaccctgaacccttcccctgggaggtgagggcctgatcaaggcacctcctctgcccactcggggcccagctgtgatttttatcagtaatggccatgcctccacccaccttagttaggagctacttccaaaaagcatccttcagcctcttcctgtcctttagacctgactctctaccagatgtttggagggaagggctggggctctgagccagattccacacctcacgttcagtcacagccctcagctatcttccctccggccactgggctacctctccttcagtcccagaagacaagtctcaccaacccagggagtcaaggaccagcaaaccaaagtggataatggactttttcattcctgtttttcttggcaggagagaagcaaggccactaaaagaggagatggtggagacggaggctcagcagtggtcttgaggggtaaaggacttagatgcccagatgaagagggaaagctgacatctgcagggaacccactttgaggctgaggccatggcaggacagctgctgtggggtgcagaggcagaagatgaaggacaaaaggaagggaaaactgatggccaacctagagcagcaaggagcagggcttggagctcgggtggtggagatgacaaggacactgtggggtctgggtccccagaactctggagctacaggccactctaggcccaagggctagtcctcttccccagtcccctcagaggcccccgccagccccaccttgaaagcagcatacaggggaaggcttggaccaagctgggcgaccaagcacatggggcaggaacacatggtaaaggggtggggaatatgggagggagtgtggtgtggatgggggtgatgcagggactgaggggaaccctgggacaggcacaggctgggcagaggcacagggcagtgcaggggactctgcagtggggtcgggaagtgagtttctttgcagtgagcagtgcagtggaagtcgggcacagaggtagcagacagatgtgaagcagtggtgaaggccatgtagcaagtggggaaatacatccaaagggcctgggagttggggggtgcccaacgcaatccttgggggtgcagggtggagcagaaagtgaaggagggacacgtgcaagagtggtgtgcatggtggtgtgacatgaggaccgttcctaggatgggacagtgggtcaggcaggacaaggagaaagcagggcagaatgatgcctagaggaccacatcaggcatggctgacagcttgtgcccatgggctgtggcgtatgtcagatcgcagggtaggaacgagtctggcctggtgccggcccagtgtttcctcagctcatccgccctctgttgctccctagcattccaggagccatcttggactctcctccccaggtttgaaaggccatcagattagcagggacggggtgtagggcatcacccaaggttccttctcttaaactaagggtgggggatctgaatgtttttatgttgactgttcttgactaaattttcaagagtttcagaagcaacaggacagaccagacgtttcattctaccctggggcgaacagaacttcttcctcccaaacaatgacttcctgccatgtttgatggggacagctaccactgtcctctgcccccattcccctttcagctcccatgagcatgcatagttcaccagaccaatggcctagccattctctaagtcccatcctggaagaagttatttcttcaagagctgcacctctcctcctagcattagtttagatcaactcaaggagtatttattaatggctgctgtctccagtttctggggttaagcactaaggacacaagaatcaatcagaccttctccctgaacttaagatagccacaatcagaaaaaggacaaggacatgagacagtggtgatggccatcagacagagacttcaaatgctgatggagggcagaggaagtacttagggaggttggtgtcagaggcaggagtgggggatcagggaaggtggattctaggaaaagggagtgcctgaggtaggccttagaaggggatgagtcagatttttacagaggaggagggcagggcttgggtccagtggaggaagaaggaaggagaggcttggaaagccttgtgtcttgggaaaaaaaggcctttgagcatatgggtccagccactcagaagtgcaggggccatgccttggtgttccaataagtgaatggaagcagtggtggtagctacactgggcagagttggcagggtgctggttcactctgcccagccctgaatgtgtgccttaaaggccccctacaaggggccccatacgacagagcttttaactggtgccttccctgtacccgcagcagccacaagtgggcccagactattgcagcctcccataaacatgtgagcatgttctgagtgtgccatgatgtgagtggacctggctggaatcttcggagagcgactgaggtgttcaaatcgaatctcccaggaggcttccttccagccccctattctggtaactaccaggaggcttccttccagccccctattctggtaactaccaaaatccctcgggtgcaagtgtaggggtagagatggaaggatgagaggtgaaattgaccttttgaaagcaaagctctggctcacaggccccaaactaccagccgtatctagcatatccccaccctccacccactacctcctccaacaaaggagtcaactcagttgaaaaaactggtcctttggcctatccatgggtcaaagtccacctctcctgggggcctggagaggactgagcctacggaaaggggataccttcccactcagcactgcttcacacaggccccctgcctggggctctccaaggagccttcttcacccacttccagctccacttctgcaaggttaagtcaagtgagaacgatgagaaatagggagatggtgtctccttaagtccttgatctgcctgtctgtggaatgggaggttggattagctgcgctgaggtcccatccacagctggtgctcagctgcttgaaggggagactccctcctctgtaacttctttctgggggattggggtgggcagtacctatccccagtcccctcctagcttgactttagtggtttccaatgtagaagttaacaaagtatgccccattcctgtgacaaaagcacaaccattctgaagttactggagcatgggctcagctcatcctccctctggccccttctcccatggggacatctcggcccagcacccctatcccatttccagagttcttccttccccatctgggccttcataaaatgcaggggaagccagactggtctcaggagcgctaaagcccttccgtggggggtcgtctttctgggactagccctgctgtttaggacctgggaccacaatggggtacctgccgagggggtccccaagagatccaggctgtcatgtgatttatggtggcatgtgttgtgtatttgttggctacttgtgtcttgaaatctagaattatttcacgcagaattgtcactgtttgtcaggaagagaaaatgggctagtggaagcccagtcttgagttcttgtcttgttaccatttaaaattgacatttaattttcaaatcactgttggtgcctaatcacttaagttattaatttattctgttgtattcttttttttaaattgtaacatatttatccggtgggtgggacaggagtgtgttcaagtgggtcatgtttttgctgtggtgacacatggtacaggcttggagcttgcaggtccctttctactgtggtgttggagcaggacaataaagtccactagaaatgcacccca

SEQ ID NO: 3345 - protein, 638 aa, Homo sapiens
MSGDPDVLEYYKNDHSKKPLRIINLNFCEQVDAGLTFNKKELQDSFVFDIKTSERTFYLVAETEEDMNKWVQSICQICGFNQAEESTDSLRNVSSAGHGPRSSPAELSSSSQHLLRERKSSAPSHSSQPTLFTFEPPVSNHMQPTLSTSAPQEYLYLHQCISRRAENARSASFSQGTRASFLMRSDTAVQKLAQGNGHCVNGISGQVHGFYSLPKPSRHNTEFRDSTYDLPRSLASHGHTKGSLTGSETDNEDVYTFKTPSNTLCREFGDLLVDNMDVPATPLSAYQIPRTFTLDKNHNAMTVATPGDSAIAPPPRPPKPSQAETPRWGSPQQRPPISENSRSVAATIPRRNTLPAMDNSRLHRASSCETYEYPQRGGESAGRSAESMSDGVGSFLPGKMIVGRSDSTNSEDNYVPMNPGSSTLLAMERAGDNSQSVYIPMSPGAHHFDSLGYPSTTLPVHRGPSRGSEIQPPPVNRNLKPDRKAKPTPLDLRNNTVIDELPFKSPITKSWSRANHTFNSSSSQYCRPISTQSITSTDSGDSEENYVPMQNPVSASPVPSGTNSPAPKKSTGSVDYLALDFQPSSPSPHRKPSTSSVTSDEKVDYVQVDKEKTQALQNTMQEWTDVRQSSEPSKGAKL

SEQ ID NO: 3346 - DNA, 2731 bp, Homo sapiens
tttaaccattctaactttgccttgggatattgaaaattctgaatcagtgaggtatctaaataatttatattttcaaaaaataatgtttattttataattctgagtgtaaaacactatcagaaaagtaatcctcatgctcactaaacaaacctactctaagacactcaacaaccagaacagttttattattgagttgtgtacaaaaatcttgactgtccagatgaaatagtttttcagcctgcagtgtgttagtgatatatctcaaggagatgaaccaataaagtacagactttgtggtctgaagctctgttgtgaaaaaataagctaaaccaattcacactgacagtataatttgattcaagtgcagctccagttcaataaaaactaatgtttttaaaattaactttgttttgtatttggttcaactccttgctagttctctctctatataatttataaaaactgcatgttgctaatctcatgatcctgtgcatgtggactactctgcctttaacttttttacaaaaacatgtttgttcatagattaaataaaagtatgttttcaacttaatgtctaatgttttctgacaattgtaagaataattttgaaatggaaatgctgctgtttagtttccacagtgcctacacaacctgataatccattttctcaccctgacaaactcaaaaggatgagcaagtctgttccagcatttctccaagatgagagtgatgacagagaaacagatacagcatcagaaagcagttaccagctcagcagacacaagaagagcccgagctctttaaccaatcttagcagctcctctggcatgacgtccttgtcttctgtgagtggcagtgtgatgagtgtttatagtggagactttggcaatctggaagttaaaggaaatattcagtttgcaattgaatatgtggagtcactgaaggagttgcatgtttttgtggcccagtgtaaggacttagcagcagcggatgtaaaaaaacagcgttcagacccatatgtaaaggcctatttgctaccagacaaaggcaaaatgggcaagaagaaaacactcgtagtgaagaaaaccttgaatcctgtgtataacgaaatactgcggtataaaattgaaaaacaaatcttaaagacacagaaattgaacctgtccatttggcatcgggatacatttaagcgcaatagtttcctaggggaggtggaacttgatttggaaacatgggactgggataacaaacagaataaacaattgagatggtaccctctgaagcggaagacagcaccagttgcccttgaagcagaaaacagaggtgaaatgaaactagctctccagtatgtcccagagccagtccctggtaaaaagcttcctacaactggagaagtgcacatctgggtgaaggaatgccttgatctaccactgctaaggggaagtcatctaaattcttttgttaaatgtaccatccttccagatacaagtaggaaaagtcgccagaagacaagagctgtagggaaaaccaccaaccctatcttcaaccacactatggtgtatgatgggttcaggcctgaagatctgatggaagcctgtgtagagcttactgtctgggaccattacaaattaaccaaccaatttttgggaggtcttcgtattggctttggaacaggtaaaagttatgggactgaagtggactggatggactctacttcagaggaagttgctctctgggagaagatggtaaactcccccaatacttggattgaagcaacactgcctctcagaatgcttttgattgccaagatttccaaatgagcccaaattccactggctcctccactgaaaactactaaaccggtggaatctgatcttgaaaatctgagtaggtggacaaatatcctcactttctatctattgcacctaaggaatactacacagcatgtaaaagtcaatctgcatgtgcttctttgattacaaggcccaagggatttaaatataacaaaatgtgtaatttgtgactctaatattaaataagatatttgaacaagctaggaaaattgaatttctgctgctgcttcaaagaaaaagctgccccagagcattaaacatggggtattgttaagaagcaaaatgttcttgtttgccatcatgtgtttcacaccacaattctgtgccacagttaagagggtctggtacccttgcaggacctttgtaggttgtgggaaaaagtcgcagaaagatactcaaagtggagcagggaatggagacagacatcagtgatgataaaaaaaaaaaaggaccttaagaaactatttactctgtaatctctaataaaatatggaattccatattagggcaatgagactgaaactactggtgtttttctgccttgagaaaacaaacagttaaaacaagcctcaaatgtattttagtgccacccactggccataggtacaattcagttgttggcttgttttgacttaattctaaaataggtctcaagcctgtatttttatgagtttatttttttaaaaccctgcatatatatgattgtttttcttataactttactatatgaaagcagcataagagtagtcacaaacatgttttgcaacaaagttttaattagaatgtaagttgctcagttatactgttcttcttatgtatgtaaaattttcgtattttgtaaaaacccttagaataaattatcatttgatttaaattgt

SEQ ID NO: 3347 - protein, 376 aa, Homo sapiens
MSKSVPAFLQDESDDRETDTASESSYQLSRHKKSPSSLTNLSSSSGMTSLSSVSGSVMSVYSGDFGNLEVKGNIQFAIEYVESLKELHVFVAQCKDLAAADVKKQRSDPYVKAYLLPDKGKMGKKKTLVVKKTLNPVYNEILRYKIEKQILKTQKLNLSIWHRDTFKRNSFLGEVELDLETWDWDNKQNKQLRWYPLKRKTAPVALEAENRGEMKLALQYVPEPVPGKKLPTTGEVHIWVKECLDLPLLRGSHLNSFVKCTILPDTSRKSRQKTRAVGKTTNPIFNHTMVYDGFRPEDLMEACVELTVWDHYKLTNQFLGGLRIGFGTGKSYGTEVDWMDSTSEEVALWEKMVNSPNTWIEATLPLRMLLIAKISK

SEQ ID NO: 3348 - DNA, 1637 bp, Homo sapiens
ggcaggcatgggagccgcgcgctctctcccggcgcccacacctgtctgagcggcgcagcgagccgcggcccgggcgggctgctcggcgcggaacagtgctcggcatggcagggattccagggctcctcttccttctcttctttctgctctgtgctgttgggcaagtgagcccttacagtgccccctggaaacccacttggcctgcataccgcctccctgtcgtcttgccccagtctaccctcaatttagccaagccagactttggagccgaagccaaattagaagtatcttcttcatgtggaccccagtgtcataagggaactccactgcccacttacgaagaggccaagcaatatctgtcttatgaaacgctctatgccaatggcagccgcacagagacgcaggtgggcatctacatcctcagcagtagtggagatggggcccaacaccgagactcagggtcttcaggaaagtctcgaaggaagcggcagatttatggctatgacagcaggttcagcatttttgggaaggacttcctgctcaactaccctttctcaacatcagtgaagttatccacgggctgcaccggcaccctggtggcagagaagcatgtcctcacagctgcccactgcatacacgatggaaaaacctatgtgaaaggaacccagaagcttcgagtgggcttcctaaagcccaagtttaaagatggtggtcgaggggccaacgactccacttcagccatgcccgagcagatgaaatttcagtggatccgggtgaaacgcacccatgtgcccaagggttggatcaagggcaatgccaatgacatcggcatggattatgattatgccctcctggaactcaaaaagccccacaagagaaaatttatgaagattggggtgagccctcctgctaagcagctgccagggggcagaattcacttctctggttatgacaatgaccgaccaggcaatttggtgtatcgcttctgtgacgtcaaagacgagacctatgacttgctctaccagcaatgcgatgcccagccaggggccagcgggtctggggtctatgtgaggatgtggaagagacagcagcagaagtgggagcgaaaaattattggcattttttcagggcaccagtgggtggacatgaatggttccccacaggatttcaacgtggctgtcagaatcactcctctcaaatatgcccagatttgctattggattaaaggaaactacctggattgtagggaggggtgacacagtgttccctcctggcagcaattaagggtcttcatgttcttattttaggagaggccaaattgttttttgtcattggcgtgcacacgtgtgtgtgtgtgtgtgtgtgtgtgtaaggtgtcttataatcttttacctatttcttacaattgcaagatgactggctttactatttgaaaactggtttgtgtatcatatcatatatcatttaagcagtttgaaggcatacttttgcatagaaataaaaaaaatactgatttggggcaatgaggaatatttgacaattaagttaatcttcacgtttttgcaaactttgatttttatttcatctgaacttgtttcaaagatttatattaaatatttggcatacaagagatatga

SEQ ID NO: 3349 - DNA, 3280 bp, Homo sapiens
tgctggccgggcgagaggctggcggctgggctctcgcgcccctccctgcagggctcaggctctccccctcctgtcttctccgcgctgttcctcgtcatggcggccctcagcaagtccatccctcataactgctatgagatcggccacacttggcacccttcctgccgggtctccttcctgcagatcaccgggggcgccctggaggagtccctgaagatctatgctcctctgtacttgattgcagcaattctccggaaacggaaattagactattatttacacaaactactccctgagatcctacaatccgcttcatttctaactgctaatggggccttgtatatggctttcttttgcattttaaggaagatacttggaaaattctactcatggactcctggctttggtgccgctctgccagcatcttatgtggccattctcattgaaagaaaaagcaggagagggctgctcacaatttatatggccaacttggccacagaaacactattcagaatgggtgtagcaagaggaaccatcacaacattaagaaatggagaagtccttttgttttgcatcacagctgccatgtacatgttctttttcaggtgcaaggatggcttgaaaggatttacattttctgcacttaggttcattgtagggaaggaagaaattcccacacattctttttcaccagaggcagcatatgcaaaagtggaacaaaagagagagcaacatgaggaaaaacccggaagaatgaatatgattggtctagtcaggaaatttgtggattcaatatgcaaacatggaccaaggcatagatgttgcaaacattatgaagataattgcatctcttattgcattaaaggtttcatcagaatgtttagcgtggggtacttgatccagtgctgcctccgaatcccttctgcatttaggcatctgtttacacagccatctcggctactttctctcttctacaataaagaaaacttccagcttggagcttttcttggctcttttgttagtatatacaagggtactagttgcttcctgcgctggatcagaaacttagatgatgaactacatgctattatagctggatttttggcaggtatatcaatgatgttttataaaagcacaacaatttccatgtatttagcgtccaaattggtagagacaatgtatttcaaaggcattgaagcagggaaggttccctattttcctcatgcagatactatcatctattccatctctacagcaatttgcttccaggcagctgtcatggaagttcagactttgagaccatcttactggaagttccttttaagactcaccaagggcaaatttgctgtcatgaaccgaaaagtccttgatgtttttggtactggtgcatctaaacactttcaggatttcatccccaggttggatccaagatacacaactgtaacaccagagttgcccacagagttttcctgaagatgactgtaacttattaatgtgactaaatgtttcatcttgaagagttaattatgttgaacacaaaggagggggcccaagctcgaacttcagtgttatttcagttagagatactcttttcatttgttttgtttttcttatgaatcagaaattcagaagctttttaggaagatgttgcttaataattaagcttcctccatagccagaataagattctggatcactgtagtgactgacattatatattattgatcaaattatgtccacaagcaatattatataatctacgtagaagtgtaataacaaacaagagtacacttaaaattactttaaaagatgtctttagttcattccaatataattcttgattaaaattaggattatttctacattttaggatttacaaaggatcacgggtacatggatttggtctatatatttttttaaagttttgaattggtatctgtagtagtggaatgttatagatttgaagtaactctccacggacagtgctgctttcgtgtagagcaatttaattggagaagtggccattcttacttcagggatgcaaagatgggtctcataccatttggataaatgtcgtggtatccatgctttttttcaactaataacatcatctctcttcatgaccagttaattgggctatttggcagcccagtgaacctatgtactaatggcaagttaggggcaaatggaaatggacacatccgataaagttgaaatgtatgttttaatctttcacagaagtattacacttgaatatttaaaaacaaaacttttaaacttcctataggtttatgatgtttgttttcatttatatggacataatccttcatagctcagtttatatgccattgttgtattagaagggatcaaaatcctatggaacaaagtagtcttggcaagttggcagtttgtgtcctctcagctgtttaacttatgtaatggatgttttgcacctgaaaacactataaaaatccagtggttgtttaaaaagtccatttgtcactaattccattcaggttctccaaccttcttcttgaatatcattgtcaccatttttactgttagaataaagaggtgacaccataaagtcctgctgataatgagagtagttcaggacagctgtgattgaaatatggtcgctatttacagtttttcagggaaaagttatacttttctatgttaataaagagctgaagtggtctacagttaatgtgacatgtagggatgatgatatttttaaaatacattttgttgctaaaaagtttttaggccagtgcaaattatgcagtagaacttgtgttgcaaaaggaattataacccatactttaaaaatgcttaatccctcatattcaatttcatcaagccttgtatacttctgcttaaatgtaattcaatccttggttgttatggcaaacagaaacccaacaaaaagacagactctggtactatggtaacagagccactttatcatttggtcaaaatttggcattatgattagctttgtagaactgacctgtttatttggcaatgctgttaaaggatcatttcggtttcagacttcaaagttgattaataaatttaatcttaactttttattcactggaatcaaaacgatggttggtactgtgtttactgtttaaaatgaagtactaaagccctgagaactgcacctcattttctttatccagaaattgtgcttatatattttcctgtcaggtttaaaaagatgttttaattcataaattattgttttcattgacattaaaagactgtgatattg

SEQ ID NO: 3350 - DNA, 813 bp, Homo sapiens
ttagcttgttggggacggtaaccgggacccagtgtctgctcctgtcaccttcgcctcctaatccctagccactatgcgtgaatgcgtctccatccacgttggccaggctggtgtccagattggcaatgtctgctgggagctctactgcctggaacatggcatccagcccgatggccagatgccaagtgacaagaccattgggggaggagatgactccttcaacaccttcagtgagacgggtgctggcaagcatgtgccccgggctgtgtttgtagacttggaacccatggtcattgatgaagtttgcactggcacctaccgccagctcttccaccctgagcagctcatcacaggcaaggaagatgctgccaataactatgcccgagggcactacaccattggcaaggagatcattgaccttgtgttggaccgaattcgcaagctggctaaccagtgcactggttttcagggcttcttggttttccacagctttggtgggggaactggttctgggttcacctccctgctcatagaacgtctcttagttgattatggcaagaagtccaagctggagttctccaattacccagcgccccaggtttccacagctgtagttgagccctacaactccatcctcaccacccacaccaccctggagcactctgattgtgccttcatggtagacaatgaggccatctgtgacatctgttgtagaaacctcaatatcgagcgccgtgcatgctgagcaacaccacagccattgctgaggcctgggctcgcctggaccacaagtttgacctgatgtatgccaag

SEQ ID NO: 3351 - protein, 374 aa, Homo sapiens [sequence omitted]

SEQ ID NO: 3352 - DNA, 1288 bp, Homo sapiens
gggacggtaaccgggacccagtgtctgctcctgtcaccttcgcctcctaatccctagccactatgcgtgaatgcgtctccatccacgttggccaggctggtgtccagattggcaatgtctgctgggagctctactgcctggaacatggcatccagcccgatggccagatgccaagtgacaagaccattgggggaggagatgactgtgtttgtagacttggaacccatggtcattgatgaagtttgcactggcacctaccgccagctcttccaccctgagcagctcatcacaggcaaggaagatgctgccaataactatgcccgagggcactacaccattggcaaggagatcattgaccttgtgttggaccgaattcgcaagctggctaaccagtgcactggttttcagggcttcttggttttccacagctttggtgggggaactggttctgggttcacctccctgctcatagaacgtctcttagttgattatggcaagaagtccaagctggagttctccaattacccagcgccccaggtttccacagctgtagttgagccctacaactccatcctcaccacccacaccaccctggagcactctgattgtgccttcatggtagacaatgaggccatctgtgacatctgttgtagaaacctcaatatcgagcgcccaacctacactaaccttaaccaccttattagccagattgtgtcctctatcactgcttccctgtcatttctgctgagaaagcctaccatgaacagctttctgtagcagagatcaccaatgcttcctttgagccagccaaccagatggtgaaatgtgaccctcgccatggtaaatacatggcttgctgcctattgtgccatggtgatgtggttcccaaagatgccaatgctgccattgccaccatcaagaccaagcgtagcatccagtttgtagattggtgccccactggcttcaaggttggcatcaactaccagtctcccactgtggtgcctggtggagacctggccaaggcgagttttcagaggcccgtgaagacatggctgcccttgagaaggattatgaggaggttggtgtggattctgttgaaggagagggtgaggaagaaagagaggaatactaatccattccttttggccctgcagcatgtcgtgctcccagaatttcagcttcagcttagctgacagacattaaagctttctggttagattttcatttggtgatcatgtcttttccatgtgtacctgtaatgtttttccatcatgtctcaaagtacagt

SEQ ID NO: 3353 - DNA, 462 bp, Homo sapiens
cactgttgcctatcagaagtcaattcaaacgacctgcccccagagagacaaaagatacagatattgtggatgaagcatctattacttcaaggccaatatcttcttcaaaaactatgaaattaagaatgaagctgataggaccttgataatatataatgatatatataactctctacatttctgaatgtctgaagaaactccaaaagtgcaattcccctggaaagcctggttttctacttaacgcaatttatgccaaacctgcaaacaaacaggaagatgaagtgatgagagcctatttacaacagctaaggcaagagactggactgagactttgtgagaaagttttcgaccctcagaatgataaacccagcaagtggtggacttgctttgtgaagagacagttcatgaataagagtctttcaggacctgggcagtgaagggagcccgggcagccaccgtctc

SEQ ID NO: 3354 - protein, 93 aa, Homo sapiens
MIYITLYISECLKKLQKCNSPGKPGFLLNAIYAKPANKQEDEVMRAYLQQLRQETGLRLCEKVFDPQNDKPSKWWTCFVKRQFMNKSLSGPGQ

SEQ ID NO: 3355 - DNA, 4412 bp, Homo sapiens
  unsure 1132: unknown base
  unsure 1133: unknown base
  unsure 1134: unknown base
  unsure 1135: unknown base
  unsure 1136: unknown base
  unsure 1137: unknown base
  unsure 1138: unknown base
  unsure 1139: unknown base
  unsure 1140: unknown base
  unsure 1141: unknown base
  unsure 1142: unknown base
  unsure 1143: unknown base
  unsure 1144: unknown base
  unsure 1145: unknown base
  unsure 1146: unknown base
  unsure 1207: unknown base
  unsure 1208: unknown base
  unsure 1209: unknown base
  unsure 1210: unknown base
  unsure 1211: unknown base
  unsure 1212: unknown base
  unsure 1213: unknown base
  unsure 1214: unknown base
  unsure 1215: unknown base
  unsure 1216: unknown base
  unsure 1217: unknown base
aggggcactatggcagacaaagttaggaggcagaggccgaggaggcgagtctgttgggccttggtggctgtgctcttggcagacctgttggcactgagtgatacactggcagtgatgtctgtggacctgggcagtgagtccatgaaggtggccattgtcaaacctggagtgcccatggaaattgtcttgaataaggaatctcggaggaaaacaccggtgatcgtgaccctgaaagaaaatgaaagattctttggagacagtgcagcaagcatggcgattaagaatccaaaggctacgctacgttacttccagcacctcctggggaagcaggcagataacccccatgtagctctttaccaggcccgcttcccggagcacgagctgacttttgacccacagaggcagactgtgcactttcagatcagctcgcagctgcagttctcacctgaggaagtgttgggcatggttctcaattattctcgttctctagctgaagattttgcagagcagcccatcaaggatgcagtgatcaccgtgccagtcttcttcaaccaggccgagcgccgagctgtgctgcaggctgctcgtatggctggcctcaaagtgctgcagctcatcaatgacaacaccgccactgccctcagctatggtgtcttccgccggaaagatattaacaccactgcccagaatatcatgttctatgacatgggctcaggcagcaccgtatgcaccattgtgacctaccagatggtgaagactaaggaagctgggatgcagccacagctgcagatccggggagtaggatttgaccgtaccctggggggcctggagatggagctccggcttcgagaacgcctggctgggcttttcaatgagcagcgcaagggtcagagagcaaaggatgtgcgggagaacccgcgtgccatggccaagctgctgcgtgaggctaatcggctcaaaaccgtcctcagtgccaacgctgaccacatggcacagattgaaggcctgatggatgatgtggacttcaaggcaaaagtgactcgtgtggaatttgaggagttgtgtgcagacttgtttgagcgggtgcctgggcctgtacagcaggccctccagagtgccgaaatgagtctgnnnnnnnnnnnnnnngtgatcctggtgggttgggcccactccgggtccccagaattcaagaaggtgctgctgaagnnnnnnnnnnnggaggagctggggaagaacatcaatgcagatgaagcagccgccatgggggcagtgtaccaggcagctgcgctcagcaaagcctttaaagtgaagccatttgtcgtccgagatgcagtggtctaccccatcctggtggagttcacgagggaggtggaggaggagcctgggattcacagcctgaagcacaataaacgggtactcttctctcggatggggccctaccctcaacgcaaagtcatcacctttaaccgctacagccatgatttcaacttccacatcaactacggcgacctgggcttcctggggcctgaagatcttcgggtatttggctcccagaatctgaccacagtgaagctaaaaggggtgggtgacagcttcaagaagtatcctgactacgagtccaagggcatcaaggctcacttcaacctggatgagagtggcgtgctcagtctagacagggtggagtctgtatttgagacactggtagaggacagcgcagaagaggaatctactctcaccaaacttggcaacaccatttccagcctgtttggaggcggtaccacaccagatgccaaggagaatggtactgatactgtccaggaggaagaggagagccctgcagaggggagcaaggacgagcctggggagcaggtggagctcaaggaggaagctgaggccccagtggaggatggctctcagcccccaccccctgaacctaagggagatgcaacccctgagggagaaaaggccacagaaaaagaaaatggggacaagtctgaggcccagaaaccaagtgagaaggcagaggcagggcctgagggcgtcgctccagcccccagagggagagaagaagcagaagcccgccaggaagcggcgaatggtagaggagatcggggtggagctggttgttctggacctgcctgacttgccagaggataagctggctcagtcggtgcagaaacttcaggacttgacactccgagacctggagaagcaggaacgggaaaaagctgccaacagcttggaagcgttcatatttgagacccaggacaagctgtaccagcccgagtaccaggaagtgtccacagaggagcagcgtgaggagatctctgggaagctcagcgccgcatccacctggctggaggatgagggtgttggagccaccacagtgatgttgaaggagaagctggctgagctgaggaagctgtgccaagggctgttttttcgggtagaggagcgcaagaagtggcccgaacggctgtctgccctcgataatctcctcaaccattccagcatgttcctcaagggggcccggctcatcccagagatggaccagatcttcactgaggtggagatgacaacgttagagaaagtcatcaatgagacctgggcctggaagaatgcaactctggccgagcaggctaagctgcccgccacagagaagcctgtgttgctctcaaaagacattgaagctaagatgatggccctggaccgagaggtgcagtatctgctcaataaggccaagtttaccaagccccggccccggcctaaggacaagaatgggacccgggcagagccacccctcaatgccagtgccagtgaccagggggagaaggtcatccctccagcaggccagactgaagatgcagagcccatttcagaacctgagaaagtagagactggatccgagccaggagacactgagcctttggagttaggaggtcctggagcagaacctgaacagaaagaacaatcgacaggacagaagcggcctttgaagaacgacgaactattacccccacctctgttttccccattcatctccacccccttcccccaccacttctatttatttaacatcgagggttgggggaggggttggtcctgccctcggctggagttcctttctcacccctgtgatttggaggtgtggagaaggggaagggagggacagctcactggttccttctgcagtacctctgtggttaaaaatggaactgttctcctccccagccccactcctgttccctacccatataggcccaaatttgggaaaatcactattaatttctgaatcctttgcctgtgcggtaggaagagaatggctgccagtggctgatgggtcccggtgatgggaagggtatcaggttgctggggagtttccactcttctctggtgattgttccttccctcccttcctctcccaccatgcgatgagcatcctttcaggccagtgtctgcagagcctcagttaccaggtttggtttctgagtgcctatctgtgctctttcctccctctgcgggcttctcttgctctgagcctcccttccccattcccatgcagctcctttccccctgggtttccttggcttcctgcagcaaattgggcagttctctgccccttgcctaaaagcctgtacctctggattggcggaagtaaatctggaaggattctcactcgtatttcccacccctagtggccagaggagggaggggcacagtgaagaagggagcccaccacctctccgaagaggaaagccacgtagagtggttggcatggggtgccagcatcgtgcaagctctgtcataatctgcatcttcccagcagcctggtaccccaggttcctgtaactccctgcctcctcctctcttctgctgttctgctcctcccagacagagcctttccctcaccccctgaccccctgggctgaccaaaatgtgctttctactgtgagtccctatcccaagatcctggggaaaggagagaccatggtgtgaatgtagagatgccacctccctctctctgaggcaggcctgtggatgaaggaggagggtcagggctggccttcctctgtgcatcactctgctaggttgggggcccccgacccaccatacctacgcctagggagcccgtcctccagtattccgtctgtagcaggagctagggctgctgcctcagctccaagacaagaatgaacctggctgtgtcagtcattttgtcttttcctttttttttttttttgccacattggcagagatgggacctaagggtcccacccctcaccccacccccacctcttctgtatgtttgaattctttcagtagctgttgatgctggttggacaggtttgagtcaaattgtactttgctccattgttaattgagaaactgtttcaataaaatatcttttctac

SEQ ID NO: 3356 - protein, 999 aa, Homo sapiens
  unsure 946: unknown amino acid
  unsure 947: unknown amino acid
  unsure 948: unknown amino acid
  unsure 949: unknown amino acid
  unsure 950: unknown amino acid
  unsure 951: unknown amino acid
  unsure 952: unknown amino acid
  unsure 953: unknown amino acid
  unsure 954: unknown amino acid
  unsure 955: unknown amino acid
  unsure 956: unknown amino acid
  unsure 957: unknown amino acid
  unsure 958: unknown amino acid
  unsure 959: unknown amino acid
  unsure 960: unknown amino acid
  unsure 961: unknown amino acid
  unsure 962: unknown amino acid
  unsure 963: unknown amino acid
  unsure 964: unknown amino acid
  unsure 965: unknown amino acid
  unsure 966: unknown amino acid
  unsure 967: unknown amino acid
MADKVRRQRPRRRVCWALVAVLLADLLALSDTLAVMSVDLGSESMKVAIVKPGVPMEIVLNKESRRKTPVIVTLKENERFFGDSAASMAIKNPKATLRYFQHLLGKQADNPHVALYQARFPEHELTFDPQRQTVHFQISSQLQFSPEEVLGMVLNYSRSLAEDFAEQPIKDAVITVPVFFNQAERRAVLQAARMAGLKVLQLINDNTATALSYGVFRRKDINTTAQNIMFYDMGSGSTVCTIVTYQMVKTKEAGMQPQLQIRGVGFDRTLGGLEMELRLRERLAGLFNEQRKGQRAKDVRENPRAMAKLLREANRLKTVLSANADHMAQIEGLMDDVDFKAKVTRVEFEELCADLFERVPGPVQQALQSAEMSLDEIEQVILVGGSTRVPRVQEVLLKAVGKEELGKNINADEAAAMGAVYQAAALSKAFKVKPFVVRDAVVYPILVEFTREVEEEPGIHSLKHNKRVLFSRMGPYPQRKVITFNRYSHDFNFHINYGDLGFLGPEDLRVFGSQNLTTVKLKGVGDSFKKYPDYESKGIKAHFNLDESGVLSLDRVESVFETLVEDSAEEESTLTKLGNTISSLFGGGTTPDAKENGTDTVQEEEESPAEGSKDEPGEQVELKEEAEAPVEDGSQPPPPEPKGDATPEGEKATEKENGDKSEAQKPSEKAEAGPEGVAPAPEGEKKQKPARKRRMVEEIGVELVVLDLPDLPEDKLAQSVQKLQDLTLRDLEKQEREKAANSLEAFIFETQDKLYQPEYQEVSTEEQREEISGKLSAASTWLEDEGVGATTVMLKEKLAELRKLCQGLFFRVEERKKWPERLSALDNLLNHSSMFLKGARLIPEMDQIFTEVEMTTLEKVINETWAWKNATLAEQAKLPATEKPVLLSKDIEAKMMALDREVQYLLNKAKFTKPRPRPKTRMGPGQSHPSMPVPVTRGKKVIPPAXXXXXXXXXXXXXXXXXXXXXXDTEPLELGGPGAEPEQKEQSTGQKRPLKNDEL

SEQ ID NO: 3357 - DNA, 3366 bp, Homo sapiens
  unsure 1312: unknown base
  unsure 1314: unknown base
  unsure 1315: unknown base
  unsure 1316: unknown base
ggagggctcaaggggctctaagagggaaaagctccccacacccccagatgctgctcctcctcccggctagagggaacccaacacccaccagtgaaatctgatgcagctgggagtttggaccttgggtctagacagctggtgcgcccaagaggtagggggaggggtgcggcttctccccagttcccagggagtcttgtttgttaagcggggccttgggcagtgttttcctgctgagggtggttttacattttttttcctcattggcccacagagagtggagttggcctagctctgacgcgtcccctctttatccccaatgtgccccctccattaggggctccaggtgggctccagcccacacttgctctctgcctctgctgacacgtgcacacacacacacatgcacacactgctcctctctgcctgctttcccctggagtcccatgccctgccccatccagacactgcccaaggcccacccgtctatttccacctcattccccctttaagctgagaatggggtctgcctatagaagcttccagagacagctgagactgggtccccggtgcctccaccctaggatctcaggcctgccccaaactgcttcttacagcgtggaggtttctctgatttctcccttatctagcaacacttggttcttttggctagtcagggctgggatcccagggggatccacctgcaggagtcagaggtaaagaagcatccacacggagggtagtggggaaggaagcccacatggcagaagctctgcaaacacagtccgagggactgaggagtccatacaatgcctcacacacaaaggccattgtcaaagcctcgggcctggcagaaagtgaggggggtggggccgctaggccacctcctgctcagccacccctggtcctcattctgggatgagggggagggcctaggagaagccctccctttcagtgcagattcccttcttgaatgggacattgagttcctatcagccaccccagactgggtcttcccatgtatataatggaggaagacccctcccagccctctcagtcccccaactcaaagtgcctcagttcctccatctgctcccagatcccctggcactctagacaggcatgcccatgggaaggaccctgggatggagaggcaggcttcgcggcccttcatgcctgcccactgggattccagttaactcaccccagggtgtcaggggctctgcaggatggcaagtgttggggaggagggaggcagaccactctgtgccccacgggcactgacccaccctgccataggtttctaaagggaggncnnnaaaaccctctcccctcccctcccctccctggtgctgctattgaaccccctgccagctccatttctgccctggcaaccctgggcccagcaggtgggtcgtcgttgtctggccctcactgccctggccccagcccaggctgcccagtagccacgtagcagaagtctgaagccatgccagccctggtgcggctctcccctctacacatttggggtactggatagggtgaagttaggggagaaaattgtggagtctttccagccacagggcagagggaggtggaggagctgggctgcttttcccagcagtattagtgtcccccaggacaggggaccttttccacattacatcactgccccatcccaccttacaacactctggcccctctgcttggtccccttttcccccaggcaggaggcaatcccaggggcctgcctgatagaggcatttcctgtccctgtctcctcctgcatctcctttatcctgcactgccaccctctattccccattctgtgttggactttgaaggccccaagcccagccaaagcactgagttcccccttaagacacctccacaccctccccacaagcaaagcacaaattttggggtccatgtagcatgggccacgtaggaggctcctgacttgccaggggcccagcctcagcatacccaccgagcagctgccagcctgggctgagggtgggcatgaggcaggagtcagcacttggacctagggatgtgaggttttctgtgccccaagtttgtgggaaggtgggcactactgctgggcccacagacacagccagctggcaaaagggaggtctagcccagcagagagatgaggacattttgcttctccttcatgcccacagcatgagctgagcttctgctttgctggaaatgaaataaacttggtatgaattgtgccaaggcctccccagttgtcatcctgcctcttgttgccctccctgtccttgccccccaccccacacccatgcccctgtttccttacagattttgatattgttctaatgtgtaatagaaccagccgagtccccttttatcagaagggtctgaaaagcagcagcacagagtaggtgaacacaggcctgcaagtgcgaccacctcagacccagtacgtgtgcccacagtggacacactcacacctccaacacacccacgcgcaggcatgtgtacacgcatgtacacacgcatgcatgcacagccagatggccactcagcacagatgtggcagagggaatggtctgatcctgctgaaagccattaaggagaaacgaatttcccagtgcccgggctgcaagagagccttataggggccctgtttcctgggcatgcgcttcctctgccagccaacccccacttgcccaagtcactggtgcaataacttttctgccttcctcagagcagagaaattgggaattgtgttaggtgggtgtgggcagctctgctgagccaagcagacacggatgtcccctcttctgggaggagggtagtgctcccaggcctcaggagtccagacagagacccccaaagcctgactgccaacagaaaccctctcctagtgaggggcaggtgggtgtgccccaggtccccacacccacagggaggcttcacacactgcccagtaccggggatgccaggaggcaggcccctctgctgctgccactgctgccaacactgcccagcttgtgaggccaggaggagcccctgtcccactcggtgctgctgctcttctgacccctgctgtgaggaatgggattcttggtcgaaaaaattggttttccttttttgtataaatgaaaagaatccaggagaagctgccaccctcccctcccagcgtgatgcgctaccttgcttcggcgtcttgtcgccctttccgcctttggtccagggacagcccagcagatcctcctggttctgacctggggggtgtttgcatcacccccttttacttgtattaaaaaaaaatgatgggttgaaaatgtactgaggattaaaaatgtacttttttataaataaagtgtttaaaac

SEQ ID NO: 3358 - DNA, 1682 bp, Homo sapiens
caggcatccaaagctgaggtcgctcctacggcctgggctcgccttcgctttagagatgtttggcctcttccctcccaaacagcccatcttcaaaacctggactcttggactggcacctggccacctttccctctaccaagactccacttccgtcttacccacttcttcctcagattcttggtaccccctgggttggagactgctcattttccttccaaattaatcccagaccccctaaaatattgacaaccttgacaaccccccaaccgaggagccagactttgttttggactaacttccatagccctatcatggaggcagtgtacctggtagtgaatgggttgggcctggtgctggacgtgctgaccttggtgttggacctcaacttcctgctggtgtcctccctcctggcttccctggcctggctcctggccttcgtctacaacctgccgcacacggtactgactagtcttctgcacttgggccgcggagtcttgctttcattgctggccttgatcgaagccgtggtccggttcacatgtgggggcttgcaggccttgtgtactctgctgtatagctgctgctctggcctagagagcctaaagctcctggggcacctggcctctcatggggcactgcggagcagggagatactgcaccggggcgtcctcaatgtggtctccagtggccatgctttgctgcgccaggcctgtgacatctgtgccattgccatgagcctggtggcttatgtgatcaacagcctggtcaacatctgcctcatcggcactcagaacctcttttccctggtgctggccctgtgggatgcagtgaccgggcctctgtggaggatgacagacgtagtggctgccttcctagcccacatttccagcagtgctgtggccatggccatcctcctttggacaccctgccaactagccctggagctgctggcctcagctgcccgcctcctggccagctttgtgcttgtcaatctcactggcttggtgttgctagcttgtgtgctggcagtgacggtgactgtgttgcatccggacttcaccctgaggctggctacccaggcactcagccagctccatgcccggccatcctaccaccgtcttcgagaggatgtcatgcggctctctcgcctagcactgggctcagaggcctggcgccgagtctggagccgcagtctgcagctggcgagttggccaaaccggggaggggcacctggagctccccagggtgaccctatgagggtattctcagttaggacccggagacaggacactcttcctgaagcggggcgcagatcagaggcagaagaggaggaggccaggaccatcagagtgacacctgtcaggggccgagagaggctcaatgaggaggagcctccaggtgggcaagacccttggaaattgctgaaggagcaagaggagcggaagaagtgtgtcatctgccaggaccagagcaagacagtgttgctcctgccctgccggcatctgtgcctgtgccaggcctgcactgaaatcctgatgcgccaccccgtctaccaccgcaattgcccgctctgccgccggggcatcctgcagaccctcaatgtctacctctgaagcctccttccctgcctgcccacccctccatgctccacgcaggcactcacgctaggacagcattaacac

SEQ ID NO: 3359 - DNA, 2560 bp, Homo sapiens
ggcacgaggggccaccgaggcgctgtccctgaccaccagcacgagacccctttctatcgcgccagtcctgtggtctccgcacctctccagctcctgcacccccggcccccgtggttcccagccgcacagtagcgtgtcctgggtagcgtgaggacccacggggctgagcaggtgccacgagcccgccgcctcttcgccgcccgccgcctctcctcctctcccgcccgccgcctggccctcccctaccaggctgagcctctggctgccagaagcgcggggcctccgggagaatacgtgcggtcgcccgctccgcgtgcgcctacgccttctgctccagttgctttcccaattgagcggaaaagccggggcatgttgccggggccctgggcgggacggttgtgccctgcagcccgaagcccgccggggcaccttcccgcccacgagctgcccagtccctctgcttgcggcccctgccaacgtcccacaggacactgggtccccttggagcctccccaggcttaatgattgtccagaaggcggctataaagggagcctgggaggctgggtggaggagggagcagaaaaaacccaactcagcagatctgggaactgtgagagcggcaagcaggaactgtggtcagaggctgtgcgtcttggctggtagggcctgctcttttctaccatggcagcccagggctatggctattatcgcactgtgatcttctcagccatgtttgggggctacagcctgtattacttcaatcgcaagaccttctcctttgtcatgccatcattggtggaagagatccctttggacaaggatgatttggggttcatcaccagcagccagtcggcagcttatgctatcagcaagtttgtcagtggggtgctgtctgaccagatgagtgctcgctggctcttctcttctgggctgctcctggttggcctggtcaacatattctttgcctggagctccacagtacctgtctttgctgccctctggttccttaatggcctggcccaggggctgggctggcccccatgtgggaaggtcctgcggaagtggtttgagccatctcagtttggcacttggtgggccatcctgtcaaccagcatgaacctggctggagggctgggccctatcctggcaaccatccttgcccagagctacagctggcgcagcacgctggccctatctggggcactgtgtgtggttgtctccttcctctgtctcctgctcatccacaatgaacctgctgatgttggactccgcaacctggaccccatgccctctgagggcaagaagggctccttgaaggaggagagcaccctgcaggagctgctgctgtccccttacctgtgggtgctctccactggttaccttgtggtgtttggagtaaagacctgctgtactgactggggccagttcttccttatccaggagaaaggacagtcagcccttgtaggtagctcctacatgagtgccctggaagttgggggccttgtaggcagcatcgcagctggctacctgtcagaccgggccatggcaaaggcgggactgtccaactacgggaaccctcgccatggcctgttgctgttcatgatggctggcatgacagtgtccatgtacctcttccgggtaacagtgaccagtgactcccccaagctctggatcctggtattgggagctgtatttggtttctcctcgtatggccccattgccctgtttggagtcatagccaacgagagtgcccctcccaacttgtgtggcacctcccacgccattgtgggactcatggccaatgtgggcggctttctggctgggctgcccttcagcaccattgccaagcactacagttggagcacagccttctgggtggctgaagtgatttgtgcggccagcacggctgccttcttcctcctacgaaacatccgcaccaagatgggccgagtgtccaagaaggctgagtgaagagagtccaggttccggagcaccatcccacggtggccttccccctgcacgctctgcggggagaaaaggaggggcctgcctggctagccctgaacctttcactttccatttctgcgccttttctgtcacccgggtggcgctggaagttatcagtggctagtgaggtcccagctccctgatcctatgctctatttaaaagataacctttggccttagactccgttagctcctatttcctgccttcagacaaacaggaaacttctgcagtcaggaaggctcctgtacccttcttcttttcctaggccctgtcctgcccgcatcctaccccatccccacctgaagtgaggctatccctgcagctgcagggcactaatgacccttgacttctgctgggtcctaagtcctctcagcagtgggtgactgctgttgccaatacctcagactccagggaaagagaggaggccatcattctcactgtaccactaggcgcagttggatataggtgggaagaaaaggtgacttgttatagaagattaaaactagatttgatactgaaaaaaaaaaaaaaaaaaaaaaaaaaaaaaaaaa

SEQ ID NO: 3360 - protein, 429 aa, Homo sapiens
MAAQGYGYYRTVIFSAMFGGYSLYYFNRKTFSFVMPSLVEEIPLDKDDLGFITSSQSAAYAISKFVSGVLSDQMSARWLFSSGLLLVGLVNIFFAWSSTVPVFAALWFLNGLAQGLGWPPCGKVLRKWFEPSQFGTWWAILSTSMNLAGGLGPILATILAQSYSWRSTLALSGALCVVVSFLCLLLIHNEPADVGLRNLDPMPSEGKKGSLKEESTLQELLLSPYLWVLSTGYLVVFGVKTCCTDWGQFFLIQEKGQSALVGSSYMSALEVGGLVGSIAAGYLSDRAMAKAGLSNYGNPRHGLLLFMMAGMTVSMYLFRVTVTSDSPKLWILVLGAVFGFSSYGPIALFGVIANESAPPNLCGTSHAIVGLMANVGGFLAGLPFSTIAKHYSWSTAFWVAEVICAASTAAFFLLRNIRTKMGRVSKKAE

SEQ ID NO: 3361 - DNA, 514 bp, Homo sapiens
cttcctttttgtccgacatcttgacgaggctgcggtgtctgctgctattctccgagcttcgcaatgccgcctaaggacgacaagaagaagaaggacgctggaaagtcggccaagaaagacaaagacccagtgaacaaatccgggggcaaggccaaaaagaagaagtggtccaaaggcaaagttcgggacaagctcaataacttagtcttgtttgacaaagctacctatgataaactctgtaaggaagttcccaactataaacttataaccccagctgtggtctctgagagactgaagattcgaggctccctggccagggcagcccttcaggagctccttagtaaaggacttatcaaactggtttcaaagcacagagctcaagtaatttacaccagaaataccaagggtggagatgctccagctgctggtgaagatgcatgaataggtccaaccagctgtacatttggaaaaataaaactttattaaatcaaaaaaaaaaaaaaaaaaaaaaaaa

SEQ ID NO: 3362 - protein, 125 aa, Homo sapiens [sequence omitted]

SEQ ID NO: 3363 - DNA, 1317 bp, Homo sapiens
gaagaaaacagcccaaagatgagagtgattcgcgtgggtacccgcaagagccagcttgctcgcatacagacggacagtgtggtggcaacattgaaagcctcgtaccctggcctgcagtttgaaatcattgctatgtccaccacaggggacaagattcttgatactgcactctctaagattggagagaaaagcctgtttaccaaggagcttgaacatgccctggagaagaatgaagtggacctggttgttcactccttgaaggacctgcccactgtgcttcctcctggcttcaccatcggagccatctgcaagcgggaaaaccctcatgatgctgttgtctttcacccaaaatttgttgggaagaccctagaaaccctgccagagaagagtgtggtgggaaccagctccctgcgaagagcagcccagctgcagagaaagttcccgcatctggagttcaggagtattcggggaaacctcaacacccggcttcggaagctggacgagcagcaggagttcagtgccatcatcctggcaacagctggcctgcagcgcatgggctggcacaaccgggtggggcagatcctgcaccctgaggaatgcatgtatgctgtgggccagggggccttgggcgtggaagtgcgagccaaggaccaggacatcttggatctggtgggtgtgctgcacgatcccgagactctgcttcgctgcatcgctgaaagggccttcctgaggcacctggaaggaggctgcagtgtgccagtagccgtgcatacagctatgaaggatgggcaactgtacctgactggaggagtctggagtctagacggctcagatagcatacaagagaccatgcaggctaccatccatgtccctgcccagcatgaagatggccctgaggatgacccacagttggtaggcatcactgctcgtaacattccacgagggccccagttggctgcccagaacttgggcatcagcctggccaacttgttgctgagcaaaggagccaaaaacatcctggatgttgcacggcagcttaacgatgcccattaactggtttgtggggcacagatgcctgggttgctgctgtccagtgcctacatcccgggcctcagtgccccattctcactgctatctggggagtgattaccccgggagactgaactgcagggttcaagccttccagggatttgcctcaccttggggccttgatgactgccttgcctcctcagtatgtgggggcttcatctctttagagaagtccaagcaacagcctttgaatgtaaccaatcctactaataaaccagttctgaaggt

SEQ ID NO: 3364 - DNA, 642 bp, Homo sapiens
cgcagacctatgaatgaagatggagggagagctgatgtgaaaggcctgggtcccggccgcagaaggggcgccagaccgaaatcagcgatcgcgtctctcccaccaaagcctcccggccagcggccgcgtctgaaagaagaaaacagcccaaagatgagagtgattcgcgtgggtacccgcaagagccagcttgctcgcatacagacggacagtgtggtggcaacattgaaagcctcgtaccctggcctgcagtttgaaatcattgctatgtccaccacaggggacaagattcttgatactgcactctctaagggattcactcaggctctttctgtccggcagattggagagaaaagcctgtttaccaaggagcttgaacatgccctggagaagaatgaagtggacctggttgttcactccttgaaggacctgcccactgtgcttcctcctggcttcaccatcggagccatctgcaagcgggaaaaccctcatgatgctgttgtctttcacccaaaatttgttgggaagaccctagaaaccctgccagagaagagtgtggtgggaaccagctccctgcgaagagcagcccagctgcagagaaagttcccgcatctggagttcaggagtattgtatccttttag

SEQ ID NO: 3365 - DNA, 432 bp, Homo sapiens
atgtcgggccgcggcaagactggcggcaaggcccgcgccaaggccaagtcgcgctcgtcgcgcgccggcctccagttcccagtgggccgtgtacaccggctgctgcggaagggccactacgccgagcgcgttggcgccggcgcgccagtgtacctggcggcagtgctggagtacctcaccgctgagatcctggagctggcgggcaatgcggcccgcgacaacaagaagacgcgaatcatcccccgccacctgcagctggccatccgcaacgacgaggagctcaacaagctgctgggcggcgtgacgatcgcccagggaggcgtcctgcccaacatccaggccgtgctgctgcccaagaagaccagcgccaccgtggggccgaaggcgccctcgggcggcaagaaggccacccaggcctcccaggagtactaa

SEQ ID NO: 3366 - DNA, 1551 bp, Homo sapiens
cccagaatcccagggagtgatcagcggtgctgttttccttatcatcctcttctgcttcatccctttccccttcctgaactgctttgtgaaggagcagtgtaaggcattcccccaccatgaatttgtggccctgataggtgccctccttgccatctgctgcatgatcttcctgggctttgcggatgatgtactgaatctgcgctggcgccataagctgctgctacctacagctgcctcactacctctcctcatggtctatttcaccaactttggcaacacgaccattgtggtgcccaagcccttccgcccgatacttggcctgcatctggacttgggaatcctgtactatgtctacatggggctgctggcagtgttctgtaccaatgccatcaatatcctagcaggaattaacggcctagaggctggccagtcactagtcatttctgcttccatcattgtcttcaacctggtagagttggaaggtgattgtcgggatgatcatgtcttttccctctacttcatgatacccttttttttcaccactttgggattgctctaccacaactggtacccatcacgggtgtttgtgggagataccttctgttactttgctggcatgacctttgccgtggtgggcatcttgggacacttcagcaagaccatgctactattcttcatgccccaggtgttcaacttcctctactcactgcctcagctcctgcatatcatcccctgccctcgccaccgcatacccagactcaatatcaagacaggcaaactggagatgagctattccaagttcaagaccaagagcctctctttcttgggcacctttattttaaaggtggcagagagcctccagctggtgacagtacaccagagtgagactgaagatggtgaattcactgaatgtaacaacatgaccctcatcaacttgctacttaaagtccttgggcccatacatgagagaaacctcacattgctcctgctgctgctgcagatcctgggcagtgccatcaccttctccattcgatatcagctcgttcgactcttctatgatgtctgagtcccttgatcattgtcctttacctcacagtctctaggattcctgactcaggctgacctctctctctggtcccagactgcctccttgcccaggcctctctcactcttcatactcctccagattttgttctcagcattttcctttctctgtgatcattggcatcctgggcgtttcttgccctctgctgactactgattggattttacctatggctttctgcaacttgctactctctccctctccatcccatcttgcagcctcatagggtgggatacagcagcttttttgcagttatccacactcacatttcagagtcctgactctcaaggaaccactggtttttgggatagaacttgggccagggctaggaacacaggctccacggtgacatgtcatttgattgtaaattaagtgttctgattagtaagaactaagcagggggccacatgctctcaatggagacaataaagtgttgtctttttctt

SEQ ID NO: 3367 - DNA, 4943 bp, Homo sapiens
gcatgattccagcagggggccgagcccctgggcccccctacagccctgttcctgcagaatcagaaagtctggtaaatgggaaccacaccccacagactgcaacacggggaccctctgcctgtgccagccacagttccctggtgagctctattgagaaggacctgcaagagatcatggactcactggtgctagaggagcctggagctgctggcaagaagcctgccgcaacctctccactgtcaccgatggctaatggtgggcgctacctgctgtctcccccaaccagccccggcgccatgtctgtgggctccagctatgagaacacctctccagccttctctccacttcctgcggtttgggttcatggccaaactgtaagtgatgagagacacttgaggaggtctagggaccctagagagccatggaagcctcacaaaccaggcttcaggcctataggtaggcctgcgggaaaaggcaacaaagaccaggaatgtgattgtgtcatccctcctttacctcctaggcccctgagaggtgactgtatctgggtgggtgtgtatgtggagaggggtggatgaagtggtagggccatgggagtactcactcatgggcctgggcattcaaggactggcagcagcccatcctgctgataaacagccaagggctgcctgagggtaacttggagctgaggtggggacaaagagggccgtgtccttggtctacctcttctccatgtatgtctgtggttgggtgtctggtccctgtgggctcatgggtctgttttccagcactgtctgtctgcatacatgcccacctgtctgtatgctagactgtgtttatctgtgagtgtgcatcagtgtgcatttgtgcatgtcagggctggtgtctctgtacttgcctattaatgcagggccagggcacatgttgtatccttgtgtgcctgtgcatcagtgctggtgtgtcagtatgtgtccttgtgtctgtagatctgtgtgtacctgcgtcaggacgagcaactgagtttatctgtgtctcattgtggtctgtagtctgcttaacagtgtgtttctgtatgtgtttagtgtgttactgtgggtccatttggtgtgttcctgtgtgtcctggggtagactgaaaaaagaaaggaacaggaagatggaaggggctgtcccagaagtgggcaggaagaaccaggctgttatgccatgtgggcatgtggcacaacagcctcgttcttcctgcccacttctggggcaccttgtttccctctgcctcccctaggtcttggggtcaggcctctcctgacttgacactgatgtcctagccccctgtaaccctgctctccctcctgacaggatactgaacctggctctatccccaccagggctcagcttcctccccttcatgtcctgctctgtccatcctccccaggaacgccagcgcctggagaccatcctgaacctgtgtgccgaatacagccgggctgatgggggacctgaggctggggagcttcccagcattggggaggccaccgcagcattggcactggcaggccggaggccctcacgaggccttgcaggggcctctgggcggagcagcgaggagcctggcgttgccacccaacgcctatgggagagtatggagcgctcagatgaggaaaatctcaaggaggagtgcagcagcactgagagcacccagcaggagcacgaagatgcacctagcaccaagctccagggagaggtgctagccctggaagaagagcgggctcaggtgctggggcacgtggagcagctcaaggtccgtgtgaaggagctagagcagcagctgcaggagtcagcccgagaggccgaaatggagcgggcactgctgcagggagagagggaggcagagcgggcactgctgcagaaggagcagaaggcagtggatcagctgcaggagaagctggtggccttggagacaggcatccagaaggagagggacaaggaggcagaggccctggagactgagacaaagctctttgaggacttggagttccagcagttggagcgggagagccgcgtggaggaggagcgcgagctggccggccaggggctgctccggagcaaggctgagctgctccgcagcatcgccaagaggaaggagcgcctggccatcctggacagtcaggctgggcagatccgggctcaggccgtgcaggaatcagaacgcctggcccgggacaagaatgcctccttacagctgctgcaaaaggagaaggagaagctgactgtgctggaaaggagataccactcactcacagggggcaggcctttcccgaagaccacatcgaccctcaaagagatggagaagctgctgctccctgctgtagacttagagcagtggtaccaggagctgatggccgggctggggactggccccgctgcagcctcccctcactcttctcccccgcctctgcccgccaaagcttcccgtcagctgcaggtttaccgctccaagatggatggcgaggccaccagcccccttccccggacccgcagcggccccctcccctcctcctctggctcttcctcctcctcctcccagctcagcgtggctaccctggggcgtagcccctccccaaagagcgctctactcacccagaatggcacgggcagccttcctcgcaacctggcagccacactgcaggacatcgagaccaagcgccaactagctctgcagcagaagggacaacaagtgattgaagagcagcggcggcgactggctgagctgaagcagaaagcggcagctgaggcacagtgccagtgggatgcccttcacggggcagcacccttcccagcgggcccctcgggcttcccccctctcatgcaccactctatcctacaccacctgcctgcggggcgggagcgtggggaggagggtgagcacgcctatgatacgctgagtctggagagctctgacagcatggagaccagcatctccaccgggggcaactcggcctgctcccctgacaacatgtccagcgcgagtggtctggacatggggaagatcgaggagatggagaagatgctgaaagaggctcatgcagagaagaaccggctcatggagtcgagggagcgggagatggagctgcggcggcaggccctggaggaggagcggcggaggcgtgagcaggtagaacggaggctgcagagtgagagtgcccggaggcagcagctggtcgagaaggaggtcaagatgcgggagaaacaattttcccaggcacgacccctgacccgctacctgccaatccggaaggaggactttgacctgaagacacatattgagtcatcgggccatggtgttgatacctgcctgcacgtggtgctcagcagcaaggtctgccgtggctacttggtcaagatgggcggcaagattaaatcatggaagaagcgctggtttgtcttcgaccggctcaagcgcaccctttcctattatgtggacaagcatgagacgaagctgaagggagtcatctatttccaggccattgaggaagtgtactacgaccacctgcgcagtgcagccaagaagaggtttttccgcttcactatggtgactgagagcccgaacccagccctcaccttctgcgtaaagacccatgaccggctgtactacatggtggccccatctgcagaggccatgcgtatctggatggatgtcattgtcacaggggctgagggctacactcagttcatgaactaactgccgtgggcctcctggcagagcacaactggggcttttgtataagaagactttaatattctgtaaggagcttggtcctgtgagtttctgggctctggcctcctgaagaaccagccagaagaagaaaagtagaggtggctttgctgcctcctgggagcccagaacttgcagtaaccctttagggtcctgccccaggcccagccagggctgaggagctgtcacagagagggcctcagctctgacctgacacctgctctccccagcctgttttctcttttctaaaagacaaattatggtaccataagctgccaaagatcccctcctgcctcagacccctttgccaggggctttgggggctgagcagagccacatccagagtggggtaatagctcaggcggcccgcttcccatttctcaaaccccgctctgccccattgttctcctttcccttatactttttattaccttgctcaagggccagagatctcaagtgtcaaccttgaggtcccagctccatcccctagttgcagactcatcaccatggttaccatagtgactgcttcattgccatggttacatactaattgctgcagctctgtggcccagcccactgcttcagctgtgggccatctgagggtacgtgccatcatctctccagcccaggcccctgggcatctcatgctggggggaagggactgaatacctttttccttccccctgcctgtgtcttcagccctgatgcacaggctgccagccccccagtccagccctctcccttccactggtgccttgcttagagccagaagggatgaagccgggggatctatggaacagaggaggagcgatgcagttgggagaggaagctagaagggttatggttggagttctgtacagtgttgagtttccgacagggaaagaggattcctccaatgctcctagagagaaagcctgagcaggagatgatgcagcagaggggaagggccctgtggtgccgccgcccttccttcagcctccgaagggtgatggaaatggagagtggaggaccaggcctccagctgtctggcctcgcccttcacgccttaacactaagcccacctcccctgctctccttcccagcattgagcccttggttgcctgggcccaggctgggggttttcagtatttgtaagcatttcagcagaacaataaagcctttggactacggaa

SEQ ID NO: 3368 - protein, 1377 aa, Homo sapiens
MDALNRNQIGPGCQTQTMVQKGPLDLIETGKGLKVQTDKPHLVSLGSGRLSTAITLLPLEEGRTVIGSAARDISLQGPGLAPEHCYIENLRGTLTLYPCGNACTIDGLPVRQPTRLTQGCMLCLGQSTFLRFNHPAEAKWMKSMIPAGGRAPGPPYSPVPAESESLVNGNHTPQTATRGPSACASHSSLVSSIEKDLQEIMDSLVLEEPGAAGKKPAATSPLSPMANGGRYLLSPPTSPGAMSVGSSYENTSPAFSPLSSPASSGSCASHSPSGQEPGPSVPPLVPARSSSYHLALQPPQSRPSGARSESPRLSRKGGHERPPSPGLRGLLTDSPAATVLAEARRATESPRLGGQLPVVAISLSEYPASGALSQPTSIPGSPKFQPPVPAPRNKIGTLQDRPPSPFREPPGSERVLTTSPSRQLVGRTFSDGLATRTLQPPESPRLGRRGLDSMRELPPLSPSLSRRALSPLPTRTTPDPKLNREVAESPRPRRWAAHGASPEDFSLTLGARGRRTRSPSPTLGESLAPHKGSFSGRLSPAYSLGSLTGASPCQSPCVQRKLSSGDLRVPVTRERKNSITEISDNEDDLLEYHRRQRQERLREQEMERLERQRLETILNLCAEYSRADGGPEAGELPSIGEATAALALAGRRPSRGLAGASGRSSEEPGVATQRLWESMERSDEENLKEECSSTESTQQEHEDAPSTKLQGEVLALEEERAQVLGHVEQLKVRVKELEQQLQESAREAEMERALLQGEREAERALLQKEQKAVDQLQEKLVALETGIQKERDKEAEALETETKLFEDLEFQQLERESRVEEERELAGQGLLRSKAELLRSIAKRKERLAILDSQAGQIRAQAVQESERLARDKNASLQLLQKEKEKLTVLERRYHSLTGGRPFPKTTSTLKEMEKLLLPAVDLEQWYQELMAGLGTGPAAASPHSSPPPLPAKASRQLQVYRSKMDGEATSPLPRTRSGPLPSSSGSSSSSSQLSVATLGRSPSPKSALLTQNGTGSLPRNLAATLQDIETKRQLALQQKGQQVIEEQRRRLAELKQKAAAEAQCQWDALHGAAPFPAGPSGFPPLMHHSILHHLPAGRERGEEGEHAYDTLSLESSDSMETSISTGGNSACSPDNMSSASGLDMGKIEEMEKMLKEAHAEKNRLMESREREMELRRQALEEERRRREQVERRLQSESARRQQLVEKEVKMREKQFSQARPLTRYLPIRKEDFDLKTHIESSGHGVDTCLHVVLSSKVCRGYLVKMGGKIKSWKKRWFVFDRLKRTLSYYVDKHETKLKGVIYFQAIEEVYYDHLRSAAKKRFFRFTMVTESPNPALTFCVKTHDRLYYMVAPSAEAMRIWMDVIVTGAEGYTQFMN

SEQ ID NO: 3369 - DNA, 1677 bp, Homo sapiens
cccaggctcctcgggactcggcgggtcctcctgggagtctcggaggggaccggctgtgcagacgccatggagttggtgctggtcttcctctgcagcctgctggcccccatggtcctggccagtgcagctgaaaaggagaaggaaatggacccttttcattatgattaccagaccctgaggattgggggactggtgttcgctgtggtcctcttctcggttgggatcctccttatcctaagtcgcaggtgcaagtgcagtttcaatcagaagccccgggccccaggagatgaggaagcccaggtggagaacctcatcaccgccaatgcaacagagccccagaaagcagagaactgaagtgcagccatcaggtggaagcctctggaacctgaggcggctgcttgaacctttggatgcaaatgtcgatgcttaagaaaaccggccacttcagcaacagccctttccccaggagaagccaagaacttgtgtgtcccccaccctatcccctctaacaccattcctccacctgatgatgcaactaacacttgcctccccactgcagcctgcggtcctgcccacctcccgtgatgtgtgtgtgtgtgtgtgtgtgtgtgactgtgtgtgtttgctaactgtggtctttgtggctacttgtttgtggatggtattgtgtttgttagtgaactgtggactcgctttcccaggcaggggctgagccacatggccatctgctcctccctgcccccgtggccctccatcaccttctgctcctaggaggctgcttgttgcccgagaccagccccctcccctgatttagggatgcgtagggtaagagcacgggcagtggtcttcagtcgtcttgggacctgggaaggtttgcagcactttgtcatcattcttcatggactcctttcactcctttaacaaaaaccttgcttccttatcccacctgatcccagtctgaaggtctcttagcaactggagatacaaagcaaggagctggtgagcccagcgtttgacgtcaggcaggctatgcccttccgtggttaatttcttcccaggggcttccacgaggagtccccatctgccccgccccttcacagagcgcccggggattccaggcccagggcttctactctgcccctggggaatgtgtcccctgcatatcttctcagcaataactccatgggctctgggaccctaccccttccaaccttccctgcttctgagacttcaatctacagcccagctcatccagatgcagactacagtccctgcaattgggtctctggcaggcaatagttgaaggactcctgttccgttggggccagcacaccgggatggatggagggagagcagaggcctttgcttctctgcctacgtccccttagatgggcagcagaggcaactcccgcatcctttgctctgcctgtcggtggtcagagcggtgagcgaggtgggttggagactcagcaggctccgtgcagcccttgggaacagtgagaggttgaaggtcataacgagagtgggaactcaacccagatcccgcccctcctgtcctctgtgttcccgcggaaaccaaccaaaccgtgcgctgtgacccattgctgttctctgtatcgtgatctatcctcaacaacaacagaaaaaaggaataaaatatcctttgtttcctagtga

SEQ ID NO: 3370 - protein, 95 aa, Homo sapiens
MELVLVFLCSLLAPMVLASAAEKEKEMDPFHYDYQTLRIGGLVFAVVLFSVGILLILSRRCKCSFNQKPRAPGDEEAQVENLITANATEPQKAEN

SEQ ID NO: 3371 - DNA, 1082 bp, Homo sapiens
atcctgtctgtccgaacccagacacaagtcttcactccttcctgcgagccctgaggaagccttctttccccagacatggccaacaagggtccttcctatggcatgagccgcgaagtgcagtccaaaatcgagaagaagtatgacgaggagctggaggagcggctggtggagtggatcatagtgcagtgtggccctgatgtgggccgcccagaccgtgggcgcttgggcttccaggtctggctgaagaatggcgtgattctgagcaagctggtgaacagcctgtaccctgatggctccaagccggtgaaggtgcccgagaacccaccctccatggtcttcaagcagatggagcaggtggctcagttcctgaaggcggctgaggactatggggtcatcaagactgacatgttccagactgttgacctctttgaaggcaaagacatggcagcagtgcagaggaccctgatggctttgggcagcttggcagtgaccaagaatgatgggcactaccgtggagatcccaactggtttatgaagaaagcgcaggagcataagagggaattcacagagagccagctgcaggagggaaagcatgtcattggccttcagatgggcagcaacagaggggcctcccaggccggcatgacaggctacggacgacctcggcagatcatcagttagagcggagagggctagccctgagcccggccctcccccagctccttggctgcagccatcccgcttagcctgcctcacccacacccgtgtggtaccttcagccctggccaagctttgaggctctgtcactgagcaatggtaactgcacctgggcagctcctccctgtgcccccagcctcagcccaacttcttacccgaaagcatcactgccttggcccctccctcccggctgcccccatcacctctactgtctcctccctgggctaagcaggggagaagcgggctgggggtagcctggatgtgggccaagtccactgtcctccttggcggcaaaagcccattgaagaagaaccagcccagcctgccccctatcttgtcctggaatatttttggggttggaactc

SEQ ID NO: 3372 - protein, 201 aa, Homo sapiens
MANKGPSYGMSREVQSKIEKKYDEELEERLVEWIIVQCGPDVGRPDRGRLGFQVWLKNGVILSKLVNSLYPDGSKPVKVPENPPSMVFKQMEQVAQFLKAAEDYGVIKTDMFQTVDLFEGKDMAAVQRTLMALGSLAVTKNDGHYRGDPNWFMKKAQEHKREFTESQLQEGKHVIGLQMGSNRGASQAGMTGYGRPRQIIS

SEQ ID NO: 3373 - DNA, 383 bp, Homo sapiens
cctttccggcggtgatgacctacccacacgagaacatgcctcttgcaaagggtctccttcatccctctccagaaaaggagaagaggaaacacaagaagaaacgcctggtgcagagccccaattcctgcttcatggatgtgaaatgcccaggatgctataaaatcatcacggtctttagccatgcacaaacggtagttttgtgtgttggctgctccactgtcctctgccagcctacaggaggaaaagcaaggcttacagaaggatgttccttcaggaggaagcagcactaaaagcactctgaatcaagatgagtgggaaaccatctcaataaacacattttggattaaaaaaaaaaaaaaaaaaaaaaaaaaaaaaaaaaaatt

SEQ ID NO: 3374 - DNA, 1752 bp, Homo sapiens
gacatgctcagcaacatgccaggcacagctgcaggctccagtgggcgcggcatctccatcagccccagtgctggtcagatgcagatgcagcaccgtaccaacctgatggccaccctcagctatgggcaccgtcccttgtccaagcagctgagtgctgacagtgcagaggctcacagcttgaacgtgaatcggttctcccctgctaactacgaccaggcgcatttacacccccatctgttttcggaccagtcccggggttcccccagcagctacagcccttcaacaggagtggggttctctccaacccaagccctgaaagtccctccacttgaccaattccccaccttccctcccagtgcacatcagcagccgccacactataccacgtcggcactacagcaggccctgctgtctcccacgccgccagactatacaagacaccagcaggtaccccacatccttcaaggactgctttctccccggcattcgctcaccggccactcggacatccggctgcccccaacagagtttgcacagctcattaaaaggcagcagcaacaacggcagcagcagcagcaacagcagcaacagcaagaataccaggaactgttcaggcacatgaaccaaggggatgcggggagtctggctcccagccttgggggacagagcatgacagagcgccaggctttatcttatcaaaatgctgactcttatcaccatcacaccagcccccagcatctgctacaaatcagggcacaagaatgtgtctcacaggcttcctcacccaccccgccccacgggtatgctcaccagccggcactgatgcattcagagagcatggaggaggactgctcgtgtgagggggccaaggatggcttccaagacagtaagagttcaagtacattgaccaaaggttgccatgacagccctctgctcttgagtaccggtggacctggggaccctgaatctttgctaggaactgtgagtcatgcccaagaattggggatacatccctatggtcatcagccaactgctgcattcagtaaaaataaggtgcccagcagagagcctgtcatagggaactgcatggatagaagttctccaggacaagcagtggagctgccggatcacaatgggctcgggtacccagcacgcccctccgtccatgagcaccacaggccccgggccctccagagacaccacacgatccagaacagcgacgatgcttatgtacagctggataacttgccaggaatgagtctcgtggctgggaaagcacttagctctgcccggatgtcggatgcagttctcagtcagtcttcgctcatgggcagccagcagtttcaggatggggaaaatgaggaatgtggggcaagcctgggaggtcatgagcacccagacctgagtgatggcagccagcatttaaactcctcttgctatccatctacgtgtattacagacattctgctcagctacaagcaccccgaagtctccttcagcatggagcaggcaggcgtgtaacaagaaacagagagttttgtgtacagcttgggaatgaaaaggttgattgtaaacccacagtatctagcagcgttgtgccaaattgcccttgtgtttctctccacccaaaatatcacagctgctttcctcacatttggttcatccgtgtgctgttcttttgggttctgagagggttttgccatgtttgcttgtatgaccaagtcaccaaggaaataaacaggaaggaaatcc

SEQ ID NO: 3375 - protein, 505 aa, Homo sapiens
MLSNMPGTAAGSSGRGISISPSAGQMQMQHRTNLMATLSYGHRPLSKQLSADSAEAHSLNVNRFSPANYDQAHLHPHLFSDQSRGSPSSYSPSTGVGFSPTQALKVPPLDQFPTFPPSAHQQPPHYTTSALQQALLSPTPPDYTRHQQVPHILQGLLSPRHSLTGHSDIRLPPTEFAQLIKRQQQQRQQQQQQQQQQEYQELFRHMNQGDAGSLAPSLGGQSMTERQALSYQNADSYHHHTSPQHLLQIRAQECVSQASSPTPPHGYAHQPALMHSESMEEDCSCEGAKDGFQDSKSSSTLTKGCHDSPLLLSTGGPGDPESLLGTVSHAQELGIHPYGHQPTAAFSKNKVPSREPVIGNCMDRSSPGQAVELPDHNGLGYPARPSVHEHHRPRALQRHHTIQNSDDAYVQLDNLPGMSLVAGKALSSARMSDAVLSQSSLMGSQQFQDGENEECGASLGGHEHPDLSDGSQHLNSSCYPSTCITDILLSYKHPEVSFSMEQAGV

SEQ ID NO: 3376 - DNA, 897 bp, Homo sapiens
agagactgcgagaaggaggtcccccacggcccttcaggatgaaagctgcggtgctgaccttggccgtgctcttcctgacggggagccaggctcggcatttctggcagcaagatgaacccccccagagcccctgggatcgagtgaaggacctggccactgtgtacgtggatgtgctcaaagacagcggcagagactatgtgtcccagtttgaaggctccgccttgggaaaacagctaaacctaaagctccttgacaactgggacagcgtgacctccaccttcagcaagctgcgcgaacagctcggccctgtgacccaggagttctgggataacctggaaaaggagacagagggcctgaggcaggagatgagcaaggatctggaggaggtgaaggccaaggtgcagccctacctggacgacttccagaagaagtggcaggaggagatggagctctaccgccagaaggtggagccgctgcgcgcagagctccaagagggcgcgcgccagaagctgcacgagctgcaagagaagctgagcccactgggcgaggagatgcgcgaccgcgcgcgcgcccatgtggacgcgctgcgcacgcatctggccccctacagcgacgagctgcgccagcgcttggccgcgcgccttgaggctctcaaggagaacggcggcgccagactggccgagtaccacgccaaggccaccgagcatctgagcacgctcagcgagaaggccaagcccgcgctcgaggacctccgccaaggcctgctgcccgtgctggagagcttcaaggtcagcttcctgagcgctctcgaggagtacactaagaagctcaacacccagtgaggcgcccgccgccgccccccttcccggtgctcagaataaacgtttccaaagtggg

SEQ ID NO: 3377 - protein, 267 aa, Homo sapiens
MKAAVLTLAVLFLTGSQARHFWQQDEPPQSPWDRVKDLATVYVDVLKDSGRDYVSQFEGSALGKQLNLKLLDNWDSVTSTFSKLREQLGPVTQEFWDNLEKETEGLRQEMSKDLEEVKAKVQPYLDDFQKKWQEEMELYRQKVEPLRAELQEGARQKLHELQEKLSPLGEEMRDRARAHVDALRTHLAPYSDELRQRLAARLEALKENGGARLAEYHAKATEHLSTLSEKAKPALEDLRQGLLPVLESFKVSFLSALEEYTKKLNTQ

SEQ ID NO: 3378 - DNA, 1764 bp, Homo sapiens
ctgaattgcgcgtggtggccatggcggccagcggggctgtggaaccagggcccccgggggctgccgtcgccccgtcgcccgccccggccccgccgcctgcccctgatcacctgttccggcccatcagcgccgaggacgaggagcagcagcccaccgagatcgagtcgctatgcatgaactgttactgcaatggcatgacgcgcctcctgctcaccaagattcccttcttcagagaaataatagtgagctccttttcctgcgagcactgtggctggaacaacacggagatccagtcggcaggcaggatccaggaccagggagtgcgctacactttgtctgtcagggctctggaggacatgaacagagaagtggtgaagactgactctgctgccacaaggattcctgagctagattttgaaattcctgcctttagccagaaaggagctctgaccactgttgaaggattgatcacccgtgctatctctggcctggagcaggaccagcctgcacgaagggcaaacaaagatgctacagctgaaagaattgatgagttcattgtcaaactgaaggagctaaagcaagtagcctcccctttcactctgatcattgatgatccctcagggaacagttttgtggaaaacccacatgctcctcagaaagatgatgccctggtgatcacacactacaaccggacccgacagcaggaagagatgctggggcttcaagaagaagcaccagcagagaagccagaagaggaagatctcagaaatgaagtgctccagttcagcacaaactgcccagaatgcaatgcccccgctcagaccaacatgaagctagtacaaatccctcactttaaggaggttatcatcatggctaccaactgcgagaactgtgggcatcggaccaatgaggtgaaatctggaggagcagtagaacccttgggcaccaggatcaccctccacatcacagatgcctcagatatgaccagagacctcctcaagtctgagacttgcagtgtggaaatcccagagctagaatttgaactgggaatggcagtcctcgggggcaagttcaccacactggaagggctgctgaaagacatccgggaactggtgaccaaaaatcctttcacactgggcgacagttccaatcctggacagacggagagactacaggagtttagccagaagatggaccagatcatcgaaggtaacatgaaggcccactttattatggatgatccagcaggaaacagttacttgcagaatgtgtatgcgcctgaagatgatcctgagatgaaggtggagcgttacaagcgcacctttgaccaaaatgaggagctagggctcaatgacatgaagacagagggctatgaggcaggcctggctccgcaacggtagcagtgggtggctcaagggccagcctccagcgctgctctttctgtaggttatttattagtattggatgaaggcgaaggctgggagtgtctttcccaccagcccttgcccatggtggggaggacatctggtctgagtcagagatctgtgcacactttctaaacagcttgtgatgcaagtgtgagcctattgtgttacttgaccttattttggaagttttgaattggcctaggaggaaacccagaaatgaaccaggggtatgtcatcacttttttcatatcaagtcctcaccctccttccacataatgctctatcctctaaggttggaactctgaagttggagaaggtggaataaagttacacctgg

SEQ ID NO: 3379 - protein, 459 aa, Homo sapiens
MAASGAVEPGPPGAAVAPSPAPAPPPAPDHLFRPISAEDEEQQPTEIESLCMNCYCNGMTRLLLTKIPFFREIIVSSFSCEHCGWNNTEIQSAGRIQDQGVRYTLSVRALEDMNREVVKTDSAATRIPELDFEIPAFSQKGALTTVEGLITRAISGLEQDQPARRANKDATAERIDEFIVKLKELKQVASPFTLIIDDPSGNSFVENPHAPQKDDALVITHYNRTRQQEEMLGLQEEAPAEKPEEEDLRNEVLQFSTNCPECNAPAQTNMKLVQIPHFKEVIIMATNCENCGHRTNEVKSGGAVEPLGTRITLHITDASDMTRDLLKSETCSVEIPELEFELGMAVLGGKFTTLEGLLKDIRELVTKNPFTLGDSSNPGQTERLQEFSQKMDQIIEGNMKAHFIMDDPAGNSYLQNVYAPEDDPEMKVERYKRTFDQNEELGLNDMKTEGYEAGLAPQR

SEQ ID NO: 3380 - DNA, 952 bp, Homo sapiens
tgaactctggatgctgttagcctgagactcaggaagacaacttctgcagggtcactccctggcttctggaggaaagagaaggagggcagtgctccagtggtacagaagtgagacataatggaatcaggcttcacctccaaggacacctatctaagccattttaaccctcgggattacctagaaaaatattacaagtttggttctaggcactctgcagaaagccagattcttaagcaccttctgaaaaatcttttcaagatattctgcctagacggtgtgaagggagacctgctgattgacatcggctctggccccactatctatcagctcctctctgcttgtgaatcctttaaggagatcgtcgtcactgactactcagaccagaacctgcaggagctggagaagtggctgaagaaagagccagaggcctttgactggtccccagtggtgacctatgtgtgtgatcttgaagggaacagagtcaagggtccagagaaggaggagaagttgagacaggcggtcaagcaggtgctgaagtgtgatgtgactcagagccagccactgggggccgtccccttacccccggctgactgcgtgctcagcacactgtgtctggatgccgcctgcccagacctccccacctactgcagggcgctcaggaacctcggcagcctactgaagccagggggcttcctggtgatcatggatgcgctcaagagcagctactacatgattggtgagcagaagttctccagcctccccctgggccgggaggcagtagaggctgctgtgaaagaggctggctacacaatcgaatggtttgaggtgatctcgcaaagttattcttccaccatggccaacaacgaaggacttttctccctggtggcgaggaagctgagcagacccctgtgatgcctgtgacctcaattaaagcaattcctttgacctgtca

SEQ ID NO: 3381 - protein, 264 aa, Homo sapiens
MESGFTSKDTYLSHFNPRDYLEKYYKFGSRHSAESQILKHLLKNLFKIFCLDGVKGDLLIDIGSGPTIYQLLSACESFKEIVVTDYSDQNLQELEKWLKKEPEAFDWSPVVTYVCDLEGNRVKGPEKEEKLRQAVKQVLKCDVTQSQPLGAVPLPPADCVLSTLCLDAACPDLPTYCRALRNLGSLLKPGGFLVIMDALKSSYYMIGEQKFSSLPLGREAVEAAVKEAGYTIEWFEVISQSYSSTMANNEGLFSLVARKLSRPL

SEQ ID NO: 3382 - DNA, 1397 bp, Homo sapiens
cagatgcagttttctccgcacgtgcgcgccttctctccttcccgccctcagggtccacggccaccatggcgtatcaggggcagcagtacctgtggcagcattggcctttgcagcggcggcagcagcaccaggctctgcagcggcaccccccagcggcttaagccatggcgcttctcagggcattcagcagcagcgttgctgtaaccgacaaagacaccttcgaattaagcacattcctcgattccagcaaagcaccgcaacatgaccgaaatgagcttcctgagcagcgaggtattggtgggggacttgatgtcccccttcgaccagtcgggtttgggggctgaagaaagcctaggtctcttagataactacctggaggtggccaagcacttcaaacctcatgggttctccagggacaaggctaaggcgggcttctccgaatggctggctgtggatgggttaggcagtccctccaataacagcaaggaggatgccttctccgggacagattggatgttggagaaaatggatttgaaggagttcgtctttgatgccctgttgggtatagataacctggaaaccatgccagatgaacttttgaccactttggatgacacttgtgatctctttgcccccctagtccaggagactaataaggagacccccagacggtgaacccaattggccatctcccaggaagtttaacaaaacccgaccaggttgcccccttcaccttcttgcaacctcttcccctttccccaggggtcctgtcctccactccaggtcattcctttagtttagagctgggcagtgaagtggatatcctgaaggagataggaagccagactccactgcttacgttgccatgatccctcagtgcataaaggaggaagacaccccttcagataatgatagtggcatctgtatgagcccagagtcctatctagggtctcctcagcatagcccctctaccaggggctctccaaataggagcctcccatctccaggtgttctctgtgggtctgcccgccccaaaccttacaatcctcctggagagacgatggtagcagcaaaagtaaagggtgagaaactggataagaagttgaaaaaaatggagtaaaacaagacagcagccactgggtaccgccagaagaagagggtggagcaggaggctctcactggtgagtgcaaagagctggaaaagaagaacgaggctctaaaagagagggcggattccctggccaaggagatccagtacctgaaagatttgatagaagaggtccgcaagacaagggggaagaaaagggtcccctagttgacggtagtcaggagcgtcaatgtgcttgtacatggagcctctgctgtagctgtgtgttccaataaattattttgtaggg

SEQ ID NO: 3383 - protein, 137 aa, Homo sapiens [sequence omitted]

SEQ ID NO: 3384 - DNA, 2643 bp, Homo sapiens
ggcagccgtccggggccgccactctcctcggccggtccctggctcccggaggcggccgcgcgtggatgcggcgggagctggaagcctcaagcagccggcgccgtctctgccccggggcgccctatggcttgaagagcctggccacccagtggctccaccgccctgatggatccactgaatctgtcctggtatgatgatgatctggagaggcagaactggagccggcccttcaacgggtcagacgggaaggcggacagaccccactacaactactatgccacactgctcaccctgctcatcgctgtcatcgtcttcggcaacgtgctggtgtgcatggctgtgtcccgcgagaaggcgctgcagaccaccaccaactacctgatcgtcagcctcgcagtggccgacctcctcgtcgccacactggtcatgccctgggttgtctacctggaggtggtaggtgagtggaaattcagcaggattcactgtgacatcttcgtcactctggacgtcatgatgtgcacggcgagcatcctgaacttgtgtgccatcagcatcgacaggtacacagctgtggccatgcccatgctgtacaatacgcgctacagctccaagcgccgggtcaccgtcatgatctccatcgtctgggtcctgtccttcaccatctcctgcccactcctcttcggactcaataacgcagaccagaacgagtgcatcattgccaacccggccttcgtggtctactcctccatcgtctccttctacgtgcccttcattgtcaccctgctggtctacatcaagatctacattgtcctccgcagacgccgcaagcgagtcaacaccaaacgcagcagccgagctttcagggcccacctgagggctccactaaagggcaactgtactcaccccgaggacatgaaactctgcaccgttatcatgaagtctaatgggagtttcccagtgaacaggcggagagtggaggctgcccggcgagcccaggagctggagatggagatgctctccagcaccagcccacccgagaggacccggtacagccccatcccacccagccaccaccagctgactctccccgacccgtcccaccatggtctccacagcactcccgacagccccgccaaaccagagaagaatgggcatgccaaagaccaccccaagattgccaagatctttgagatccagaccatgcccaatggcaaaacccggacctccctcaagaccatgagccgtaggaagctctcccagcagaaggagaagaaagccactcagatgctcgccattgttctcggcgtgttcatcatctgctggctgcccttcttcatcacacacatcctgaacatacactgtgactgcaacatcccgcctgtcctgtacagcgccttcacgtggctgggctatgtcaacagcgccgtgaaccccatcatctacaccaccttcaacattgagttccgcaaggccttcctgaagatcctccactgctgactctgctgcctgcccgcacagcagcctgcttcccacctccctgcccaggccggccagcctcacccttgcgaaccgtgagcaggaaggcctgggtggatcggcctcctcttcaccccggcaggccctgcagtgttcgcttggctccatgctcctcactgcccgcacaccctcactctgccagggcagtgctagtgagctgggcatggtaccagccctggggctgggccccccagctcaggggcagctcatagagtcccccctcccacctccagtccccctatccttggcaccaaagatgcagccgccttccttgaccttcctctggggctctagggttgctggagcctgagtcagggcccagaggctgagttttctctttgtggggcttggcgtggagcaggcggtggggagagatggacagttcacaccctgcaaggcccacaggaggcaagcaagctctcttgccgaggagccaggcaacttcagtcctgggagacccatgtaaataccagactgcaggttggaccccagagattcccaagccaaaaaccttagctccctcccgcaccccgatgtggacctctactttccaggctagtccggacccacctcaccccgttacagctccccaagtggtttccacatgctctgagaagaggagccctcatcttgaagggcccaggagggtctatggggagaggaactccttggcctagcccaccctgctgccttctgacggccctgcaatgtatcccttctcacagcacatgctggccagcctggggcctggcagggaggtcaggccctggaactctatctgggcctgggctaggggacatcagaggttctttgagggactgcctctgccacactctgacgcaaaaccactttccttttctattccttctggcctttcctctctcctgtttcccttcccttccactgcctctgccttagaggagcccacggctaagaggctgctgaaaaccatctggcctggcctggccctgccctgaggaaggaggggaagctgcagcttgggagagcccctggggcctagactctgtaacatcactatccatgcaccaaactaataaaactttgacgagtcaccttccaggacccctgggtaaaaaaaaaaaaaaa

SEQ ID NO: 3385 - protein, 443 aa, Homo sapiens
MDPLNLSWYDDDLERQNWSRPFNGSDGKADRPHYNYYATLLTLLIAVIVFGNVLVCMAVSREKALQTTTNYLIVSLAVADLLVATLVMPWVVYLEVVGEWKFSRIHCDIFVTLDVMMCTASILNLCAISIDRYTAVAMPMLYNTRYSSKRRVTVMISIVWVLSFTISCPLLFGLNNADQNECIIANPAFVVYSSIVSFYVPFIVTLLVYIKIYIVLRRRRKRVNTKRSSRAFRAHLRAPLKGNCTHPEDMKLCTVIMKSNGSFPVNRRRVEAARRAQELEMEMLSSTSPPERTRYSPIPPSHHQLTLPDPSHHGLHSTPDSPAKPEKNGHAKDHPKIAKIFEIQTMPNGKTRTSLKTMSRRKLSQQKEKKATQMLAIVLGVFIICWLPFFITHILNIHCDCNIPPVLYSAFTWLGYVNSAVNPIIYTTFNIEFRKAFLKILHC

SEQ ID NO: 3386 - DNA, 2222 bp, Homo sapiens
gatgctgataaagagaaagatttgcagaaatttcttaaaaatgtggatgaaatctccaatttaattcaggagatgaattctgatgacccagttgtgcaacagaaagctgtcctggagacagaaaagagactactgcttatggaggaagaccaggaggaggatgaatgcaggaccaccttgaacaagactatgatcagtcctccacaaactgctatgaagagtgcagaagaaataaactcagaggccttcttggcatctgtggagaaggatgcaaaggaacgagccaagagaagaagggaaaacaaagtcttggcggatgccctaaaagaaaaagggaatgaagcatttgctgaaggcaattatgaaacagctatcctgcgctacagtgagggtttggagaagctgaaggacatgaaagtgctgtacaccaaccgagcccaggcttatatgaaacttgaggactatgagaaggcactggtggattgtgagtgggctctcaagtgtgatgaaaaatgcacaaaagcatattttcacatgggaaaagccaacctggccctgaagaactacagtgtgtctagagagtgttataagaagatcttagaaataaaccccaagctgcaaacccaggtgaaaggttacctgaatcaagtagatcttcaggaaaaagcagaccttcaagaaaaggaagcccacgaactgctggattcaggaaagaacacagccgtgaccaccaagaacctcctggagaccctttccaagcctgaccagatccccttgttctatgctggggggattgagatcctgactgaaatgataaatgagtgcacagaacaaactttattcagaatgcacaatggatttagtatcatcagtgacaacgaggtcataagaaggtgtttttccacagcaggaaatgatgcagttgaagaaatggtctgtgtgtctgttctcaagctctggcaagcagtgtgcagcaggaacgaggaaaaccagcgtgtgctagtgatacaccatgacagggccaggctgttggccgccctcttgtcctccaaggtcctggccatccggcagcagagctatgccctgctgctgcatctcgcccagactgagagcggacggagcctgatcatcaaccaccttgacctgaccagattattggaagcgctggtgtcatttcttgatttctcggataaggaggccaacactgctatgggactgttcacagacttggctctggaagaaagattccaagtctggttccaggccaaccttccaggtgttctccctgcactcacaggcgttctgaagacagatcccaaggtaagcagctcctcggctctgtgccagtgcattgccatcatgggaaacctcagtgctgagcccactacccgaagacacatggcggcctgtgaggaatttggggatggctgcttgagcctcctggccaggtgtgaggaggatgtggacctgttcagagaggttatctacacactcctgggactcatgatgaacctgtgtcttcaggctccctttgtctctgaggtttgggctgtggaggtgagcagaaggtgcctgtctttactaaacagccaggatggaggaatcctgacaagagctgctggtgttctgagccggaccctttcttcctctctgaaaattgttgaggaggccttgcgagcaggagtggtaaagaaaatgatgaaattcctgaagacaggaggtgagactgcatcacgttatgctataaagatactagctatctgcacgaatagttatcatgaagctcgggaagaagtaataagactggataaaaagttgagcgttatgatgaagctgctcagctcggaggatgaggttctggtgggcaacgctgccctctgccttggtaactgcatggaggtgcccaacgttgcgtcttccctgctaaagacggaccttttgcgggtcttgttaaagcttgcaggcagtgacacacagaagacggccgtgcaggtgaacgcaggcattgctctggggaagctgtgcacagctgagcccagatttgctgctcaactgagaaagcttcatggcctagaaattctcaactctacgatgaaatacatcagtgattcttgagagagacagggtttgtgtgcatttggggaacacacagatgcacaccgtgtgttgttcctatgctaataaagacctttgatgtatccacttcaaaaaaaaaaaaaaaa

SEQ ID NO: 3387 - protein, 680 aa, Homo sapiens
MNSDDPVVQQKAVLETEKRLLLMEEDQEEDECRTTLNKTMISPPQTAMKSAEEINSEAFLASVEKDAKERAKRRRENKVLADALKEKGNEAFAEGNYETAILRYSEGLEKLKDMKVLYTNRAQAYMKLEDYEKALVDCEWALKCDEKCTKAYFHMGKANLALKNYSVSRECYKKILEINPKLQTQVKGYLNQVDLQEKADLQEKEAHELLDSGKNTAVTTKNLLETLSKPDQIPLFYAGGIEILTEMINECTEQTLFRMHNGFSIISDNEVIRRCFSTAGNDAVEEMVCVSVLKLWQAVCSRNEENQRVLVIHHDRARLLAALLSSKVLAIRQQSYALLLHLAQTESGRSLIINHLDLTRLLEALVSFLDFSDKEANTAMGLFTDLALEERFQVWFQANLPGVLPALTGVLKTDPKVSSSSALCQCIAIMGNLSAEPTTRRHMAACEEFGDGCLSLLARCEEDVDLFREVIYTLLGLMMNLCLQAPFVSEVWAVEVSRRCLSLLNSQDGGILTRAAGVLSRTLSSSLKIVEEALRAGVVKKMMKFLKTGGETASRYAIKILAICTNSYHEAREEVIRLDKKLSVMMKLLSSEDEVLVGNAALCLGNCMEVPNVASSLLKTDLLRVLLKLAGSDTQKTAVQVNAGIALGKLCTAEPRFAAQLRKLHGLEILNSTMKYISDS

SEQ ID NO: 3388 - DNA, 1395 bp, Homo sapiens
aaatattcaggaaacaaaaatcactcaaacggaatcgaagccttttaacaaagaaaatgaaatacagatgatgatgatgatgatgaagatgatgctaagtaaacagaaatcagtactccgcatgcgctcctctcctaaggtacaaagcagcaagaggttagggtggcaaggctgcctctgggtccattctgtgggccactctccccaacgttctgacacttctgcagtctgatcagtggcgatgctagattataatttcaaactgtgaagaataatggtcttgtcatttgctcaatgtggggttatgttgcattttctcagctcctggggatggaaatggaggatcccagaacacacagccctggcccctttgattctagggcctgcacagatctctggttcaaatgcacaggccctcagaatagaggaacatgaagagagatcttagagcacacagtagaatgtgagagcctgggtgtctgagaccgggagggcccagcagtgaggggcaggctcttctggtcaccaggctgttcagtggactcagttcttcatcttgtaatgtcgatggctttgccacaccaggccaagcccatgccataccttgtcaagactgtcaaagtggttgtggttaggtcaaactggttttggttctgatggttaggaagaaacaggtcagccctcagatcacctggcccgggacagctgaccccctagaaccctggctctgccattagctaggacctaagactctgcccacattttggtctgttctctcccattacacataggtttgtctcagcatgcaagagtttttcctttaaaaaaaaaaaaaaaaaaaaaaaaaaagcaatgctttctctaaaatcaaagagggagtcattttattccaagatgttttatcttttatgttaagagatcaaagcttataattttcttttttaatttttgaaggagggatcaactccagtttccaatgtctatgtgtctatgtgtgtatgtgccatacatatgtattcacatgaagaccggcatggccaagttctgctggaggagcactcaagtgtgacgagcagggccactggaccctgcagggctgtggtgtatatagtgcagctttggaggtggaactctattttcacacttttctatggagccttccgagtcccaggttttcacttgaggctgtctgtctggatggcggttttcagacctccattaacatccctacccagcattctgtacttcgggggccttctctcttgttataaaactttttaccaagtgaaacatcgataccacctttgtttccattctcactggtgtaaatactgagtactaactgagaattttgactttgcattctgtcggaatacttgtgttcaataaaaattg

SEQ ID NO: 3389 - protein, 114 aa, Homo sapiens
MCVCAIHMYSHEDRHGQVLLEEHSSVTSRATGPCRAVVYIVQLWRWNSIFTLFYGAFRVPGFHLRLSVWMAVFRPPLTSLPSILYFGGLLSCYKTFYQVKHRYHLCFHSHWCKY

SEQ ID NO: 3390 - DNA, 1313 bp, Homo sapiens
ccaggaacgagatggcggttctctggaggctgagtgccgtttgcggtgccctaggaggccgagctctgttgcttcgaactccagtggtcagacctgctcatatctcagcatttcttcaggaccgacctatcccagaatggtgtggagtgcagcacatacacttgtcaccgagccaccattctggctccaaggctgcatctctccactggactagcgagagggttgtcagtgttttgctcctgggtctgcttccggctgcttatttgaatccttgctctgcgatggactattccctggctgcagccctcactcttcatggtcactggggccttggacaagttgttactgactatgttcatggggatgccttgcagaaagctgccaaggcagggcttttggcactttcagctttaacctttgctgggctttgctatttcaactatcacgatgtgggcatctgcaaagctgttgccatgctgtggaagctctgacctttttgacttcatactttgaagaattgatgtatgcctctttgcctctgctttgtcatgccattaagctcacaataaggaagaaataacagataagtccattggtggacagccttcttctcttaatcacaagattattttcagaatttaatctttgaggaaaaggtttgagaggaattatatctaagttgtgagactgagttctatattctggtgagttaatggggttgcctcccagcttcttataagactcacagtataactaaacatgatatatcagcttttgcctttcaatttatcaatctcttaaagagaatccaactttattacgattagtatatgatcaaacttccatatttgccttgggaataatggacaaagggaaatactcttaattcatgaataaaaactttgcagaaaattagacagtgtttaattttcgaaaacttccctctctagacagtagataccacctactgatggttacatatactagggaaattttaaaattaggaaatgctgatagctcatattataaatttctaaatcctaggaagaaacgcttggagtgcttctgaatatacagaagttccatttaagggcaagtttccccgtagatgtatcaaaatactaccaactgtaaattgagatttaattcccaaatgtattctacttgttctaaaacaatctgtccacaaatataaaactataagtaataaattgttattttcgcacaatgggaatctctaatgtgaaaatgtattctatgaaaataattttttaaataaaatgttatataataaaagtgtcttctatgctttt

SEQ ID NO: 3391 - protein, 159 aa, Homo sapiens
MAVLWRLSAVCGALGGRALLLRTPVVRPAHISAFLQDRPIPEWCGVQHIHLSPSHHSGSKAASLHWTSERVVSVLLLGLLPAAYLNPCSAMDYSLAAALTLHGHWGLGQVVTDYVHGDALQKAAKAGLLALSALTFAGLCYFNYHDVGICKAVAMLWKL

SEQ ID NO: 3392 - DNA, 3204 bp, Homo sapiens
ccgtgagtctgaccttaggtgtctcgtgtctggggttgatccgagctgtcgccgccgccgccgcaatgggcaaaacggccaactctccgggttcgggagcccgacccgacccggtgcggagcttcaatcgctggaagaaaaaacacagccataggcagaacaaaaagaagcagttgaggaagcaactgaagaaacccgaatggcaggtcgagcgcgagagtatcagccgcctcatgcagaactatgaaaagataaatgtaaatgaaatcacaagattttcagattttcccttgtccaaaaaaacattgaaaggtttgcaagaagctcagtaccgtttggtgactgagatacagaagcagaccattggattggctttgcaaggtaaagatgtacttggagcggccaaaactggatctggcaagactctggcttttcttgttccagtgctggaagccttatatcgtctgcaatggacttcaacagatgggctgggggttctcataatatcacctacgagagaactggcctatcagacctttgaggttctccgaaaagtaggaaagaatcatgacttctcagctggtctcatcattggtggaaaggatctaaaacacgaagctgagaggatcaacaacataaatatactcgtgtgcacaccaggtcggcttcttcaacacatggatgaaacagtatcttttcatgctaccgacctccaaatgttagttcttgatgaagcagatagaatcttggatatgggctttgctgataccatgaatgctgttattgaaaatctccccaagaaacgtcagactttacttttctcagcaacacaaactaaatctgtaaaggaccttgcacgcttgagtttgaaaaaccctgagtatgtctgggttcatgaaaaagcaaaatatagcacccctgccactttggaacagaactacatagtctgtgagctgcagcaaaaaataagtgtgctgtattcctttttgagaagccatctgaagaagaagagcattgtatttttttccagttgcaaagaggtccagtatctgtaccgagtgttttgccggctacgtcctggtgtttctatccttgcactccatggtcgacagcagcaaatgagaagaatggaagtctataatgagtttgtccgtaagagagctgcagtactctttgctactgatattgcagccaggggtctggatttcccggccgtgaattgggttcttcagtttgattgtcctgaggatgccaacacatatattcacagagcaggtagaactgccaggtacaaagaggatggtgaagctttgctaattttgctaccctcagaaaaagctatggtgcagcagcttcttcagaagaaagtacctgtgaaggaaatcaaaatcaatccagaaaaacttatagatgtccagaaaaaattggaatctattttagctcaagatcaagatttaaaagaaagagctcaaaggtgtttcgtctcctatgtacgatctgtatatctgatgaaggataaagaagtatttgatgtgagcaagttacctatacctgaatatgccctgtctcttggtcttgctgtggcaccacgcgtaagatttcttcagaaaatgcagaaacaacccaccaaagaattggtaaggagccaagccgataaagtaattgagccaagggctccctccctcaccaatgacgaagtggaagaatttagagcctacttcaatgagaaaatgtccatccttcaaaaaggtggaaaaagactcgaagggacagagcacagacaggataatgatactggtaatgaagaacaggaagaagaagaagacgatgaagaagaaatggaagagaaactggcaaaagcaaaaggatctcaagccccatctcttcctaacaccagtgaggcacagaagatcaaggaagttcctacacagttcttggacagagatgaggaggaagaagatgctgatttcttgaaggtgaagcggcataatgtgtttggattggaccttaaagacgagaaaacattacagaagaaagaaccttctaaatccagcatcaagaaaaaaatgaccaaagttgcagaagcaaaaaaagtaatgaagagaaattttaaagtgaataagaagataacatttactgatgaaggggagttggttcagcagtggccacaaatgcagaaatctgccatcaaggatgctgaggaagatgatgacacaggtggtatcaacttacataaagcaaaggaaagacttcaggaagaggacaaatttgacaaagaagaatataggaaaaaaattaaggcaaagcatcgggagaaaagactgaaagaaagggaagccagaagagaagccaacaagagacaagcaaaggccaaagatgaagaggaagcctttctggattggagtgatgatgatgatgatgatgatgatggatttgatccaagcacactcccagatccagataaatacagaagctctgaagattcagatagtgaagatatggaaaataaaataagtgataccaagaagaagcaggggatgaagaagaggagcaacagtgaagtggaagacgtgggaccaacaagtcataacagaaagaaggccaggtgggacactttagagcctttggataccggcctgtctttagcagaggatgaagagctggtgttacatctgctaagaagtcaaagctaaatacttcctgcgcctgccttctccttgaaaccttggttatgactgcgtaggcaagaagttgaaaaacagttgatttgggggcacttaggtaccatatgccccattcccaaagggcacatttctggatagaagcgatcgtatctccaagtccctctcacaggacatgctttgtgccatcactgagcatactcagatcgagggtggatgataccatttcctgaccccgttttccagcatgtgttctgttagatttttatccatgggttcctacgccttgtcattggaaacactgcctttgtcttactggcaagttctggagctcttgtgtcattgttagaaatccctgtcttgcttactgtacagaagtttctgttgctgttaaaattgctcatgatttcgacgtatttaatattttcaaagagactatgatggaccagccctgagaaagaatgagtatttttgaattgagatgatcaataataaacatatttcctataaaaaaaaaaaaaaa

SEQ ID NO: 3393 - protein, 875 aa, Homo sapiens
MGKTANSPGSGARPDPVRSFNRWKKKHSHRQNKKKQLRKQLKKPEWQVERESISRLMQNYEKINVNEITRFSDFPLSKKTLKGLQEAQYRLVTEIQKQTIGLALQGKDVLGAAKTGSGKTLAFLVPVLEALYRLQWTSTDGLGVLIISPTRELAYQTFEVLRKVGKNHDFSAGLIIGGKDLKHEAERINNINILVCTPGRLLQHMDETVSFHATDLQMLVLDEADRILDMGFADTMNAVIENLPKKRQTLLFSATQTKSVKDLARLSLKNPEYVWVHEKAKYSTPATLEQNYIVCELQQKISVLYSFLRSHLKKKSIVFFSSCKEVQYLYRVFCRLRPGVSILALHGRQQQMRRMEVYNEFVRKRAAVLFATDIAARGLDFPAVNWVLQFDCPEDANTYIHRAGRTARYKEDGEALLILLPSEKAMVQQLLQKKVPVKEIKINPEKLIDVQKKLESILAQDQDLKERAQRCFVSYVRSVYLMKDKEVFDVSKLPIPEYALSLGLAVAPRVRFLQKMQKQPTKELVRSQADKVIEPRAPSLTNDEVEEFRAYFNEKMSILQKGGKRLEGTEHRQDNDTGNEEQEEEEDDEEEMEEKLAKAKGSQAPSLPNTSEAQKIKEVPTQFLDRDEEEEDADFLKVKRHNVFGLDLKDEKTLQKKEPSKSSIKKKMTKVAEAKKVMKRNFKVNKKITFTDEGELVQQWPQMQKSAIKDAEEDDDTGGINLHKAKERLQEEDKFDKEEYRKKIKAKHREKRLKEREARREANKRQAKAKDEEEAFLDWSDDDDDDDDGFDPSTLPDPDKYRSSEDSDSEDMENKISDTKKKQGMKKRSNSEVEDVGPTSHNRKKARWDTLEPLDTGLSLAEDEELVLHLLRSQS

SEQ ID NO: 3394 - DNA, 2848 bp, Homo sapiens
attcagtaaaccactgggagtccggcagcatgaaggcagcgcgccctcccatgactgcagggaagttcatggtggtcggcggcggcatcgcgggcgtcacttgtgcggagcagttggctactcactttccatcagaagatattctcttggtaacagcttctcctgttatgaaagcagttacaaatttcaagcagatttctaaaatattggaagaatttgatgttgaagaacaatcaagtaccatgttagaaaaacgctttcccaacatcaaggttatagaatctggcgtaaagcaactgaagagtgaagaacactgcattgtaacagaagatggcaatcagcatgtatataagaaactctgtgtgctggagctaaaccaaagttgatatgtgaaggaaatccttatgtattaggaatccgtgatacagacagtgctcaggaatttcagaaacagcttactaaagctaaaagaataatgatcttagggaacggtggtatcgcacttgagttagtgtatgaaattgaaggctgtgaagtgatttgggccattaaagataaagctatagggaatactttcttcgatgcaggagcagctgaattcttgacttcaaagctcattgctgaaaaatcagaggctaaaattgcatataaaagaaccagatatacaactgaaggaaggaaaaaggaagctagaagcaaatctaaatcagataatgtaggcagtgcgttgggaccagattggcatgaaggcttgaatcttaaaggaacaaaagagttttctcataagattcaccttgaagctatgtgtgaagtaaagaaaatctaccttcaggatgagtttagaattttgaagaaaaagtccttcacttttccaagagaccatacgtcagttacaactaatacagagatgtggcctgtctatgtggaattgaccaatgaaaagatatatggctgcgatttcattgtcagtgctacaggagttacaccgaatatagaaccttttctccatggtaacagttttgatctaggagaagatggtggcctgaaagtggatgatcatatgcacacatcccttcctgatatctatgctgccggtgacatctgtactacatcctggcagctgagcccagtctggcagcagatgaggctgtggacccaggctagacagatgggatggtatgcagcaaagtgcatggctgcagcgagttcaggagactctattgacatggatttcagctttgaactgtttgctcatgtgacaaaattttttaactataaggttgtactgctgggaaaatacaatgcacagggcttaggttcagatcatgaattaatgctgagatgtaccaaaggacaagaatacatcaaagtcgtcatgcaaaatggacgaatgatgggagctttcttaattggtgaaactgatttagaagaaacatttgaaaacctaatcttaaaccaaatgaatctttcatcatatggagaagatctgctagatccaaatattgatatagaagattattttgactaaaaatggaatttcttcaagaatcatataaagttccaaatgacaccagaaaaatcacaagtcaataaaatgaatgactgtattgagttaatgatgaccacactgaaaattacagaagtgataatgatattagtggaaaaatataaaaacataaattctaagtttgaaatcagttcaaagtttatttatagatatatctttccaatacaacactgaccacttggataaaaatcttaagttatttatttctgtgttttaaacataaatatgtttacttgtgatttagctttggagcaaatttaggtaagttatctatttagccaaatgtactctagtagattagaaccattctttgtgaaatgtcaaaatatggctgtggtttcaggaactttaaaatcggttgtattttactttaaatagagatgtagcaatatctcgtttgctaatatttatattgatgacttactccttttttgttgaattgtacttctggttttataacctgaaatcatctacaagcttgtccaactctagcccacgggtcgaatgcagcccaggacagctttgaatgcagcccaacacaaatttgtaaactttcttaaaacttgagatttttcttgcaatttttttttaagcttatcagctatcgtcagtgttagcatgttttatgtgcggcccaagacaattcttcttccagtgtggctcagggaagccaaaagattggacatccctgatctacatatttaacttaaagtatcactcagtgagcctctgtcagtgtaatattgctttcaaaaagatagttatgtcaaaagaaaaaatatagctaagtatataaaggcataaaaaacttaagacaattatatggacttattctcaaatattttacattttttgtaaactttcttaaaacatgagatttttcttgcaattttttttttaagctcatcagctgtcatcagtgttagcatattttatgtgaggcccaagacaattcttcttccaatgtggctcagggaagccaaaagattggacatccctgatctacatatttaacttaaagtatcactcattgaaattcttttaaaaactattgtctaactacaaaaatagtggcatatacatgcataaaccatctttaattagaaaatttagtaacattcatgtcaggcatcatcgatttttcttttcttagctcctgtattcttagaaccagattgctgaagcatgtttgcagccttcttctggaagttgcctgaatttttttcctccatctttttatcaccttgttcagaatgacaagtttgagacgattcagcctac

SEQ ID NO: 3395 - DNA, 1286 bp, Homo sapiens
ggcacgaggctgccgcgctgtccgcgttatctcctcccggtgagaacgaaccgcagtgtccaccggcgaggagccagccctgtcccggtcagagaaagacgacgaggatacctgggagcgggcggcggccgggctgggccgcgccggtgcgggctggcgactctgctcctccgcttgctgctgtctctgggaactgggtgccagcgctgaggggcttccagcggacagggacccccttccccggctcccctgcccaccctgccggggagggcggaagatgccggtgaagaagaagagaaaatcccctggggtggcagcagcagtagcggaagacggaggcctcaaaaagtgtaaaatctccagctattgcagatcccaaccccctgctagactaataagtggagaggaacatttttcaagcaagaagtgcctggcttggttttatgaatatgcaggtcctgatgaagttgtagggccagaaggaatggaaaaattttgtgaagacattggtgttgaacctgaaaatattattatgttagttttagcgtggaaattggaggctgaaagcatgggattttttaccaaggaagaatggttaaagggaatgacttcattacagtgtgactgcacagaaaagttacaaaacaaatttgactttttgcgctcacagttgaatgatatttcgtcatttaagaatatctacagatatgcctttgattttgcaagggataaagatcagagaagccttgatattgatactgctaaatctatgttagctcttctgcttgggaggacatggccactgttttcagtattttaccagtacctggagcaatcaaagtatcgtgttatgaacaaagatcaatggtacaatgtattagaattcagcagaacagtccatgctgatcttagtaactatgatgaagatggtgcttggcctgttcttcttgatgaatttgttgagtggcaaaaagtccgtcagacatcatagcaagaactatgtgaagaaaatgcaaacctttcaattcccacgtgtatacaagctaatgtgatgagggggaaaaaaatccaacgggtgcattttcattcatatgaaagacttctcatagtacttttttttcctttttttaaaggaggtttttcttgttacatgtgatgggcattgagccacacctcttcttagactgaatattgaagtttttgttttgagttatgtttataacatttatttcagaacaataaagattcagatttgtgaaaaaaaaaaaaaaaaaaaaaaaaaaaaa

SEQ ID NO: 3396 - protein, 237 aa, Homo sapiens
MPVKKKRKSPGVAAAVAEDGGLKKCKISSYCRSQPPARLISGEEHFSSKKCLAWFYEYAGPDEVVGPEGMEKFCEDIGVEPENIIMLVLAWKLEAESMGFFTKEEWLKGMTSLQCDCTEKLQNKFDFLRSQLNDISSFKNIYRYAFDFARDKDQRSLDIDTAKSMLALLLGRTWPLFSVFYQYLEQSKYRVMNKDQWYNVLEFSRTVHADLSNYDEDGAWPVLLDEFVEWQKVRQTS

SEQ ID NO: 3397 - DNA, 3321 bp, Homo sapiens
cccagcccggccccgccgccccggctgcgcacgcgacgccccctccaggccccgctcctgcgccctatttggtcattcggggggcaagcggcgggaggggaaacgtgcgcggccgaaggggaagcggagccggcgccggctgcgcagaggagccgctctcgccgccgccacctcggctgggagcccacgaggctgccgcatcctgccctcggaacaatgggactcggcgcgcgaggtgcttgggccgcgctgctcctggggacgctgcaggtgctagcgctgctgggggccgcccatgaaagcgcagccatggcggagactctccaacatgtgccttctgaccatacaaatgaaacttccaacagtactgtgaaaccaccaacttcagttgcctcagactccagtaatacaacggtcaccaccatgaaacctacagcggcatctaatacaacaacaccagggatggtctcaacaaatatgacttctaccaccttaaagtctacacccaaaacaacaagtgtttcacagaacacatctcagatatcaacatccacaatgaccgtaacccacaatagttcagtgacatctgctgcttcatcagtaacaatcacaacaactatgcattctgaagcaaagaaaggatcaaaatttgatactgggagctttgttggtggtattgtattaacgctgggagttttatctattctttacattggatgcaaaatgtattactcaagaagaggcattcggtatcgaaccatagatgaacatgatgccatcatttaaggaaatccatggaccaaggatggaatacagattgatgctgccctatcaattaattttggtttattaatagtttaaaacaatattctctttttgaaaatagtataaacaggccatgcatataatgtacagtgtattacgtaaatatgtaaagattcttcaaggtaacaagggtttgggttttgaaataaacatctggatccttatagaccgttcatacaatggttttagcaagttcatagtaagacaaacaagtcctatctttttttttttggctggggtgggggcattggtcacatatgaccagtaattgaaagacgtcatcactgaaagacagaatgccatctgggcatacaaataagaagtttgtcacagcactcaggattttgggtatcttttgtagctcacataaagaacttcagtgcttttcagagctggatatatcttaattactaatgccacacagaaattatacaatcaaactagatctgaagcataatttaagaaaaacatcaacattttttgtgctttaaactgtagtagttggtctagaaacaaaatactccaagaaaaagaaaattttcaaataaaacccaaaataatagctttgcttagccctgttagggatccattggagcattaaggagcacatatttttattaacttcttttgagctttcaatgttgatgtaatttttgttctctgtgtaatttaggtaaactgcagtgtttaacataataatgttttaaagacttagttgtcagtattaaataatcctggcattatagggaaaaaacctcctagaagttagattatttgctactgtgagaatattgtcaccactggaagttactttagttcatttaattttaattttatattttgtgaatattttaagaactgtagagctgctttcaatatctagaaatttttaattgagtgtaaacacacctaactttaagaaaaagaaccgcttgtatgattttcaaaagaacatttagaattctatagagtcaaaactatagcgtaatgctgtgtttattaagccagggattgtgggacttcccccaggcaactaaacctgcaggatgaaaatgctatattttctttcatgcactgtcgatattactcagatttggggaaatgacatttttatactaaaacaaacaccaaaatattttagaataaattcttagaaagttttgagaggaatttttagagaggacatttcctccttcctgatttggatattccctcaaatccctcctcttactccatgctgaaggagaagtactctcagatgcattatgttaatggagagaaaaagcacagtattgtagagacaccaatattagctaatgtattttggagtgttttccattttacagtttatattccagcactcaaaactcagggtcaagttttaacaaaagaggtatgtagtcacagtaaatactaagatggcatttctatctcagagggccaaagtgaatcacaccagtttctgaaggtcctaaaaatagctcagatgtcctaatgaacatgcacctacatttaataggagtacaataaaactgttgtcagcttttgttttacagagaacgctagatattaagaattttgaaatggatcatttctacttgctgtgcattttaaccaataatctgatgaatatagaaaaaaatgatccaaaatatggatatgattggatgtatgtaacacatacatggagtatggaggaaattttctgaaaaatacatttagattagtttagtttgaaggagaggtgggctgatggctgagttgtatgttactaacttggccctgactggttgtgcaaccattgcttcatttctttgcaaaatgtagttaagatatactttattctaatgaaggccttttaaatttgtccactgcattcttggtatttcactacttcaagtcagtcagaacttcgtagaccgacctgaagtttctttttgaatacttgtttctttagcactttgaagatagaaaaaccactttttaagtactaagtcatcatttgccttgaaagtttcctctgcattgggtttgaagtagtttagttatgtctttttctctgtatgtaagtagtataatttgttactttcaaatacccgtactttgaatgtaggtttttttgttgttgttatctataaaaattgagggaaatggttatgcaaaaaaatattttgctttggaccatatttcttaagcataaaaaaaatgctcagttttgcttgcattccttgagaatgtatttatctgaagatcaaaacaaacaatccagatgtataagtactaggcagaagccaattttaaaatttccttgaataatccatgaaaggaataattcaaatacagataaacagagttggcagtatattatagtgataattttgtattttcacaaaaaaaaagttaaactcttcttttctttttattataatgaccagcttttggtatttcattgttaccaagttctatttttagaataaaattgttctccttctaaaa

SEQ ID NO: 3398 - DNA, 1373 bp, Homo sapiens
cacacagcctactttccaagcggagccatgtttggtaacggcaatgcggctgcaacggcggaagaaaacagcccaaagatgagagtgattcgcgtgggtacccgcaagagccagcttgctcgcatacagacggacagtgtggtggcaacattgaaagcctcgtaccctggcctgcagtttgaaatcattgctatgtccaccacaggggacaagattcttgatactgcactctctaagattggagagaaaagcctgtttaccaaggagcttgaacatgccctggagaagaatgaagtggacctggttgttcactccttgaaggacctgcccactgtgcttcctcctggcttcaccatcggagccatctgcaagcgggaaaaccctcatgatgctgttgtctttcacccaaaatttgttgggaagaccctagaaaccctgccagagaagagtgtggtgggaaccagctccctgcgaagagcagcccagctgcagagaaagttcccgcatctggagttcaggacgggggaaacctcaacacccggcttcggaagctggactattatctcgagttcagtgccatcatcctggcaacagctggcctgcagcgcatgggctggcacaaccgggtggggcagatcctgcaccctgaggaatgcatgtatgctgtgggccagggggccttgggcgtggaagtgcgagccaaggaccaggacatcttggatctggtgggtgtgctgcacgatcccgagactctgcttcgctgcatcgctgaaagggccttcctgaggcacctggaaggaagctgcagtgtgccagtagccgtgcatacagctatgaaggatgggcaactgtacctgactggaggagtctggagtctagacggctcagatagcatacaagagaccatgcaggctaccatccatgtccctgcccagcatgaagatggccctgaggatgacccacagttggtaggcatcactgctcgtaacattccacgagggccccagttggctgcccagaacttgggcatcagcctggccaacttgttgctgagcaaaggagccaaaaacatcctggatgttgcacggcagcttaacgatgcccattaactggtttgtggggcacagatgcctgggttgctgctgtccagtgcctacatcccgggcctcagtgccccattctcactgctatctggggagtgattaccccgggagactgaactgcagggttcaagccttccagggatttgcctcaccttggggccttgatgactgccttgcctcctcagtatgtgggggcttcatctctttagagaagtccaagcaacagcctttgaatgtaaccaatcctactaataaaccagttctgaaggt

SEQ ID NO: 3399 - DNA, 1591 bp, Homo sapiens
acagcagttacactgcggcgggcgtctgttctagtgtttgagccgtcgtgcttcaccggtctacctcgctagcatgtcgggccgcggcaagactggcggcaaggcccgcgccaaggccaagtcgcgctcgtcgcgcgccggcctccagttcccagtgggccgtgtacaccggctgctgcggaagggccactacgccgagcgcgttggcgccggcgcgccagtgtacctggcggcagtgctggagtacctcaccgctgagatcctggagctggcgggcaatgcggcccgcgacaacaagaagacgcgaatcatcccccgccacctgcagctggccatccgcaacgacgaggagctcaacaagctgctgggcggcgtgacgatcgcccagggaggcgtcctgcccaacatccaggccgtgctgctgcccaagaagaccagcgccaccgtggggccgaaggcgccctcgggcggcaagaaggccacccaggcctcccaggagtactaagagggcccgcgccgcggccggccgccaggcctccccatgccaccacaaagccctttttaagggccaccaccgccctcatggaaagagctgagccgcttcagactgcggggcaagcgggccgcggctcccttcccctcccctcccctcgcccgccttcgccgcccggcctcgagtccccgcccgcccccgctcccgtcccgcaccgcctgccgcgtcggcctcgggccctgccctgtccgccgtccgccctccggtagggttcgggccttccggatgcggcttgggcgctcttcggggacctccgtggcgcggaagacccgagcctgccggggggaggccggcggcgccgcacctgcccgcctcggcgttcgtgactcagccgccccatcccgagtcgctaaggggctgcggggaggccgcagcaccttctggaagacttggccttccgctctgacgcagggccgaggtgggcagtccaggccgagaggccggcggccctgaaggtgagtgaggccctcggcagctgcagccggggtgtctggtacccccccggcgtggtgcttagcccagaattttcagacgcggcggctggccgggaggctttggtgggagagacgcgatccccaatttcggtctggcgccctttctgcggccgggacccaggcctttcacatcagctctccctccatcttcattcataggtctgcgctggggccgggacgaaccacttggtaacaggcacatcttcctcccgagtgactgcctcctaggaggacatttaggggagggcagaggcctgcagtttggcttcacggctggctatgtggacagcaagagtcgttttcgcggaagccgactggcagccaggcctgtcgggccccccgacgccgccccatttcccttccagcaaactcaactcggcaatccaagcacctagataccagcacaagtcggttaatccctgtctggactgagcctccgttggcttctgaactggaattctgcagctaacccttccacgactagaaccttaggcattggggagttttagatggactaattttattaaaggattgtttttttttt

SEQ ID NO: 3400 - DNA, 1700 bp, Homo sapiens
cggaattgcccatgccgctgctgatcaatttgatcgtctcgctgctgggatttgtggccacagtcaccctcatcccggccttccggggccacttcattgctgcgcgcctctgtggtcaggacctcaacaaaaccagccgacagcagatcccagaatcccagggagtgatcagcggtgctgttttccttatcatcctcttctgcttcatccctttccccttcctgaactgctttgtgaaggagcagtgtaaggcattcccccaccatgaatttgtggccctgataggtgccctccttgccatctgctgcatgatcttcctgggctttgcggatgatgtactgaatctgcgctggcgccataagctgctgctacatacagctgcctcactacctctcctcatggtatatttcaccaactttggcaacacgaccattgtggtgcccaagcctttccgcccgatacttggcctgcatctggacttgggaatcctgtactatgtctacatggggctgctgcagtgttctgtaccaatgccatcaatatcctagcaggaattaacggcctagaggctggccagtcactagtcatttctgcttccatcattgtcttcaacctggtagagttggaaggtgattgtcgggatgatcatgtcttttccctctacttcatgatacccttttttttcaccactttgggattgctctaccacaactggtacccatcacgggtgtttgtgggagataccttctgttactttgctggcatgacctttgccgtggtgggcatcttgggacacttcagcaagaccatgctactattcttcatgccccaggtgttcaacttcctctactcactgcctcagctcctgcatatcatcccctgccctcgccaccgcatacccagactcaatatcaagacaggcaaactggagatgagctattccaagttcaagaccaagagcctctctttcttgggcacctttattttaaaggtggcagagagcctccagctggtgacagtacaccagagtgagactgaagatggtgaattcactgaatgtaacaacatgaccctcatcaacttgctacttaaagtccttgggcccatacatgagagaaacctcacattgctcctgctgctgctgcagatcctgggcagtgccatcaccttctccattcgatatcagctcgttcgactcttctatgatgtctgagtcccttgatcattgtcctttacctcacagtctctaggattcctgactcaggctgacctctctctctggtcccagactgcctccttgcccaggcctctctcactcttcatactcctccagattttgttctcagcattttcctttctctgtgatcattggcatcctgggcgtttcttgccctctgctgactactgattggattttacctatggctttctgcaacttgctactctctccctctccatcccatctttgcagcctcatagggtgggatacagcagctttttttgcagttatccacactcacatttcagagtcctgactctcaaggaaccactggtttttgggatagaacttgggccagggctaggaacacaggctccacggtgacatgtcatttgattgtaaattaagtgttctgattagtaagaactaagcagggggccacatgctctcaatggagacaataaagtgttgtctttttctt
